(19) United States
(12) Patent Application Publication
(10) Pub. No.: US 2009/0215046 A1
(43) Pub. Date: Aug. 27, 2009

(54) Novel nucleotide and amino acid sequences, and assays methods of use thereof for diagnosis of colon cancer

(75) Inventors: Rotem Sorek, Rechovot (IL); Michal Ayalon-Soffer, Ramat-HaSharon (IL); Dvir Dahary, Tel-Aviv (IL); Amit Novik, Beit-HaSharon (IL); Amir Toporik, Azur (IL); Alexander Diber, Richon-LeZion (IL); Guy Kol, Givat Shmuel (IL); Sarah Pollock, Tel-Aviv (IL); Zurit Levine, Herzlia (IL); Gad S. Cojocaru, Ramat-HaSharon (IL); Ronen Shemesh, Modiln (IL); Yossi Cohen, Banstead (GB); Osnat Sella-Tavor, Kfar Kish (IL); Shirley Sameah-Greenwald, Kfar-Saba (IL); Shira Walach, Hod-HaSharon (IL)

Correspondence Address: MINTZ, LEVIN, COHN, FERRIS, GLOVSKY AND POPEO, P.C;ATTN: PATENT INTAKE CUSTOMER NO. 30623, ONE FINANCIAL CENTER, BOSTON, MA, 02111, US

(73) Assignee: COMPUGEN LTD., Tel-Aviv (IL)

(21) Appl. No.: 11/976,324

(22) Filed: Oct. 23, 2007

Related U.S. Application Data
(63) Continuation-in-part of application No. 11/050,875, filed on Jan. 27, 2005, now abandoned.
(60) Provisional application No. 60/620,916, filed on Oct. 22, 2004.
(60) Provisional application No. 60/628,123, filed on Nov. 17, 2004.
(60) Provisional application No. 60/621,131, filed on Oct. 25, 2004.
(60) Provisional application No. 60/628,145, filed on Nov. 17, 2004.
(60) Provisional application No. 60/620,656, filed on Oct. 22, 2004.
(60) Provisional application No. 60/620,975, filed on Oct. 22, 2004.
(60) Provisional application No. 60/539,129, filed on Jan. 27, 2004.

(51) Int. Cl. C12Q 1/68; C07H 21/02; C07K 14/47; C12N 15/63; C12Q 1/02; C07K 17/00; G01N 33/574; C12N 5/06; C12P 21/00

(52) U.S. Cl. 435/6; 536/23.5; 530/300; 435/320.1; 435/325; 435/69.1; 435/7.23; 435/7.92; 435/29; 435/7.1; 530/402

(57) ABSTRACT

Novel markers for colon cancer that are both sensitive and accurate. These markers are overexpressed in colon cancer specifically, as opposed to normal colon tissue. The measurement of these markers, alone or in combination, in patient samples provides information that the diagnostician can correlate with a probable diagnosis of colon cancer. The markers of the present invention, alone or in combination, show a high degree of differential detection between colon cancer and non-cancerous states.

### CROSS-REFERENCE TO RELATED APPLICATION(S)

[0001] This application is a CIP application of application Ser. No. 11/050,875 filed Jan. 27 2005.

[0002] This application is related to Novel Nucleotide and Amino Acid Sequences, and Assays and Methods of use thereof for Diagnosis of Colon Cancer, and claims priority to the below U.S. provisional applications which are incorporated by reference herein:

[0003] Application No. 60/620,916 filed Oct. 22, 2004—Differential Expression of Markers in Colon Cancer

[0004] Application No. 60/628,123 filed Nov. 17, 2004—Differential Expression of Markers in Colon Cancer II

[0005] Application No. 60/621,131 filed Oct. 25, 2004—Diagnostic Markers for Colon Cancer, and Assays and Methods of use thereof.

[0006] Application No. 60/628,145 filed Nov. 17, 2004—Differential Expression of Markers in Pancreatic Cancer II

[0007] Application No. 60/620,656 filed Oct. 22, 2004—Differential Expression of Markers in Prostate Cancer

[0008] Application No. 60/620,975 filed Oct. 22, 2004—Differential Expression of Markers in Brain Cancer

[0009] Application No. 60/539,129 filed Jan. 27, 2004—Methods and Systems for Annotating Biomolecular Sequences.

### FIELD OF THE INVENTION

[0010] The present invention is related to novel nucleotide and protein sequences that are diagnostic markers for colon cancer, and assays and methods of use thereof.

### BACKGROUND OF THE INVENTION

[0011] Colon and rectal cancers are malignant conditions which occur in the corresponding segments of the large intestine. These cancers are sometimes referred to jointly as “colorectal cancer”, and, in many respects, the diseases are considered identical. The major differences between them are the sites where the malignant growths occur and the fact that treatments may differ based on the location of the tumors.

[0012] More than 95 percent of cancers of the colon and rectum are adenocarcinomas, which develop in glandular cells lining the inside (lumen) of the colon and rectum. In addition to adenocarcinomas, there are other rarer types of cancers of the large intestine: these include carcinoid tumors usually found in the appendix and rectum; gastrointestinal stromal tumors found in connective tissue in the wall of the colon and rectum; and lymphomas, which are malignancies of immune cells in the colon, rectum and lymph nodes. As with other malignant conditions, a number of genetic abnormalities have been associated with colon tumors (Bos et al, (1987) Nature 327:293-297; Baker et al, (1989) 244:217-2221; Nishisho et al, (1991) 253:665-669).

[0013] Colorectal cancer is the second most common cause of cancer death in the United States and the third most prevalent cancer in both men and women. Approximately 100,000 patients every year suffer from colon cancer and approximately half that number die of the disease. In large part this death rate is due to the inability to diagnose the disease at an early stage (Wanebo (1993) Colorectal Cancer, Mosby, St. Louis Mo.). In fact, the prognosis for a case of colon cancer is vastly enhanced when malignant tissue is detected at the early stage known as polyps. Polyps are usually benign growths protruding from the mucous membrane. Nearly all cases of colorectal cancer arise from adenomatous polyps, some of which mature into large polyps, undergo abnormal growth and development, and ultimately progress into cancer. This progression would appear to take at least 10 years in most patients, rendering it a readily treatable form of cancer if diagnosed early, when the cancer is localized. Simple removal of malignant polyps (polypectomy) through colonoscopy is now routine, and curing the condition from this procedure is effectively guaranteed. However, early detection of polyps and tumors depends on diligent and ongoing examination of patients at risk. The most reliable detection procedures to date include fecal occult blood tests, sigmoidoscopy, barium enema X-ray, digital rectal exam, and colonoscopy. Normally a malignant colon cancer will not cause noticeable symptoms (e.g., bowel obstruction, abdominal pain, anemia) until it has reached an advanced and far more serious stage of malignancy. At these stages, only risky, traumatic and/or invasive procedures are available, including chemotherapy, radiation therapy, and colonectomy.

[0014] Although current understanding of the etiology of colon cancer is undergoing continual refinement, extensive research in this area points to a combination of factors, including age, hereditary and non-hereditary conditions, and environmental/dietary factors. Age is a key risk factor in the development of colorectal cancer, since men and women over 40 years of age become increasingly susceptible to that cancer. Incidence rates increase considerably in each subsequent decade of life. A number of hereditary and nonhereditary conditions have also been linked to a heightened risk of developing colorectal cancer, including familial adenomatous polyposis (FAP), hereditary nonpolyposis colorectal cancer (Lynch syndrome or HNPCC), a personal and/or family history of colorectal cancer or adenomatous polyps, inflammatory bowel disease, diabetes mellitus, and obesity.

[0015] In the case of FAP, the tumor suppressor gene APC (adenomatous polyposis coli), located at 5q21, has been either mutationally inactivated or deleted (Alberts et al., Molecular Biology of the Cell 1288 (3d ed. 1994)). The APC protein plays a role in a number of functions, including cell adhesion, apoptosis, and repression of the c-myc oncogene. Of those patients with colorectal cancer who have normal APC genes, over 65% have such mutations in the cancer cells but not in other tissues. In the case of HPNCC, patients manifest abnormalities in the tumor suppressor gene HNPCC, but only about 15% of tumors contain the mutated gene. A host of other genes have also been implicated in colorectal cancer, including the K-ras, c-Ki-ras, N-ras, H-ras and c-myc oncogenes, and the tumor suppressor genes DCC (deleted in colon carcinoma), Wg/Wnt signal transduction pathway components and p53.

[0016] Some tyrosine kinases have been shown up-regulated in colorectal tumor tissues or cell lines like HT29. Focal adhesion kinase (FAK) and its up-stream kinase c-src and c-yes in colonic epithelial cells may play an important role in the promotion of colorectal cancers through the extracellular 1 5 matrix (ECM) and integrin-mediated signaling pathways. The formation of c-src/FAK complexes may coordinately deregulate VEGF expression and apoptosis inhibition.

[0017] Recent evidences suggest that a specific signal-transduction pathway for cell survival that implicates integrin engagement leads to FAK activation and thus activates PI-3 kinase and akt. In turn, akt phosphorylates BAD and blocks apoptosis in epithelial cells. The activation of c-src in colon cancer may induce VEGF expression through the hypoxia pathway. Other genes that may be implicated in colorectal cancer include Cox enzymes (Ota, S. et al. Aliment Pharmacol. Ther. 16 (Suppl 2): 102-106 (2002)), estrogen (alAzzawi, F. and Wahab, M. Climacteric 5: 3-14 (2002)), peroxisome proliferator-activated receptor-y (PPAR-y) (Gelman, L. et al. Cell Mol. Life. Sci. 5 5: 932-943 (1999)), IGF-I (Giovannucci (2001)), thymine DNA glycosylase (TDG) (Hardeland, U. et al. Prog. Nucleic Acid Res. Mol. Biol. 68: 235-253 (2001)) and EGF (Mendelsohn, J. EndocrineRelated Cancer 8: 3-9 (2001)).

[0018] Procedures used for detecting, diagnosing, monitoring, staging, and prognosticating colon cancer are of critical importance to the outcome of the patient. For example, patients diagnosed with early colon cancer generally have a much greater five-year survival rate as compared to the survival rate for patients diagnosed with distant metastasized colon cancer. Because colon cancer is highly treatable when detected at an early, localized stage, screening should be a part of routine care for all adults starting at age 50, especially those with first-degree relatives with colorectal cancer. One major advantage of colorectal cancer screening over its counterparts in other types of cancer is its ability to not only detect precancerous lesions, but to remove them as well. The key colorectal cancer screening tests in use today are fecal occult blood test, sigmoidoscopy, colonoscopy, double-contrast barium enema, and the carcinoembryonic antigen (CEA) test. New diagnostic methods which are more sensitive and specific for detecting early colon cancer are clearly needed.

[0019] Visual examination of the colon for abnormalities can be performed through endoscopic or radiographic techniques such as rigid proctosigmoidoscopy, flexible sigmoidoscopy, colonoscopy, and barium-contrast enema. These methods enable one to detect, biopsy, and remove adenomatous polyps. Despite the advantages of these procedures, there are accompanying downsides: they are expensive, and uncomfortable, and also carry with them a risk of complications. Sigmoidoscopy, by definition, is limited to the sigmoid colon and below, colonoscopy is a relatively expensive procedure, and both share the risk of possible bowel perforation and hemorrhaging. Double-contrast barium enema (DCBE) enables detection of lesions better than FOBT, and almost as well a colonoscopy, but it may be limited in evaluating the winding rectosigmoid region.

[0020] Another method of colon cancer diagnosis is the detection of carcinoembryonic antigen (CEA) in a blood sample from a subject, which when present at high levels, may indicate the presence of advanced colon cancer. But CEA levels may also be abnormally high when no cancer is present. Thus, this test is not selective for colon cancer, which limits the test's value as an accurate and reliable diagnostic tool. In addition, elevated CEA levels are not detectable until late-stage colon cancer, when the cure rate is low, treatment options limited, and patient prognosis poor.

[0021] Several classification systems have been devised to stage the extent of colorectal cancer, including the Dukes' system and the more detailed International Union against Cancer-American Joint Committee on Cancer TNM staging system, which is considered by many in the field to be a more useful staging system. These most widely used staging systems generally use at least one of the following characteristics for staging: the extent of tumor penetration into the colon wall, with greater penetration generally correlating with a more dangerous tumor; the extent of invasion of the tumor through the colon wall and into other neighboring tissues, with greater invasion generally correlating with a more dangerous tumor; the extent of invasion of the tumor into the regional lymph nodes, with greater invasion generally correlating with a more dangerous tumor; and the extent of metastatic invasion into more distant tissues, such as the liver, with greater metastatic invasion generally correlating with a more dangerous disease state.

[0022] “Dukes A” and “Dukes B” colon cancers are neoplasia that have invaded into the wall of the colon but have not spread into other tissues. Dukes A colon cancers are cancers that have not invaded beyond the submucosa. Dukes B colon cancers are subdivided into two groups: Dukes B1 and Dukes B2. “Dukes B1” colon cancers are neoplasias that have invaded up to but not through the muscularis propria. Dukes B2 colon cancers are cancers that have breached completely through the muscularis propria. Over a five year period, patients with Dukes A cancer who receive surgical treatment (i.e. removal of the affected tissue) have a greater than 90% survival rate. Over the same period, patients with Dukes B1 and Dukes B2 cancer receiving surgical treatment have a survival rate of about 85% and 75% respectively. Dukes A, B1 and B2 cancers are also referred to as T1, T2 and T3-T4 cancers, respectively. “Dukes C” colon cancers are cancers that have spread to the regional lymph nodes, such as the lymph nodes of the gut. Patients with Dukes C cancer who receive surgical treatment alone have a 35% survival rate over a five year period, but this survival rate is increased to 60% in patients that receive chemotherapy. “Dukes D” colon cancers are cancers that have metastasized to other organs. The liver is the most common organ in which metastatic colon cancer is found. Patients with Dukes D colon cancer have a survival rate of less than 5% over a five year period, regardless of the treatment regimen.

[0023] The TNM system, which is used for either clinical or pathological staging, is divided into four stages, each of which evaluates the extent of cancer growth with respect to primary tumor (T), regional lymph nodes (N), and distant metastasis (M). The system focuses on the extent of tumor invasion into the intestinal wall, invasion of adjacent structures, the number of regional lymph nodes that have been affected, and whether distant metastasis has occurred. Stage 0 is characterized by in situ carcinoma (Tis), in which the cancer cells are located inside the glandular basement membrane (intraepithelial) or lamina propria, (intramucosal). In this stage, the cancer has not spread to the regional lymph nodes (NO), and there is no distant metastasis (N40). In stage 1, there is still no spread of the cancer to the regional lymph nodes and no distant metastasis, but the tumor has invaded the submucosa (T1) or has progressed further to invade the muscularis propria (T2). Stage R also involves no spread of the cancer to the regional lymph nodes and no distant metastasis, but the tumor has invaded the subserosa, or the nonperitonealized pericolic or perirectal tissues (T3), or has progressed to invade other organs or structures, and/or has perforated the visceral peritoneum (T4). Stage 3 is characterized by any of the T substages, no distant metastasis, and either metastasis in 1 to 3 regional lymph nodes (N1) or metastasis in four or more regional lymph nodes (N2). Lastly, stage 4 involves any of the T or N substages, as well as distant metastasis.

[0024] Currently, pathological staging of colon cancer is preferable over clinical staging as pathological staging provides a more accurate prognosis. Pathological staging typically involves examination of the resected colon section, along with surgical examination of the abdominal cavity.

### SUMMARY OF THE INVENTION

[0025] The background art does not teach or suggest markers for colon cancer that are sufficiently sensitive and/or accurate, alone or in combination. From the foregoing, it is clear that procedures used for detecting, diagnosing, monitoring, staging, prognosticating, and preventing the recurrence of colorectal cancer are of critical importance to the outcome of the patient. Moreover, current procedures, while helpful in each of these analyses, are limited by their specificity, sensitivity, invasiveness, and/or their cost. It would therefore be desirable to provide more sensitive and accurate methods and reagents for the early diagnosis, staging, prognosis, monitoring, and treatment of diseases associated with colon cancer, or to indicate a predisposition to such for preventative measures, as well as to determine whether or not such cancer has metastasized and for monitoring the progress of colon cancer in a human which has not metastasized for the onset of metastasis.

[0026] The present invention overcomes the deficiencies of the background art by providing novel markers for colon cancer that are both sensitive and accurate. Furthermore, these markers are able to distinguish between different stages of colon cancer, such as adenocarcinoma (mucinous or signet ring cell originating); leiomyocarcomas; carcinoid. Furthermore, at least some of these markers are able to distinguish, alone or in combination, between colon cancer between non-cancerous polyps. These markers are overexpressed in colon cancer specifically, as opposed to normal colon tissue. The measurement of these markers, alone or in combination, in patient samples provides information that the diagnostician can correlate with a probable diagnosis of colon cancer. The markers of the present invention, alone or in combination, show a high degree of differential detection between colon cancer and non-cancerous states.

[0027] According to preferred embodiments of the present invention, examples of suitable biological samples include but are not limited to blood, serum, plasma, blood cells, urine, sputum, saliva, stool, spinal fluid or CSF, lymph fluid, the external secretions of the skin, respiratory, intestinal, and genitourinary tracts, tears, milk, neuronal tissue, colon tissue or mucous and any human organ or tissue. In a preferred embodiment, the biological sample comprises colon tissue and/or a serum sample and/or a urine sample and/or a stool sample and/or any other tissue or liquid sample. The sample can optionally be diluted with a suitable eluant before contacting the sample to an antibody and/or performing any other diagnostic assay.

[0028] Information given in the text with regard to cellular localization was determined according to four different software programs: (i) tmhmm (from Center for Biological Sequence Analysis, Technical University of Denmark DTU, http://www.cbs.dtu.dk/services/TMHMM/TMHMM2.0b.guide.php) or (ii) tmpred (from EMBnet, maintained by the ISREC Bionformatics group and the LICR Information Technology Office, Ludwig Institute for Cancer Research, Swiss Institute of Bioinformatics, http://www.ch.embnet.org/software/TMPRED_form.html) for transmembrane region prediction; (iii) signalp_hmm or (iv) signalp_nn (both from Center for Biological Sequence Analysis, Technical University of Denmark DTU, http://www.cbs.dtu.dk/services/SignalP/background/prediction.php) for signal peptide prediction. The terms “signalp_hmm” and “signalp_nn” refer to two modes of operation for the program SignalP: hmm refers to Hidden Markov Model, while nn refers to neural networks. Localization was also determined through manual inspection of known protein localization and/or gene structure, and the use of heuristics by the individual inventor. In some cases for the manual inspection of cellular localization prediction inventors used the ProLoc computational platform [Einat Hazkani-Covo, Erez Levanon, Galit Rotman, Dan Graur and Amit Novik; (2004) “Evolution of multicellularity in metazoa: comparative analysis of the subcellular localization of proteins in Saccharomyces, Drosophila and Caenorhabditis.” Cell Biology International 2004; 28(3):171-8.], which predicts protein localization based on various parameters including, protein domains (e.g., prediction of trans-membranous regions and localization thereof within the protein), pI, protein length, amino acid composition, homology to pre-annotated proteins, recognition of sequence patterns which direct the protein to a certain organelle (such as, nuclear localization signal, NLS, mitochondria localization signal), signal peptide and anchor modeling and using unique domains from Pfam that are specific to a single compartment.

[0029] Information is given in the text with regard to SNPs (single nucleotide polymorphisms). A description of the abbreviations is as follows. “T->C”, for example, means that the SNP results in a change at the position given in the table from T to C. Similarly, “M->Q”, for example, means that the SNP has caused a change in the corresponding amino acid sequence, from methionine (M) to glutamine (Q). If, in place of a letter at the right hand side for the nucleotide sequence SNP, there is a space, it indicates that a frameshift has occurred. A frameshift may also be indicated with a hyphen (-). A stop codon is indicated with an asterisk at the right hand side (*). As part of the description of an SNP, a comment may be found in parentheses after the above description of the SNP itself. This comment may include an FTId, which is an identifier to a SwissProt entry that was created with the indicated SNP. An FTId is a unique and stable feature identifier, which allows construction of links directly from position-specific annotation in the feature table to specialized protein-related databases. The FTId is always the last component of a feature in the description field, as follows: FTId=XXX_number, in which XXX is the 3-letter code for the specific feature key, separated by an underscore from a 6-digit number. In the table of the amino acid mutations of the wild type proteins of the selected splice variants of the invention, the header of the first column is “SNP position(s) on amino acid sequence”, representing a position of a known mutation on amino acid sequence. SNPs may optionally be used as diagnostic markers according to the present invention, alone or in combination with one or more other SNPs and/or any other diagnostic marker. Preferred embodiments of the present invention comprise such SNPs, including but not limited to novel SNPs on the known (WT or wild type) protein sequences given below, as well as novel nucleic acid and/or amino acid sequences formed through such SNPs, and/or any SNP on a variant amino acid and/or nucleic acid sequence described herein.

[0030] Information given in the text with regard to the Homology to the known proteins was determined by Smith-Waterman version 5.1.2 using special (non default) parameters as follows:

[0031] model=sw.model

[0032] GAPEXT=0

[0033] GAPOP=100.0

[0034] MATRIX=blosum100

[0035] Information is given with regard to overexpression of a cluster in cancer based on ESTs. A key to the p values with regard to the analysis of such overexpression is as follows:
[0036] library-based statistics: P-value without including the level of expression in cell-lines (P1)
[0037] library based statistics: P-value including the level of expression in cell-lines (P2)
[0038] EST clone statistics: P-value without including the level of expression in cell-lines (SP1)
[0039] EST clone statistics: predicted overexpression ratio without including the level of expression in cell-lines (R3)
[0040] EST clone statistics: P-value including the level of expression in cell-lines (SP2)
[0041] EST clone statistics: predicted overexpression ratio including the level of expression in cell-lines (R4)

[0042] Library-based statistics refer to statistics over an entire library, while EST clone statistics refer to expression only for ESTs from a particular tissue or cancer.

[0043] Information is given with regard to overexpression of a cluster in cancer based on microarrays. As a microarray reference, in the specific segment paragraphs, the unabbreviated tissue name was used as the reference to the type of chip for which expression was measured. There are two types of microarray results: those from microarrays prepared according to a design by the present inventors, for which the microarray fabrication procedure is described in detail in Materials and Experimental Procedures section herein; and those results from microarrays using Affymetrix technology. As a microarray reference, in the specific segment paragraphs, the unabbreviated tissue name was used as the reference to the type of chip for which expression was measured. For microarrays prepared according to a design by the present inventors, the probe name begins with the name of the cluster (gene), followed by an identifying number. Oligonucleotide microarray results taken from Affymetrix data were from chips available from Affymetrix Inc, Santa Clara, Calif., USA (see for example data regarding the Human Genome U133 (HG-U133) Set at www.affymetrix.com/products/arrays/specific/hgu133.affx; GeneChip Human Genome U133A 2.0 Array at www.affymetrix.com/products/arrays/specific/hgu133av2.affx; and Human Genome U133 Plus 2.0 Array at www.affymetrix.com/products/arrays/specific/hgu133plus.affx). The probe names follow the Affymetrix naming convention. The data is available from NCBI Gene Expression Omnibus (see www.ncbi.nlm.nih.gov/projects/geo/and Edgar et al, Nucleic Acids Research, 2002, Vol. 30, No. 1 207-210). The dataset (including results) is available from www.ncbi.nlm.nih.gov/geo/query/acc.cgi?acc=GSE1133 for the Series GSE1133 database (published on March 2004); a reference to these results is as follows: Su et al (Proc Natl Acad Sci USA. 2004 Apr. 20; 101(16):6062-7. Epub 2004 Apr. 9). A list of probes is given below.

>M85491_0_0_25999

(SEQ ID NO: 1398)

GACATCTTTGCATATCATGTCAGAGCTATAACATCATTGTGGAGAAGCTC
>M85491_0_14_0

(SEQ ID NO: 1399)

GTCATGAAAATCAACACCGAGGTGCGGAGGTTCGGACCTGTGTCCCGCAG
>H53626_0_16_0

(SEQ ID NO: 1400)

ATGCGGGCATGTACATCTGCCTTGGCGCCAACACCATGGGCTACAGCTTC
>H53626_0_0_8391

(SEQ ID NO: 1401)

GGGTCTGGGGTGCTCTCCTGGTCTTTGTGTCGGCGTTCCCCTCCCTACCT
>HSENA78_0_1_0

(SEQ ID NO: 1402)

TGAAGAGTGTGAGGAAAACCTATGTTTGCCGCTTAAGCTTTCAGCTCAGC
>HUMGROG5_0_0_16626

(SEQ ID NO: 1403)

GCAGAAACTTTGCAGTAACACCTTCAGTGAGTTCAAGGCTAGGATCCCTG
>R00299_0_8_0

(SEQ ID NO: 1404)

CCAAGGCTCGTCTGCGCACCTTGTGTCTTGTAGGGTATGGTATGTGGGAC
>S67314_0_0_741

(SEQ ID NO: 1405)

CACAGAGCCAGGATGTTCTTCTGACCTCAGTATCTACTCCAGCTCCAGCT
>S67314_0_0_744

(SEQ ID NO: 1406)

TGGCATGCTGGAACATGGACTCTAGCTAGCAAGAAGGGCTCAAGGAGGTG
>Z44808_0_8_0

(SEQ ID NO: 1407)

AAAAGCATGAGTTTCTGACCAGCGTTCTGGACGCGCTGTCCACGGACATG
>Z44808_0_0_72347

(SEQ ID NO: 1408)

ATGTTCTTAGGAGGCAAGCCAGGAGAAGCCGGGTCTGACTTTTCAGCTCA
>Z44808_0_0_72349

(SEQ ID NO: 1409)

TCCTCCAGACCCAAAGCCACAACCCATCGCAAGTCAAGAACACTTTCCAG
>Z25299_0_3_0

(SEQ ID NO: 1410)

AACTCTGGCACCTTGGGCTGTGGAAGGCTCTGGAAAGTCCTTCAAAGCTG
>HUMCA1XIA_0_0_14909

(SEQ ID NO: 1411)

GCTGCAATCTAAGTTTCGGAATACTTATACCACTCCAGAAATAATCCTCG
>HUMCA1XIA_0_18_0

(SEQ ID NO: 1412)

TTCAGAACTGTTAACATCGCTGACGGGAAGTGGCATCGGGTAGCAATCAG
>HSS100PCB_0_0_12280

(SEQ ID NO: 1413)

CTCAAAATGAAACTCCCTCTCGCAGAGCACAATTCCAATTCGCTCTAAAA
>HUMPHOSLIP_0_0_18458

(SEQ ID NO: 1414)

AAGGAAGCAGGACCAGTGGATGTGAGGCGTGGTCGAAGAACAACAGAAAG
>HUMPHOSLIP_0_0_18487

(SEQ ID NO: 1415)

ACAGGGGCCAGATGGTGACCCATGACCCAGCCTAAAAGGCAGCCAGAGGG
>D11853_0_0_0

(SEQ ID NO: 1416)

GAGGCCCCTGGGTGGGAATGGGGACAGGAATTGACAGTGGAAGGGGTTCT
>D11853_0_0_3085

(SEQ ID NO: 1417)

TGACTCCCTACATACTCCAGGACTAGCTTAGGTCCCAACCCAATAGTTCC
>D11853_0_0_3082

(SEQ ID NO: 1418)

TGGTCCCCATGTGATTCTCCGAGGATCCTGAGGGTCGTGGTTTATGGAGA
>M77903_0_0_21402

(SEQ ID NO: 1419)

ACGTGATGGTTGGAACGCGTACCTTAGAGCTTCCAGTTCCGTCTTAGGAC
>AA583399_0_12_0

(SEQ ID NO: 1420)

ATCCCCACTGAACCCAGTGCTTTCACCAGCCATATTAGCTCCCACTCACC
>AA583399_0_0_1681

(SEQ ID NO: 1421)

CACCGCATGCTGCCAATCTGATGGTGGAGACAGAACAGCAGTCCCGGATG
>AA583399_0_1_1687

(SEQ ID NO: 1422)

TTTCCACACTCAGTGCCACGAAGTGCAGCTCTAAGCTGGGGATTTCTGTG
>HUMCACH1A_0_12_0

(SEQ ID NO: 1423)

ACCCAGCTCCATGTGCGTTCTCAGGGAATGGACGCCAGTGTACTGCCAAT
>HUMCACH1A_0_3_14917

(SEQ ID NO: 1331)

AGAGAATATCACTCCGATGGTCGGTTTCTGACTGTCACGCTAAGGGCAAC
>HUMGACH1A_0_0_14922

(SEQ ID NO: 1332)

GAACACAGAGAACGTCAGCGGTGAAGGCGAGAACCGAGGCTGCTGTGGAA
>HUMCACH1A_0_0_14913

(SEQ ID NO: 1334)

GACTCAGGAGATGAACAGCTCCCAACTATTTGCCGGGAAGACCCAGAGAT
>HUMCACH1A_0_0_14924

(SEQ ID NO: 1333)

GGCCCAGCATTGGGAACCTTGAGCATGTGTCTGAAAATGGGCATCATTCT
>HUMCEA_0_0_96

(SEQ ID NO: 1338)

CAAGAGGGGTTTGGCTGAGACTTTAGGATTGTGATTCAGCTTAGAGGGAC
>HUMCEA_0_0_15183

(SEQ ID NO: 1429)

CCTGGTGGGAGCCCATGAGAAGCGAGTTCTCTGTGCAACGGACTTAGTAA
>HUMCEA_0_0_15182

(SEQ ID NO: 1430)

GCTCCCTGGAGCATCAGCATCATATTCTGGGGTGGAGTCTATCTGGTTCT
>HUMCEA_0_0_15168

(SEQ ID NO: 1339)

TCCTGCCTGTCACCTGAAGTTCTAGATCATTCCCTGGACTCCACTCTATC
>HUMCEA_0_0_15180

(SEQ ID NO: 1432)

TTTAACACAGGATTGGGACAGGATTCAGAGGGACACTGTGGCCCTTCTAC
>M78035_0_0_21693

(SEQ ID NO: 1433)

CCATCCACATTTATGGAAACACTTGCTGTATATCTGGTGATTTACGTGTG
>M78035_0_0_21691

(SEQ ID NO: 1434)

CCTTTCACCACTGTGTGCAAGCGAATACACGCGGAACAATCCTAGTGAAT
>M78035_0_1_21707

(SEQ ID NO: 1435)

TTTGCTAGAAATCTGGTGTGGTGCAGGAGCGACTCCAGGATTCACTCTGT
>T23657_0_18_0

(SEQ ID NO: 1436)

TCCGTGACCCTCAGAGATCCTTTGCCCTGGGAATCCAGTGGATTGTAGTT
>T51958_0_0_50903

(SEQ ID NO: 1437)

CCCATGGTGGCCAGAGTGTCAGGTCTCATCGTGACGCTCTTGTCCTCCTC
>T51958_0_0_50916

(SEQ ID NO: 1438)

GGGGCTGTGCCCAGTCCCCCTGTCAGACCCTCAATGACTGAGGCCTGGGG
>Z17877_0_4_0

(SEQ ID NO: 1439)

ACTTTGCACTGGAACTTACAACACCCGAGCAAGGACGCGACTCTCCCGAC
>HSHCGI_0_0_10611

(SEQ ID NO: 1440)

GCCTACTGATTCATCCACATACAATTCTCAGCGTATATCCAAATGCAGTC
>HSHCGI_0_0_10620

(SEQ ID NO: 1441)

GGACCTCTAAGTCTACAGGTGGTCAAAATGCTGTATCCACCCAATTCCAC

[0044] The following list of abbreviations for tissues was used in the TAA histograms. The term “TAA” stands for “Tumor Associated Antigen”, and the TAA histograms, given in the text, represent the cancerous tissue expression pattern as predicted by the biomarkers selection engine, as described in detail in examples 1-5 below:
[0045] “BONE” for “bone”;
[0046] “COL” for “colon”;
[0047] “EPI” for “epithelial”;
[0048] “GEN” for “general”;
[0049] “LIVER” for “liver”;
[0050] “LUN” for “lung”;
[0051] “LYMPH” for “lymph nodes”;
[0052] “MARROW” for “bone marrow”;
[0053] “OVA” for “ovary”;
[0054] “PANCREAS” for “pancreas”;
[0055] “PRO” for “prostate”;
[0056] “STOMACH” for “stomach”;
[0057] “TCELL” for “T cells”;
[0058] “THYROID” for “Thyroid”;
[0059] “MAM” for “breast”;
[0060] “BRAIN” for “brain”;
[0061] “UTERUS” for “uterus”;
[0062] “SKIN” for “skin”;
[0063] “KIDNEY” for “kidney”;
[0064] “MUSCLE” for “muscle”;
[0065] “ADREN” for “adrenal”;
[0066] “HEAD” for “head and neck”;
[0067] “BLADDER” for “bladder”;

[0068] It should be noted that the terms “segment”, “seg” and “node” are used interchangeably in reference to nucleic acid sequences of the present invention; they refer to portions of nucleic acid sequences that were shown to have one or more properties as described below. They are also the building blocks that were used to construct complete nucleic acid sequences as described in greater detail below. Optionally and preferably, they are examples of oligonucleotides which are embodiments of the present invention, for example as amplicons, hybridization units and/or from which primers and/or complementary oligonucleotides may optionally be derived, and/or for any other use.

[0069] As used herein the phrase “colon cancer” refers to cancers of the colon or colorectal cancers.

[0070] The term “marker” in the context of the present invention refers to a nucleic acid fragment, a peptide, or a polypeptide, which is differentially present in a sample taken from subjects (patients) having colon cancer as compared to a comparable sample taken from subjects who do not have colon cancer.

[0071] The phrase “differentially present” refers to differences in the quantity of a marker present in a sample taken from patients having colon cancer as compared to a comparable sample taken from patients who do not have colon cancer. For example, a nucleic acid fragment may optionally be differentially present between the two samples if the amount of the nucleic acid fragment in one sample is significantly different from the amount of the nucleic acid fragment in the other sample, for example as measured by hybridization and/or NAT-based assays. A polypeptide is differentially present between the two samples if the amount of the polypeptide in one sample is significantly different from the amount of the polypeptide in the other sample. It should be noted that if the marker is detectable in one sample and not detectable in the other, then such a marker can be considered to be differentially present.

[0072] As used herein the phrase “diagnostic” means identifying the presence or nature of a pathologic condition. Diagnostic methods differ in their sensitivity and specificity. The “sensitivity” of a diagnostic assay is the percentage of diseased individuals who test positive (percent of “true positives”). Diseased individuals not detected by the assay are “false negatives.” Subjects who are not diseased and who test negative in the assay are termed “true negatives.” The “specificity” of a diagnostic assay is 1 minus the false positive rate, where the “false positive” rate is defined as the proportion of those without the disease who test positive. While a particular diagnostic method may not provide a definitive diagnosis of a condition, it suffices if the method provides a positive indication that aids in diagnosis.

[0073] As used herein the phrase “diagnosing” refers to classifying a disease or a symptom, determining a severity of the disease, monitoring disease progression, forecasting an outcome of a disease and/or prospects of recovery. The term “detecting” may also optionally encompass any of the above.

[0074] Diagnosis of a disease according to the present invention can be effected by determining a level of a polynucleotide or a polypeptide of the present invention in a biological sample obtained from the subject, wherein the level determined can be correlated with predisposition to, or presence or absence of the disease. It should be noted that a “biological sample obtained from the subject” may also optionally comprise a sample that has not been physically removed from the subject, as described in greater detail below.

[0075] As used herein, the term “level” refers to expression levels of RNA and/or protein or to DNA copy number of a marker of the present invention.

[0076] Typically the level of the marker in a biological sample obtained from the subject is different (i.e., increased or decreased) from the level of the same variant in a similar sample obtained from a healthy individual (examples of biological samples are described herein).

[0077] Numerous well known tissue or fluid collection methods can be utilized to collect the biological sample from the subject in order to determine the level of DNA, RNA and/or polypeptide of the variant of interest in the subject.

[0078] Examples include, but are not limited to, fine needle biopsy, needle biopsy, core needle biopsy and surgical biopsy (e.g., brain biopsy), and lavage. Regardless of the procedure employed, once a biopsy/sample is obtained the level of the variant can be determined and a diagnosis can thus be made.

[0079] Determining the level of the same variant in normal tissues of the same origin is preferably effected along-side to detect an elevated expression and/or amplification and/or a decreased expression, of the variant as opposed to the normal tissues.

[0080] A “test amount” of a marker refers to an amount of a marker in a subject's sample that is consistent with a diagnosis of colon cancer. A test amount can be either in absolute amount (e.g., microgram/ml) or a relative amount (e.g., relative intensity of signals).

[0081] A “control amount” of a marker can be any amount or a range of amounts to be compared against a test amount of a marker. For example, a control amount of a marker can be the amount of a marker in a patient with colon cancer or a person without colon cancer. A control amount can be either in absolute amount (e.g., microgram/ml) or a relative amount (e.g., relative intensity of signals).

[0082] “Detect” refers to identifying the presence, absence or amount of the object to be detected.

[0083] A “label” includes any moiety or item detectable by spectroscopic, photo chemical, biochemical, immunochemical, or chemical means. For example, useful labels include ³²P, ³⁵S, fluorescent dyes, electron-dense reagents, enzymes (e.g., as commonly used in an ELISA), biotin-streptavadin, dioxigenin, haptens and proteins for which antisera or monoclonal antibodies are available, or nucleic acid molecules with a sequence complementary to a target. The label often generates a measurable signal, such as a radioactive, chromogenic, or fluorescent signal, that can be used to quantify the amount of bound label in a sample. The label can be incorporated in or attached to a primer or probe either covalently, or through ionic, van der Waals or hydrogen bonds, e.g., incorporation of radioactive nucleotides, or biotinylated nucleotides that are recognized by streptavadin. The label may be directly or indirectly detectable. Indirect detection can involve the binding of a second label to the first label, directly or indirectly. For example, the label can be the ligand of a binding partner, such as biotin, which is a binding partner for streptavadin, or a nucleotide sequence, which is the binding partner for a complementary sequence, to which it can specifically hybridize. The binding partner may itself be directly detectable, for example, an antibody may be itself labeled with a fluorescent molecule. The binding partner also may be indirectly detectable, for example, a nucleic acid having a complementary nucleotide sequence can be a part of a branched DNA molecule that is in turn detectable through hybridization with other labeled nucleic acid molecules (see, e.g., P. D. Fahrlander and A. Klausner, Bio/Technology 6:1165 (1988)). Quantitation of the signal is achieved by, e.g., scintillation counting, densitometry, or flow cytometry.

[0084] Exemplary detectable labels, optionally and preferably for use with immunoassays, include but are not limited to magnetic beads, fluorescent dyes, radiolabels, enzymes (e.g., horse radish peroxide, alkaline phosphatase and others commonly used in an ELISA), and calorimetric labels such as colloidal gold or colored glass or plastic beads. Alternatively, the marker in the sample can be detected using an indirect assay, wherein, for example, a second, labeled antibody is used to detect bound marker-specific antibody, and/or in a competition or inhibition assay wherein, for example, a monoclonal antibody which binds to a distinct epitope of the marker are incubated simultaneously with the mixture.

[0085] “Immunoassay” is an assay that uses an antibody to specifically bind an antigen. The immunoassay is characterized by the use of specific binding properties of a particular antibody to isolate, target, and/or quantify the antigen.

[0086] The phrase “specifically (or selectively) binds” to an antibody or “specifically (or selectively) immunoreactive with,” when referring to a protein or peptide (or other epitope), refers to a binding reaction that is determinative of the presence of the protein in a heterogeneous population of proteins and other biologics. Thus, under designated immunoassay conditions, the specified antibodies bind to a particular protein at least two times greater than the background (non-specific signal) and do not substantially bind in a significant amount to other proteins present in the sample. Specific binding to an antibody under such conditions may require an antibody that is selected for its specificity for a particular protein. For example, polyclonal antibodies raised to seminal basic protein from specific species such as rat, mouse, or human can be selected to obtain only those polyclonal antibodies that are specifically immunoreactive with seminal basic protein and not with other proteins, except for polymorphic variants and alleles of seminal basic protein. This selection may be achieved by subtracting out antibodies that cross-react with seminal basic protein molecules from other species. A variety of immunoassay formats may be used to select antibodies specifically immunoreactive with a particular protein. For example, solid-phase ELISA immunoassays are routinely used to select antibodies specifically immunoreactive with a protein (see, e.g., Harlow & Lane, Antibodies, A Laboratory Manual (1988), for a description of immunoassay formats and conditions that can be used to determine specific immunoreactivity). Typically a specific or selective reaction will be at least twice background signal or noise and more typically more than 10 to 100 times background.

[0087] According to preferred embodiments of the present invention, there is provided an isolated polynucleotide comprising a transcript SEQ ID NOs: 1 and 2.

[0088] According to preferred embodiments of the present invention, there is provided an isolated polynucleotide comprising a segment SEQ ID NOs: 89, 90, 91, 92, 93, 94, 95, 96, 97, 98 and 99. According to preferred embodiments of the present invention, there is provided an isolated polypeptide comprising SEQ ID NOs 534 and 535.

[0089] According to preferred embodiments of the present invention, there is provided an isolated polynucleotide comprising a transcript SEQ ID NOs: 3, 4, 5 and 6.

[0090] According to preferred embodiments of the present invention, there is provided an isolated polynucleotide comprising a segment SEQ ID NOs: 100, 101, 102, 103, 104, 105, 106 and 107.

[0091] According to preferred embodiments of the present invention, there is provided an isolated polypeptide comprising SEQ ID NOs 536, 537, 538 and 539.

[0092] According to preferred embodiments of the present invention, there is provided an isolated polynucleotide comprising a transcript SEQ ID NO. 7.

[0093] According to preferred embodiments of the present invention, there is provided an isolated polynucleotide comprising a segment SEQ ID NOs: 108, 109, 110, 111, 112, 113, 114, 115, 116, 117, 118, 119, 120, 121 and 122.

[0094] According to preferred embodiments of the present invention, there is provided an isolated polypeptide comprising SEQ ID NOs 540.

[0095] According to preferred embodiments of the present invention, there is provided an isolated polynucleotide comprising a transcript selected from the group consisting of SEQ ID NO. 8 and 9.

[0096] According to preferred embodiments of the present invention, there is provided an isolated polynucleotide comprising a segment selected from the group consisting of SEQ ID NOs: 123, 124, 125, 126, 127, 128, 129, 130, 131, 132, 133, 134, 135, 136, 137, 138, 139, 140, 141 and 142.

[0097] According to preferred embodiments of the present invention, there is provided an isolated polypeptide comprising SEQ ID NOs 541, 542.

[0098] According to preferred embodiments of the present invention, there is provided an isolated polynucleotide comprising a transcript SEQ ID NO. 10.

[0099] According to preferred embodiments of the present invention, there is provided an isolated polynucleotide comprising a segment SEQ ID NOs: 143, 144, 145, 146, 147, 148 and 149.

[0100] According to preferred embodiments of the present invention, there is provided an isolated polypeptide comprising SEQ ID NOs 543.

[0101] According to preferred embodiments of the present invention, there is provided an isolated polynucleotide comprising a transcript SEQ ID NO. 11, 12, 13 and 14.

[0102] According to preferred embodiments of the present invention, there is provided an isolated polynucleotide comprising a segment SEQ ID NOs: 150, 151, 152, 153, 154, 155, 156, 157, 158, 159, 160, 161, 162, 163, 164, 165, 166 and 167.

[0103] According to preferred embodiments of the present invention, there is provided an isolated polypeptide comprising SEQ ID NOs 544, 545, 546 and 547.

[0104] According to preferred embodiments of the present invention, there is provided an isolated polynucleoide comprising a transcript SEQ ID NO. 15.

[0105] According to preferred embodiments of the present invention, there is provided an isolated polynucleotide comprising a segment SEQ ID NOs: 168, 169, 170, 171, 172, 173, 174, 175, 176, 177, 178, 179, 180, 181, 182, 183 and 184.

[0106] According to preferred embodiments of the present invention, there is provided an isolated polypeptide comprising SEQ ID NO. 548.

[0107] According to preferred embodiments of the present invention, there is provided an isolated polynucleotide comprising a transcript SEQ ID NO. 16.

[0108] According to preferred embodiments of the present invention, there is provided an isolated polynucleotide comprising a segment SEQ ID NOs: 185, 186, 187, 188, 189, 190, 191, 192, 193, 194, 195 and 196.

[0109] According to preferred embodiments of the present invention, there is provided an isolated polypeptide comprising SEQ ID NOs 549.

[0110] According to preferred embodiments of the present invention, there is provided an isolated polynucleotide comprising a transcript SEQ ID NO. 17 and 18.

[0111] According to preferred embodiments of the present invention, there is provided an isolated polynucleotide comprising a segment SEQ ID NOs: 197, 198, 199, 200, 201, 202, 203, 204, 205, 206, 207, 208, 209, 210 and 211.

[0112] According to preferred embodiments of the present invention, there is provided an isolated polypeptide comprising SEQ ID NOs 550 and 551.

[0113] According to preferred embodiments of the present invention, there is provided an isolated polynucleotide comprising a transcript SEQ ID NO. 19, 20, 21 and 22.

[0114] According to preferred embodiments of the present invention, there is provided an isolated polynucleotide comprising a segment SEQ ID NOs: 212, 213, 214, 215, 216, 217, 218 and 219.

[0115] According to preferred embodiments of the present invention, there is provided an isolated polypeptide comprising SEQ ID NOs 552, 553, 554 and 555.

[0116] According to preferred embodiments of the present invention, there is provided an isolated polynucleotide comprising a transcript SEQ ID NO. 23, 24, 25, 26 and 27.

[0117] According to preferred embodiments of the present invention, there is provided an isolated polynucleotide comprising a segment SEQ ID NOs: 220, 221, 222, 223, 224, 225, 226, 227, 228, 229, 230, 231, 232, 233, 234, 235, 236, 237, 238, 239 and 240.

[0118] According to preferred embodiments of the present invention, there is provided an isolated polypeptide comprising SEQ ID NOs 556, 557, 558 and 559.

[0119] According to preferred embodiments of the present invention, there is provided an isolated polynucleotide comprising a transcript SEQ ID NO. 28, 29, 30, 31 and 32.

[0120] According to preferred embodiments of the present invention, there is provided an isolated polynucleotide comprising a segment SEQ ID NOs: 241, 242, 243, 244, 245, 246, 247, 248, 249, 250 and 251.

[0121] According to preferred embodiments of the present invention, there is provided an isolated polypeptide comprising SEQ ID NOs 560, 561, 562 and 563.

[0122] According to preferred embodiments of the present invention, there is provided an isolated polynucleotide comprising a transcript SEQ ID NO. 33, 34, and 35.

[0123] According to preferred embodiments of the present invention, there is provided an isolated polynucleotide comprising a segment SEQ ID NOs: 252, 253, 254, 255, 256, 257, 258, 259, 260, 261, 262, 263, 264, 265, 266, 267, 267, 269, 270, 271, 272, 273, 274, 275, 276, 277, 278, 279, 280, 281, 282, 283, 284.

[0124] According to preferred embodiments of the present invention, there is provided an isolated polypeptide comprising SEQ ID NOs 564, 565, and 566.

[0125] According to preferred embodiments of the present invention, there is provided an isolated polynucleotide comprising a transcript SEQ ID NO. 36, 37, 38, 39, 40, 41, 42 and 43.

[0126] According to preferred embodiments of the present invention, there is provided an isolated polynucleotide comprising a segment SEQ ID NOs: 285, 286, 287, 288, 289, 290, 291, 292, 293, 294, 295, 296, 297, 298, 299, 300, 301, 302, 303, 304, 305 and 306.

[0127] According to preferred embodiments of the present invention, there is provided an isolated polypeptide comprising SEQ ID NOs 567, 568, 569, 570, 571, 572, 573 and 574.

[0128] According to preferred embodiments of the present invention, there is provided an isolated polynucleotide comprising a transcript SEQ ID NO. 44.

[0129] According to preferred embodiments of the present invention, there is provided an isolated polynucleotide comprising a segment SEQ ID NOs: 307, 308, 309, 310, 311, 312, 313, 314, 315 and 316.

[0130] According to preferred embodiments of the present invention, there is provided an isolated polypeptide comprising SEQ ID NO. 575.

[0131] According to preferred embodiments of the present invention, there is provided an isolated polynucleotide comprising a transcript SEQ ID NO. 45, 46, 47 and 48.

[0132] According to preferred embodiments of the present invention, there is provided an isolated polynucleotide comprising a segment SEQ ID NOs: 317, 318, 319, 320, 321, 322, 323, 324, 325, 326, 327, 328, 329, 330, 331, 332, 333, 334, 335, 336, 337, 338, 339, 340, 341, 342, 343, 344, 345, 346, 347, 348, 349, 350, 351, 352, 353, 354, 355, 356, 357, 358, 359, 360, 361 and 362.

[0133] According to preferred embodiments of the present invention, there is provided an isolated polypeptide comprising SEQ ID NOs 576, 577, 578 and 579.

[0134] According to preferred embodiments of the present invention, there is provided an isolated polynucleotide comprising a transcript SEQ ID NO. 49.

[0135] According to preferred embodiments of the present invention, there is provided an isolated polynucleotide comprising a segment SEQ ID NOs: 363, 364 and 365.

[0136] According to preferred embodiments of the present invention, there is provided an isolated polypeptide comprising SEQ ID NO. 580.

[0137] According to preferred embodiments of the present invention, there is provided an isolated polynucleotide comprising a transcript SEQ ID NO. 50, 51, 52, 53, 54, 55 and 56.

[0138] According to preferred embodiments of the present invention, there is provided an isolated polynucleotide comprising a segment SEQ ID NOs: 366, 367, 368, 369, 370, 371, 372, 373, 374, 375, 376, 377, 378, 379, 380, 381, 382, 383, 384, 385, 386, 387, 388, 389, 390, 391, 392, 393, 394, 395, 396, 397, 398, 399, 400, 401, 402, 403, 404, 405, 406, 407, 408, 409, 410, 411, 412, 413, 414, 415, 416, 417 and 418.

[0139] According to preferred embodiments of the present invention, there is provided an isolated polypeptide comprising SEQ ID NOs 581, 582, 583, 584, 585, 586 and 587.

[0140] According to preferred embodiments of the present invention, there is provided an isolated polynucleotide comprising a transcript SEQ ID NO. 57, 58, 59, 60, 61, 62, 63, 64, 65, 66, 67, 68, 69, 70, 71, 72 , 73 and 74.

[0141] According to preferred embodiments of the present invention, there is provided an isolated polynucleotide comprising a segment SEQ ID NOs: 419, 420, 421, 422, 423, 424, 425, 426, 427, 428, 429, 43, 431, 432, 433, 434, 435, 436, 437, 438, 439, 440, 441, 442, 443, 444, 445, 446, 447, 448 and 449.

[0142] According to preferred embodiments of the present invention, there is provided an isolated polypeptide comprising SEQ ID NOs 588, 589, 590, 591, 592, 593, 594, 595, 596, 597, 598, 599, 600, 601 and 602.

[0143] According to preferred embodiments of the present invention, there is provided an isolated polynucleotide comprising a transcript SEQ ID NO. 75, 76, 77, 78, 79 and 80.

[0144] According to preferred embodiments of the present invention, there is provided an isolated polynucleotide comprising a segment SEQ ID NOs: 450, 451, 452, 453, 454, 455, 456, 457, 458, 459, 460, 461, 462, 463, 464, 465, 466, 467, 468, 469, 470, 471, 472, 473, 474 and 475.

[0145] According to preferred embodiments of the present invention, there is provided an isolated polypeptide comprising SEQ ID NOs 603, 604, 605, 606 and 607.

[0146] According to preferred embodiments of the present invention, there is provided an isolated polynucleotide comprising a transcript SEQ ID NO. 81, 82, 83 and 84.

[0147] According to preferred embodiments of the present invention, there is provided an isolated polynucleotide comprising a segment SEQ ID NOs: 476, 477, 478, 479, 480, 481, 482, 483, 484, 485, 486, 487, 488, 489, 490, 491, 492, 493, 494, 495, 496, 497, 498, 499, 500, 501, 502, 503 and 504.

[0148] According to preferred embodiments of the present invention, there is provided an isolated polypeptide comprising SEQ ID NOs 608, 609, 610 and 611.

[0149] According to preferred embodiments of the present invention, there is provided an isolated polynucleotide comprising a transcript SEQ ID NO. 85, 86, 87 and 88.

[0150] According to preferred embodiments of the present invention, there is provided an isolated polynucleotide comprising a segment SEQ ID NOs: 505-532 and 533.

[0151] According to preferred embodiments of the present invention, there is provided an isolated polypeptide comprising SEQ ID NOs: 612, 613, 614 and 615.

[0152] According to preferred embodiments of the present invention, there is provided an isolated chimeric polypeptide encodings from clusters M85491, T10888, H14624, H53626, HSENA78, HUMGROG5, HUMODCA, R00299, Z19178, S67314, Z44808, Z25299, HUMF5A, HUMANK, Z39818, HUMCA1XIA, HSS100PCB, HUMPHOSLIP, D11853, R11723, M77903 and HSKITCR.

[0153] According to preferred embodiments of the present invention, there is provided an isolated chimeric polypeptide encoding for SEQ ID NO. 608, comprising a first amino acid sequence being at least 90% homologous to amino acids 1-207 of SSRA_HUMAN (SEQ ID NO:641), which also corresponds to amino acids 1-207 of SEQ ID NO. 608, and a second amino acid sequence being at least 70%, optionally at least 80%, preferably at least 85%, more preferably at least 90% and most preferably at least 95% homologous to a polypeptide corresponding to amino acids 208-214 of SEQ ID NO. 608, wherein said first amino acid sequence and second amino acid sequence are contiguous and in a sequential order.

[0154] According to preferred embodiments of the present invention, there is provided an isolated polypeptide encoding for a tail of SEQ ID NO. 608, comprising a polypeptide being at least 70%, optionally at least about 80%, preferably at least about 85%, more preferably at least about 90% and most preferably at least about 95% homologous to in SEQ ID NO. 608.

[0155] According to preferred embodiments of the present invention, there is provided an isolated chimeric polypeptide encoding for SEQ ID NO. 609, comprising a first amino acid sequence being at least 90% homologous to amino acids 1-207 of SSRA_HUMAN (SEQ ID NO:641), which also corresponds to amino acids 1-207 of SEQ ID NO. 609.

[0156] According to preferred embodiments of the present invention, there is provided an isolated chimeric polypeptide encoding for SEQ ID NO. 610, comprising a first amino acid sequence being at least 90% homologous to amino acids 1-181 of SSRA_HUMAN (SEQ ID NO:641), which also corresponds to amino acids 1-181 of SEQ ID NO. 610, and a second amino acid sequence being at least 70%, optionally at least 80%, preferably at least 85%, more preferably at least 90% and most preferably at least 95% homologous to a polypeptide corresponding to amino acids 182-192 of SEQ ID NO. 610, wherein said first amino acid sequence and second amino acid sequence are contiguous and in a sequential order.

[0157] According to preferred embodiments of the present invention, there is provided an isolated polypeptide encoding for a tail of SEQ ID NO. 610, comprising a polypeptide being at least 70%, optionally at least about 80%, preferably at least about 85%, more preferably at least about 90% and most preferably at least about 95% homologous to in SEQ ID NO. 610.

[0158] According to preferred embodiments of the present invention, there is provided an isolated chimeric polypeptide encoding for SEQ ID NO. 611, comprising a first amino acid sequence being at least 90% homologous to amino acids 1-93 of SSRA_HUMAN (SEQ ID NO:641), which also corresponds to amino acids 1-93 of SEQ ID NO. 611, and a second amino acid sequence being at least 70%, optionally at least 80%, preferably at least 85%, more preferably at least 90% and most preferably at least 95% homologous to a polypeptide corresponding to amino acids 94-104 of SEQ ID NO. 611, wherein said first amino acid sequence and second amino acid sequence are contiguous and in a sequential order.

[0159] According to preferred embodiments of the present invention, there is provided an isolated polypeptide encoding for a tail of SEQ ID NO. 611, comprising a polypeptide being at least 70%, optionally at least about 80%, preferably at least about 85%, more preferably at least about 90% and most preferably at least about 95% homologous to amino in SEQ ID NO. 611.

[0160] According to preferred embodiments of the present invention, there is provided an isolated chimeric polypeptide encoding for SEQ ID NO. 604, comprising a first amino acid sequence being at least 70%, optionally at least 80%, preferably at least 85%, more preferably at least 90% and most preferably at least 95% homologous to a polypeptide corresponding to amino acids 1-110 of SEQ ID NO. 604, and a second amino acid sequence being at least 90% homologous to amino acids 1-112 of Q8IXM0, which also corresponds to amino acids 111-222 of SEQ ID NO. 604, wherein said first and second amino acid sequences are contiguous and in a sequential order.

[0161] According to preferred embodiments of the present invention, there is provided an isolated polypeptide encoding for a head of SEQ ID NO. 604, comprising a polypeptide being at least 70%, optionally at least about 80%, preferably at least about 85%, more preferably at least about 90% and most preferably at least about 95% homologous to amino acids 1-110 of SEQ ID NO. 604.

[0162] According to preferred embodiments of the present invention, there is provided an isolated chimeric polypeptide encoding for SEQ ID NO. 604, comprising a first amino acid sequence being at least 90% homologous to amino acids 1-83 of Q96AC2, which also corresponds to amino acids 1-83 of SEQ ID NO. 604, and a second amino acid sequence being at least 70%, optionally at least 80%, preferably at least 85%, more preferably at least 90% and most preferably at least 95% homologous to a polypeptide corresponding to amino acids 84-222 of SEQ ID NO. 604, wherein said first and second amino acid sequences are contiguous and in a sequential order.

[0163] According to preferred embodiments of the present invention, there is provided an isolated polypeptide encoding for a tail of SEQ ID NO. 604, comprising a polypeptide being at least 70%, optionally at least about 80%, preferably at least about 85%, more preferably at least about 90% and most preferably at least about 95% homologous to amino in SEQ ID NO. 604.

[0164] According to preferred embodiments of the present invention, there is provided an isolated chimeric polypeptide encoding for SEQ ID NO. 604, comprising a first amino acid sequence being at least 90% homologous to amino acids 1-83 of Q8N2G4, which also corresponds to amino acids 1-83 of SEQ ID NO. 604, and a second amino acid sequence being at least 70%, optionally at least 80%, preferably at least 85%, more preferably at least 90% and most preferably at least 95% homologous to a polypeptide corresponding to amino acids 84-222 of SEQ ID NO. 604, wherein said first and second amino acid sequences are contiguous and in a sequential order.

[0165] According to preferred embodiments of the present invention, there is provided an isolated polypeptide encoding for a tail of SEQ ID NO. 604, comprising a polypeptide being at least 70%, optionally at least about 80%, preferably at least about 85%, more preferably at least about 90% and most preferably at least about 95% homologous to amino in SEQ ID NO. 604.

[0166] According to preferred embodiments of the present invention, there is provided an isolated chimeric polypeptide encoding for SEQ ID NO. 604, comprising a first amino acid sequence being at least 90% homologous to amino acids 24-106 of BAC85518 (SEQ ID NO:1396), which also corresponds to amino acids 1-83 of SEQ ID NO. 604, and a second amino acid sequence being at least 70%, optionally at least 80%, preferably at least 85%, more preferably at least 90% and most preferably at least 95% homologous to a polypeptide corresponding to amino acids 84-222 of SEQ ID NO. 604, wherein said first and second amino acid sequences are contiguous and in a sequential order.

[0167] According to preferred embodiments of the present invention, there is provided an isolated polypeptide encoding for a tail of SEQ ID NO. 604, comprising a polypeptide being at least 70%, optionally at least about 80%, preferably at least about 85%, more preferably at least about 90% and most preferably at least about 95% homologous to amino in SEQ ID NO. 604.

[0168] According to preferred embodiments of the present invention, there is provided an isolated chimeric polypeptide encoding for SEQ ID NO. 605, comprising a first amino acid sequence being at least 90% homologous to amino acids 1-64 of Q96AC2, which also corresponds to amino acids 1-64 of SEQ ID NO. 605, and a second amino acid sequence being at least 70%, optionally at least 80%, preferably at least 85%, more preferably at least 90% and most preferably at least 95% homologous to a polypeptide corresponding to amino acids 65-93 of SEQ ID NO. 605, wherein said first and second amino acid sequences are contiguous and in a sequential order.

[0169] According to preferred embodiments of the present invention, there is provided an isolated polypeptide encoding for a tail of SEQ ID NO. 605, comprising a polypeptide being at least 70%, optionally at least about 80%, preferably at least about 85%, more preferably at least about 90% and most preferably at least about 95% homologous to amino acids 65-93 in SEQ ID NO. 605.

[0170] According to preferred embodiments of the present invention, there is provided an isolated chimeric polypeptide encoding for SEQ ID NO. 605, comprising a first amino acid sequence being at least 90% homologous to amino acids 1-64 of Q8N2G4, which also corresponds to amino acids 1-64 of SEQ ID NO. 605, and a second amino acid sequence being at least 70%, optionally at least 80%, preferably at least 85%, more preferably at least 90% and most preferably at least 95% homologous to a polypeptide corresponding to amino acids 65-93 of SEQ ID NO. 605, wherein said first and second amino acid sequences are contiguous and in a sequential order.

[0171] According to preferred embodiments of the present invention, there is provided an isolated polypeptide encoding for a tail of SEQ ID NO. 605, comprising a polypeptide being at least 70%, optionally at least about 80%, preferably at least about 85%, more preferably at least about 90% and most preferably at least about 95% homologous to amino acids 65-93 in SEQ ID NO. 605.

[0172] According to preferred embodiments of the present invention, there is provided an isolated chimeric polypeptide encoding for SEQ ID NO. 605, comprising a first amino acid sequence being at least 70%, optionally at least 80%, preferably at least 85%, more preferably at least 90% and most preferably at least 95% homologous to a polypeptide having the sequence MWVLG corresponding to amino acids 1-5 of SEQ ID NO. 605, second amino acid sequence being at least 90% homologous to amino acids 22-80 of BAC85273 (SEQ ID NO:1397), which also corresponds to amino acids 6-64 of SEQ ID NO. 605, and a third amino acid sequence being at least 70%, optionally at least 80%, preferably at least 85%, more preferably at least 90% and most preferably at least 95% homologous to a polypeptide sequence corresponding to amino acids 65-93 of SEQ ID NO. 605, wherein said first, second and third amino acid sequences are contiguous and in a sequential order.

[0173] According to preferred embodiments of the present invention, there is provided an isolated polypeptide encoding for a head of SEQ ID NO. 605, comprising a polypeptide being at least 70%, optionally at least about 80%, preferably at least about 85%, more preferably at least about 90% and most preferably at least about 95% homologous to amino acids 1-5 of SEQ ID NO. 605.

[0174] According to preferred embodiments of the present invention, there is provided an isolated polypeptide encoding for a tail of SEQ ID NO. 605, comprising a polypeptide being at least 70%, optionally at least about 80%, preferably at least about 85%, more preferably at least about 90% and most preferably at least about 95% homologous to amino acids 65-93 in SEQ ID NO. 605.

[0175] According to preferred embodiments of the present invention, there is provided an isolated chimeric polypeptide encoding for SEQ ID NO. 605, comprising a first amino acid sequence being at least 90% homologous to amino acids 24-87 of BAC85518 (SEQ ID NO:1396), which also corresponds to amino acids 1-64 of SEQ ID NO. 605, and a second amino acid sequence being at least 70%, optionally at least 80%, preferably at least 85%, more preferably at least 90% and most preferably at least 95% homologous to a polypeptide sequence corresponding to amino acids 65-93 of SEQ ID NO. 605, wherein said first and second amino acid sequences are contiguous and in a sequential order.

[0176] According to preferred embodiments of the present invention, there is provided an isolated polypeptide encoding for a tail of SEQ ID NO. 605, comprising a polypeptide being at least 70%, optionally at least about 80%, preferably at least about 85%, more preferably at least about 90% and most preferably at least about 95% homologous to amino acids 65-93 in SEQ ID NO. 605.

[0177] According to preferred embodiments of the present invention, there is provided an isolated chimeric polypeptide encoding for SEQ ID NO. 605, comprising a first amino acid sequence being at least 90% homologous to amino acids 1-63 of Q96AC2, which also corresponds to amino acids 1-63 of SEQ ID NO. 606, and a second amino acid sequence being at least 70%, optionally at least 80%, preferably at least 85%, more preferably at least 90% and most preferably at least 95% homologous to a polypeptide sequence corresponding to amino acids 64-84 of SEQ ID NO. 606, wherein said first and second amino acid sequences are contiguous and in a sequential order.

[0178] According to preferred embodiments of the present invention, there is provided an isolated polypeptide encoding for a tail of SEQ ID NO. 606, comprising a polypeptide being at least 70%, optionally at least about 80%, preferably at least about 85%, more preferably at least about 90% and most preferably at least about 95% homologous to amino acids 64-84 in SEQ ID NO. 606.

[0179] According to preferred embodiments of the present invention, there is provided an isolated chimeric polypeptide encoding for SEQ ID NO. 607, comprising a first amino acid sequence being at least 90% homologous to amino acids 1-63 of Q96AC2, which also corresponds to amino acids 1-63 of SEQ ID NO. 607, and a second amino acid sequence being at least 70%, optionally at least 80%, preferably at least 85%, more preferably at least 90% and most preferably at least 95% homologous to a polypeptide sequence corresponding to amino acids 64-90 of SEQ ID NO. 607, wherein said first and second amino acid sequences are contiguous and in a sequential order.

[0180] According to preferred embodiments of the present invention, there is provided an isolated polypeptide encoding for a tail of SEQ ID NO. 607, comprising a polypeptide being at least 70%, optionally at least about 80%, preferably at least about 85%, more preferably at least about 90% and most preferably at least about 95% homologous to amino acids 64-90 in SEQ ID NO. 607.

[0181] According to preferred embodiments of the present invention, there is provided an isolated chimeric polypeptide encoding for SEQ ID NO. 607, comprising a first amino acid sequence being at least 90% homologous to amino acids 1-63 of Q8N2G4, which also corresponds to amino acids 1-63 of SEQ ID NO. 607, and a second amino acid sequence being at least 70%, optionally at least 80%, preferably at least 85%, more preferably at least 90% and most preferably at least 95% homologous to a polypeptide sequence corresponding to amino acids 64-90 of SEQ ID NO. 607 wherein said first and second amino acid sequences are contiguous and in a sequential order.

[0182] According to preferred embodiments of the present invention, there is provided an isolated polypeptide encoding for a tail of SEQ ID NO. 607, comprising a polypeptide being at least 70%, optionally at least about 80%, preferably at least about 85%, more preferably at least about 90% and most preferably at least about 95% homologous to amino acids 64-90 in SEQ ID NO. 607.

[0183] According to preferred embodiments of the present invention, there is provided an isolated chimeric polypeptide encoding for SEQ ID NO. 607, comprising a first amino acid sequence being at least 70%, optionally at least 80%, preferably at least 85%, more preferably at least 90% and most preferably at least 95% homologous to a polypeptide sequence corresponding to amino acids 1-5 of SEQ ID NO. 607, second amino acid sequence being at least 90% homologous to amino acids 22-79 of BAC85273 (SEQ ID NO:1397), which also corresponds to amino acids 6-63 of SEQ ID NO. 607, and a third amino acid sequence being at least 70%, optionally at least 80%, preferably at least 85%, more preferably at least 90% and most preferably at least 95% homologous to a polypeptide sequence corresponding to amino acids 64-90 of SEQ ID NO. 607, wherein said first, second and third amino acid sequences are contiguous and in a sequential order.

[0184] According to preferred embodiments of the present invention, there is provided an isolated polypeptide encoding for a head of SEQ ID NO. 607, comprising a polypeptide being at least 70%, optionally at least about 80%, preferably at least about 85%, more preferably at least about 90% and most preferably at least about 95% homologous to amino acids 1-5 of SEQ ID NO. 607.

[0185] According to preferred embodiments of the present invention, there is provided an isolated polypeptide encoding for a tail of SEQ ID NO. 607, comprising a polypeptide being at least 70%, optionally at least about 80%, preferably at least about 85%, more preferably at least about 90% and most preferably at least about 95% homologous to amino acids 64-90 in SEQ ID NO. 607.

[0186] According to preferred embodiments of the present invention, there is provided an isolated chimeric polypeptide encoding for SEQ ID NO. 607, comprising a first amino acid sequence being at least 90% homologous to amino acids 24-86 of BAC85518 (SEQ ID NO:1396), which also corresponds to amino acids 1-63 of SEQ ID NO. 607, and a second amino acid sequence being at least 70%, optionally at least 80%, preferably at least 85%, more preferably at least 90% and most preferably at least 95% homologous to a polypeptide sequence corresponding to amino acids 64-90 of SEQ ID NO. 607, wherein said first and second amino acid sequences are contiguous and in a sequential order.

[0187] According to preferred embodiments of the present invention, there is provided an isolated polypeptide encoding for a tail of SEQ ID NO. 607, comprising a polypeptide being at least 70%, optionally at least about 80%, preferably at least about 85%, more preferably at least about 90% and most preferably at least about 95% homologous to amino acids 64-90 in SEQ ID NO. 607.

[0188] According to preferred embodiments of the present invention, there is provided an isolated chimeric polypeptide encoding for SEQ ID NO. 588, comprising a first amino acid sequence being at least 70%, optionally at least 80%, preferably at least 85%, more preferably at least 90% and most preferably at least 95% homologous to a polypeptide sequence corresponding to amino acids 1-26 of SEQ ID NO. 588, a second amino acid sequence being at least 90% homologous to amino acids 13-187 of SEQ ID NO. 639, which also corresponds to amino acids 27-201 of SEQ ID NO. 588, a bridging amino acid A corresponding to amino acid 202 of SEQ ID NO. 588, and a third amino acid sequence being at least 90% homologous to amino acids 189-342 of SEQ ID NO. 639, which also corresponds to amino acids 203-356 of SEQ ID NO. 588, wherein said first amino acid sequence, second amino acid sequence, bridging amino acid and third amino acid sequence are contiguous and in a sequential order.

[0189] According to preferred embodiments of the present invention, there is provided an isolated polypeptide encoding for a head of SEQ ID NO. 588, comprising a polypeptide being at least 70%, optionally at least about 80%, preferably at least about 85%, more preferably at least about 90% and most preferably at least about 95% homologous to the sequence amino acids 1-26 of SEQ ID NO. 588.

[0190] According to preferred embodiments of the present invention, there is provided an isolated chimeric polypeptide encoding for SEQ ID NO. 588, comprising a first amino acid sequence being at least 70%, optionally at least 80%, preferably at least 85%, more preferably at least 90% and most preferably at least 95% homologous to a polypeptide sequence corresponding to amino acids 1-109 of SEQ ID NO. 588, a second amino acid sequence being at least 90% homologous to amino acids 1-159 of SEQ ID NO. 640, which also corresponds to amino acids 110-268 of SEQ ID NO. 588, and a third amino acid sequence being at least 70%, optionally at least 80%, preferably at least 85%, more preferably at least 90% and most preferably at least 95% homologous to a polypeptide sequence corresponding to amino acids 269-356 of SEQ ID NO. 588, wherein said first amino acid sequence, second amino acid sequence and third amino acid sequence are contiguous and in a sequential order.

[0191] According to preferred embodiments of the present invention, there is provided an isolated polypeptide encoding for a head of SEQ ID NO. 588, comprising a polypeptide being at least 70%, optionally at least about 80%, preferably at least about 85%, more preferably at least about 90% and most preferably at least about 95% homologous to amino acids 269-356 of SEQ ID NO. 588.

[0192] According to preferred embodiments of the present invention, there is provided an isolated polypeptide encoding for a tail of SEQ ID NO. 588, comprising a polypeptide being at least 70%, optionally at least about 80%, preferably at least about 85%, more preferably at least about 90% and most preferably at least about 95% homologous to amino in SEQ ID NO. 588.

[0193] According to preferred embodiments of the present invention, there is provided an isolated chimeric polypeptide encoding for SEQ ID NO. 588, comprising a first amino acid sequence being at least 90% homologous to amino acids 1-128 of SEQ ID NO. 638, which also corresponds to amino acids 1-128 of SEQ ID NO. 588, a bridging amino acid L corresponding to amino acid 129 of SEQ ID NO. 588, and a second amino acid sequence being at least 90% homologous to amino acids 130-356 of SEQ ID NO. 638, which also corresponds to amino acids 130-356 of SEQ ID NO. 588, wherein said first amino acid sequence, bridging amino acid and second amino acid sequence are contiguous and in a sequential order.

[0194] According to preferred embodiments of the present invention, there is provided an isolated chimeric polypeptide encoding for SEQ ID NO. 589, comprising a first amino acid sequence being at least 70%, optionally at least 80%, preferably at least 85%, more preferably at least 90% and most preferably at least 95% homologous to amino acids 1-26 of SEQ ID NO. 589, a second amino acid sequence being at least 90% homologous to amino acids 13-187 of SEQ ID NO. 639, which also corresponds to amino acids 27-201 of SEQ ID NO. 589, a bridging amino acid A corresponding to amino acid 202 of SEQ ID NO. 589, a third amino acid sequence being at least 90% homologous to amino acids 189-297 of SEQ ID NO. 639, which also corresponds to amino acids 203-311 of SEQ ID NO. 589, and a fourth amino acid sequence being at least 70%, optionally at least 80%, preferably at least 85%, more preferably at least 90% and most preferably at least 95% homologous to a polypeptide sequence corresponding to amino acids 312-315 of SEQ ID NO. 589, wherein said first amino acid sequence, second amino acid sequence, bridging amino acid, third amino acid sequence and fourth amino acid sequence are contiguous and in a sequential order.

[0195] According to preferred embodiments of the present invention, there is provided an isolated polypeptide encoding for a head of SEQ ID NO. 589, comprising a polypeptide being at least 70%, optionally at least about 80%, preferably at least about 85%, more preferably at least about 90% and most preferably at least about 95% homologous to amino acids 1-26 of SEQ ID NO. 589.

[0196] According to preferred embodiments of the present invention, there is provided an isolated polypeptide encoding for a tail of SEQ ID NO. 589, comprising a polypeptide being at least 70%, optionally at least about 80%, preferably at least about 85%, more preferably at least about 90% and most preferably at least about 95% homologous to amino in SEQ ID NO. 589.

[0197] According to preferred embodiments of the present invention, there is provided an isolated chimeric polypeptide encoding for SEQ ID NO. 589, comprising a first amino acid sequence being at least 70%, optionally at least 80%, preferably at least 85%, more preferably at least 90% and most preferably at least 95% homologous to a polypeptide sequence to amino acids 1-109 of SEQ ID NO. 589, a second amino acid sequence being at least 90% homologous to amino acids 1-159 of SEQ ID NO. 640, which also corresponds to amino acids 110-268 of SEQ ID NO. 589, and a third amino acid sequence being at least 70%, optionally at least 80%, preferably at least 85%, more preferably at least 90% and most preferably at least 95% homologous to a polypeptide sequence corresponding to amino acids 269-315 of SEQ ID NO. 589, wherein said first amino acid sequence, second amino acid sequence and third amino acid sequence are contiguous and in a sequential order.

[0198] According to preferred embodiments of the present invention, there is provided an isolated polypeptide encoding for a head of SEQ ID NO. 589, comprising a polypeptide being at least 70%, optionally at least about 80%, preferably at least about 85%, more preferably at least about 90% and most preferably at least about 95% homologous to amino acids 1-109 of SEQ ID NO. 589.

[0199] According to preferred embodiments of the present invention, there is provided an isolated polypeptide encoding for a tail of SEQ ID NO. 589, comprising a polypeptide being at least 70%, optionally at least about 80%, preferably at least about 85%, more preferably at least about 90% and most preferably at least about 95% homologous to amino in SEQ ID NO. 589.

[0200] According to preferred embodiments of the present invention, there is provided an isolated chimeric polypeptide encoding for SEQ ID NO. 589, comprising a first amino acid sequence being at least 90% homologous to amino acids 1-128 of SEQ ID NO. 638, which also corresponds to amino acids 1-128 of SEQ ID NO. 589, a bridging amino acid L corresponding to amino acid 129 of SEQ ID NO. 589, a second amino acid sequence being at least 90% homologous to amino acids 130-311 of SEQ ID NO. 638, which also corresponds to amino acids 130-311 of SEQ ID NO. 589, and a third amino acid sequence being at least 70%, optionally at least 80%, preferably at least 85%, more preferably at least 90% and most preferably at least 95% homologous to a polypeptide sequence corresponding to amino acids 130-311 of SEQ ID NO. 589, wherein said first amino acid sequence, bridging amino acid, second amino acid sequence and third amino acid sequence are contiguous and in a sequential order.

[0201] According to preferred embodiments of the present invention, there is provided an isolated polypeptide encoding for a tail of SEQ ID NO. 589, comprising a polypeptide being at least 70%, optionally at least about 80%, preferably at least about 85%, more preferably at least about 90% and most preferably at least about 95% homologous to amino in SEQ ID NO. 589.

[0202] According to preferred embodiments of the present invention, there is provided an isolated chimeric polypeptide encoding for SEQ ID NO. 589, comprising a first amino acid sequence being at least 90% homologous to amino acids 1-311 of Q9UJZ1 (SEQ ID NO:637), which also corresponds to amino acids 1-311 of SEQ ID NO. 589, and a second amino acid sequence being at least 70%, optionally at least 80%, preferably at least 85%, more preferably at least 90% and most preferably at least 95% homologous to a polypeptide sequence corresponding to amino acids 312-315 of SEQ ID NO. 589, wherein said first amino acid sequence and second amino acid sequence are contiguous and in a sequential order.

[0203] According to preferred embodiments of the present invention, there is provided an isolated polypeptide encoding for a tail of SEQ ID NO. 589, comprising a polypeptide being at least 70%, optionally at least about 80%, preferably at least about 85%, more preferably at least about 90% and most preferably at least about 95% homologous to amino in SEQ ID NO. 589.

[0204] According to preferred embodiments of the present invention, there is provided an isolated chimeric polypeptide encoding for SEQ ID NO. 589, comprising a first amino acid sequence being at least 70%, optionally at least 80%, preferably at least 85%, more preferably at least 90% and most preferably at least 95% homologous to a polypeptide sequence corresponding to amino acids 1-109 of SEQ ID NO. 589, a second amino acid sequence being at least 90% homologous to amino acids 1-159 of SEQ ID NO. 640, which also corresponds to amino acids 110-268 of SEQ ID NO. 589, and a third amino acid sequence being at least 70%, optionally at least 80%, preferably at least 85%, more preferably at least 90% and most preferably at least 95% homologous to a polypeptide sequence corresponding to amino acids 269-315 of SEQ ID NO. 589, wherein said first amino acid sequence, second amino acid sequence and third amino acid sequence are contiguous and in a sequential order.

[0205] According to preferred embodiments of the present invention, there is provided an isolated polypeptide encoding for a head of SEQ ID NO. 589, comprising a polypeptide being at least 70%, optionally at least about 80%, preferably at least about 85%, more preferably at least about 90% and most preferably at least about 95% homologous to amino acids 1-109 of SEQ ID NO. 589.

[0206] According to preferred embodiments of the present invention, there is provided an isolated polypeptide encoding for a tail of SEQ ID NO. 589, comprising a polypeptide being at least 70%, optionally at least about 80%, preferably at least about 85%, more preferably at least about 90% and most preferably at least about 95% homologous to amino in SEQ ID NO. 589.

[0207] According to preferred embodiments of the present invention, there is provided an isolated chimeric polypeptide encoding for SEQ ID NO. 589, comprising a first amino acid sequence being at least 90% homologous to amino acids 1-128 of SEQ ID NO. 638, which also corresponds to amino acids 1-128 of SEQ ID NO. 589, a bridging amino acid L corresponding to amino acid 129 of SEQ ID NO. 589, a second amino acid sequence being at least 90% homologous to amino acids 130-311 of SEQ ID NO. 638, which also corresponds to amino acids 130-311 of SEQ ID NO. 589, and a third amino acid sequence being at least 70%, optionally at least 80%, preferably at least 85%, more preferably at least 90% and most preferably at least 95% homologous to a polypeptide sequence corresponding to amino acids 312-315 of SEQ ID NO. 589, wherein said first amino acid sequence, bridging amino acid, second amino acid sequence and third amino acid sequence are contiguous and in a sequential order.

[0208] According to preferred embodiments of the present invention, there is provided an isolated polypeptide encoding for a tail of SEQ ID NO. 589, comprising a polypeptide being at least 70%, optionally at least about 80%, preferably at least about 85%, more preferably at least about 90% and most preferably at least about 95% homologous to amino in SEQ ID NO. 589.

[0209] According to preferred embodiments of the present invention, there is provided an isolated chimeric polypeptide encoding for SEQ ID NO. 589, comprising a first amino acid sequence being at least 90% homologous to amino acids 1-311 of Q9UJZ1 (SEQ ID NO:637), which also corresponds to amino acids 1-311 of SEQ ID NO. 589, and a second amino acid sequence being at least 70%, optionally at least 80%, preferably at least 85%, more preferably at least 90% and most preferably at least 95% homologous to a polypeptide sequence corresponding to amino acids 312-315 of SEQ ID NO. 589, wherein said first amino acid sequence and second amino acid sequence are contiguous and in a sequential order.

[0210] According to preferred embodiments of the present invention, there is provided an isolated polypeptide encoding for a tail of SEQ ID NO. 589, comprising a polypeptide being at least 70%, optionally at least about 80%, preferably at least about 85%, more preferably at least about 90% and most preferably at least about 95% homologous to amino in SEQ ID NO. 589.

[0211] According to preferred embodiments of the present invention, there is provided an isolated chimeric polypeptide encoding for SEQ ID NO. 590, comprising a first amino acid sequence being at least 70%, optionally at least 80%, preferably at least 85%, more preferably at least 90% and most preferably at least 95% homologous to a polypeptide sequence corresponding to amino acids 1-26 of SEQ ID NO. 590, a second amino acid sequence being at least 90% homologous to amino acids 13-187 of Q9P042 (SEQ ID NO:639), which also corresponds to amino acids 27-201 of SEQ ID NO. 590, a bridging amino acid A corresponding to amino acid 202 of SEQ ID NO. 590, a third amino acid sequence being at least 90% homologous to amino acids 189-254 of SEQ ID NO. 639, which also corresponds to amino acids 203-268 of SEQ ID NO. 590, and a fourth amino acid sequence being at least 70%, optionally at least 80%, preferably at least 85%, more preferably at least 90% and most preferably at least 95% homologous to a polypeptide sequence corresponding to amino acids 269-290 of SEQ ID NO. 590, wherein said first amino acid sequence, second amino acid sequence, bridging amino acid, third amino acid sequence and fourth amino acid sequence are contiguous and in a sequential order.

[0212] According to preferred embodiments of the present invention, there is provided an isolated polypeptide encoding for a head of SEQ ID NO. 590, comprising a polypeptide being at least 70%, optionally at least about 80%, preferably at least about 85%, more preferably at least about 90% and most preferably at least about 95% homologous to amino acids 1-26 of SEQ ID NO. 590.

[0213] According to preferred embodiments of the present invention, there is provided an isolated polypeptide encoding for a tail of SEQ ID NO. 590, comprising a polypeptide being at least 70%, optionally at least about 80%, preferably at least about 85%, more preferably at least about 90% and most preferably at least about 95% homologous to amino in SEQ ID NO. 590.

[0214] According to preferred embodiments of the present invention, there is provided an isolated chimeric polypeptide encoding for SEQ ID NO. 590, comprising a first amino acid sequence being at least 70%, optionally at least 80%, preferably at least 85%, more preferably at least 90% and most preferably at least 95% homologous to a polypeptide sequence corresponding to amino acids 1-109 of SEQ ID NO. 590, and a second amino acid sequence being at least 90% homologous to corresponding to amino acids 1-181 of SEQ ID NO. 640, which also corresponds to amino acids 110-290 of SEQ ID NO. 590, wherein said first amino acid sequence and second amino acid sequence are contiguous and in a sequential order.

[0215] According to preferred embodiments of the present invention, there is provided an isolated polypeptide encoding for a head of SEQ ID NO. 590, comprising a polypeptide being at least 70%, optionally at least about 80%, preferably at least about 85%, more preferably at least about 90% and most preferably at least about 95% homologous to amino acids 1-109 of SEQ ID NO. 590.

[0216] According to preferred embodiments of the present invention, there is provided an isolated chimeric polypeptide encoding for SEQ ID NO. 590, comprising a first amino acid sequence being at least 90% homologous to amino acids 1-128 of SEQ ID NO. 638, which also corresponds to amino acids 1-128 of SEQ ID NO. 590, a bridging amino acid L corresponding to amino acid 129 of SEQ ID NO. 590, a second amino acid sequence being at least 90% homologous to amino acids 130-268 of SEQ ID NO. 638, which also corresponds to amino acids 130-268 of SEQ ID NO. 590, and a third amino acid sequence being at least 70%, optionally at least 80%, preferably at least 85%, more preferably at least 90% and most preferably at least 95% homologous to a polypeptide sequence corresponding to amino acids 269-290 of SEQ ID NO. 590, wherein said first amino acid sequence, bridging amino acid, second amino acid sequence and third amino acid sequence are contiguous and in a sequential order.

[0217] According to preferred embodiments of the present invention, there is provided an isolated polypeptide encoding for a tail of SEQ ID NO. 590, comprising a polypeptide being at least 70%, optionally at least about 80%, preferably at least about 85%, more preferably at least about 90% and most preferably at least about 95% homologous to amino in SEQ ID NO. 590.

[0218] According to preferred embodiments of the present invention, there is provided an isolated chimeric polypeptide encoding for SEQ ID NO. 590, comprising a first amino acid sequence being at least 90% homologous to amino acids 1-268 of Q9UJZ1 (SEQ ID NO:637), which also corresponds to amino acids 1-268 of SEQ ID NO. 590, and a second amino acid sequence being at least 70%, optionally at least 80%, preferably at least 85%, more preferably at least 90% and most preferably at least 95% homologous to a polypeptide sequence corresponding to amino acids 269-290 of SEQ ID NO. 590, wherein said first amino acid sequence and second amino acid sequence are contiguous and in a sequential order.

[0219] According to preferred embodiments of the present invention, there is provided an isolated polypeptide encoding for a tail of SEQ ID NO. 590, comprising a polypeptide being at least 70%, optionally at least about 80%, preferably at least about 85%, more preferably at least about 90% and most preferably at least about 95% homologous to amino in SEQ ID NO. 590.

[0220] According to preferred embodiments of the present invention, there is provided an isolated chimeric polypeptide encoding for SEQ ID NO. 591, comprising a first amino acid sequence being at least 70%, optionally at least 80%, preferably at least 85%, more preferably at least 90% and most preferably at least 95% homologous to a polypeptide sequence corresponding to amino acids 1-26 of SEQ ID NO. 591, a second amino acid sequence being at least 90% homologous to amino acids 13-187 of SEQ ID NO. 639, which also corresponds to amino acids 27-201 of SEQ ID NO. 591, a bridging amino acid A corresponding to amino acid 202 of SEQ ID NO. 591, a third amino acid sequence being at least 90% homologous to amino acids 189-226 of SEQ ID NO. 639, which also corresponds to amino acids 282-397 of SEQ ID NO. 591, a fourth amino acid sequence being at least 70%, optionally at least 80%, preferably at least 85%, more preferably at least 90% and most preferably at least 95% homologous to a polypeptide sequence corresponding to amino acids 241-281 of SEQ ID NO. 591, and a fifth amino acid sequence being at least 90% homologous to amino acids 227-342 of SEQ ID NO. 639, which also corresponds to amino acids 282-397 of SEQ ID NO. 591, wherein said first amino acid sequence, second amino acid sequence, bridging amino acid, third amino acid sequence, fourth amino acid sequence and fifth amino acid sequence are contiguous and in a sequential order.

[0221] According to preferred embodiments of the present invention, there is provided an isolated polypeptide encoding for a head of SEQ ID NO. 591, comprising a polypeptide being at least 70%, optionally at least about 80%, preferably at least about 85%, more preferably at least about 90% and most preferably at least about 95% homologous to amino acids 1-26 of SEQ ID NO. 591.

[0222] According to preferred embodiments of the present invention, there is provided an isolated polypeptide encoding for an edge portion of SEQ ID NO. 591, comprising an amino acid sequence being at least 70%, optionally at least about 80%, preferably at least about 85%, more preferably at least about 90% and most preferably at least about 95% homologous to the sequence encoding amino corresponding to SEQ ID NO. 591.

[0223] According to preferred embodiments of the present invention, there is provided an isolated chimeric polypeptide encoding for SEQ ID NO. 591, comprising a first amino acid sequence being at least 70%, optionally at least 80%, preferably at least 85%, more preferably at least 90% and most preferably at least 95% homologous to a polypeptide sequence corresponding to amino acids 1-109 of SEQ ID NO. 591, a second amino acid sequence being at least 90% homologous to amino acids 1-131 of SEQ ID NO. 640, which also corresponds to amino acids 110-240 of SEQ ID NO. 591, a third amino acid sequence being at least 70%, optionally at least 80%, preferably at least 85%, more preferably at least 90% and most preferably at least 95% homologous to a polypeptide sequence corresponding to amino acids 241-281 of SEQ ID NO. 591, a fourth amino acid sequence being at least 90% homologous to amino acids 132-159 of SEQ ID NO. 640, which also corresponds to amino acids 282-309 of SEQ ID NO. 591, and a fifth amino acid sequence being at least 70%, optionally at least 80%, preferably at least 85%, more preferably at least 90% and most preferably at least 95% homologous to a polypeptide sequence corresponding to amino acids 310-397 of SEQ ID NO. 591, wherein said first amino acid sequence, second amino acid sequence, third amino acid sequence, fourth amino acid sequence and fifth amino acid sequence are contiguous and in a sequential order.

[0224] According to preferred embodiments of the present invention, there is provided an isolated polypeptide encoding for a head of SEQ ID NO. 591, comprising a polypeptide being at least 70%, optionally at least about 80%, preferably at least about 85%, more preferably at least about 90% and most preferably at least about 95% homologous to amino acids 1-109 of SEQ ID NO. 591.

[0225] According to preferred embodiments of the present invention, there is provided an isolated polypeptide encoding for an edge portion of SEQ ID NO. 591, comprising an amino acid sequence being at least 70%, optionally at least about 80%, preferably at least about 85%, more preferably at least about 90% and most preferably at least about 95% homologous to the sequence encoding for amino corresponding to SEQ ID NO. 591.

[0226] According to preferred embodiments of the present invention, there is provided an isolated polypeptide encoding for a tail of SEQ ID NO. 591, comprising a polypeptide being at least 70%, optionally at least about 80%, preferably at least about 85%, more preferably at least about 90% and most preferably at least about 95% homologous to amino in SEQ ID NO. 591.

[0227] According to preferred embodiments of the present invention, there is provided an isolated chimeric polypeptide encoding for SEQ ID NO. 591, comprising a first amino acid sequence being at least 90% homologous to amino acids 1-128 of Q96FY2 (SEQ ID NO:638), which also corresponds to amino acids 1-128 of SEQ ID NO. 591, a bridging amino acid L corresponding to amino acid 129 of SEQ ID NO. 591, a second amino acid sequence being at least 90% homologous to amino acids 241-281 of SEQ ID NO. 638, which also corresponds to amino acids 130-240 of SEQ ID NO. 591, a third amino acid sequence being at least 70%, optionally at least 80%, preferably at least 85%, more preferably at least 90% and most preferably at least 95% homologous to a polypeptide sequence corresponding to amino acids 241-281 of SEQ ID NO. 591, and a fourth amino acid sequence being at least 90% homologous to amino acids 241-356 of SEQ ID NO. 638, which also corresponds to amino acids 282-397 of SEQ ID NO. 591, wherein said first amino acid sequence, bridging amino acid, second amino acid sequence, third amino acid sequence and fourth amino acid sequence are contiguous and in a sequential order.

[0228] According to preferred embodiments of the present invention, there is provided an isolated polypeptide encoding for an edge portion of SEQ ID NO. 591, comprising an amino acid sequence being at least 70%, optionally at least about 80%, preferably at least about 85%, more preferably at least about 90% and most preferably at least about 95% homologous to the sequence encoding for amino corresponding to SEQ ID NO. 591.

[0229] According to preferred embodiments of the present invention, there is provided an isolated chimeric polypeptide encoding for SEQ ID NO. 591, comprising a first amino acid sequence being at least 90% homologous to amino acids 1-240 of Q9UJZ1 (SEQ ID NO:637), which also corresponds to amino acids 1-240 of SEQ ID NO. 591, a second amino acid sequence being at least 70%, optionally at least 80%, preferably at least 85%, more preferably at least 90% and most preferably at least 95% homologous to a polypeptide sequence corresponding to amino acids 241-281 of SEQ ID NO. 591, and a third amino acid sequence being at least 90% homologous to amino acids 241-356 of Q9UJZ1 (SEQ ID NO:637), which also corresponds to amino acids 282-397 of SEQ ID NO. 591, wherein said first amino acid sequence, second amino acid sequence and third amino acid sequence are contiguous and in a sequential order.

[0230] According to preferred embodiments of the present invention, there is provided an isolated polypeptide encoding for an edge portion of SEQ ID NO. 591, comprising an amino acid sequence being at least 70%, optionally at least about 80%, preferably at least about 85%, more preferably at least about 90% and most preferably at least about 95% homologous to the sequence encoding for amino corresponding to SEQ ID NO. 591.

[0231] According to preferred embodiments of the present invention, there is provided an isolated chimeric polypeptide encoding for SEQ ID NO. 592, comprising a first amino acid sequence being at least 70%, optionally at least 80%, preferably at least 85%, more preferably at least 90% and most preferably at least 95% homologous to a polypeptide sequence corresponding to amino acids 1-26 of SEQ ID NO. 592, a second amino acid sequence being at least 90% homologous to amino acids 13-187 of SEQ ID NO. 639, which also corresponds to amino acids 27-201 of SEQ ID NO. 592, a bridging amino acid A corresponding to amino acid 202 of SEQ ID NO. 592, a third amino acid sequence being at least 90% homologous to amino acids 189-254 of SEQ ID NO. 639, which also corresponds to amino acids 203-268 of SEQ ID NO. 592, and a fourth amino acid sequence being at least 90% homologous to amino acids 298-342 of SEQ ID NO. 639, which also corresponds to amino acids 269-313 of SEQ ID NO. 592, wherein said first amino acid sequence, second amino acid sequence, bridging amino acid, third amino acid sequence and fourth amino acid sequence are contiguous and in a sequential order.

[0232] According to preferred embodiments of the present invention, there is provided an isolated polypeptide encoding for a head of SEQ ID NO. 592, comprising a polypeptide being at least 70%, optionally at least about 80%, preferably at least about 85%, more preferably at least about 90% and most preferably at least about 95% homologous to amino acids 1-26 of SEQ ID NO. 592.

[0233] According to preferred embodiments of the present invention, there is provided an isolated chimeric polypeptide encoding for an edge portion of SEQ ID NO. 592, comprising a polypeptide having a length “n”, wherein n is at least about 10 amino acids in length, optionally at least about 20 amino acids in length, preferably at least about 30 amino acids in length, more preferably at least about 40 amino acids in length and most preferably at least about 50 amino acids in length, wherein at least two amino acids comprise HA, having a structure as follows: a sequence starting from any of amino acid numbers 268−x to 268; and ending at any of amino acid numbers 269+((n−2)−x), in which x varies from 0 to n−2.

[0234] According to preferred embodiments of the present invention, there is provided an isolated chimeric polypeptide encoding for SEQ ID NO. 592, comprising a first amino acid sequence being at least 70%, optionally at least 80%, preferably at least 85%, more preferably at least 90% and most preferably at least 95% homologous to a polypeptide sequence amino acids 1-109 of SEQ ID NO. 592, a second amino acid sequence being at least 90% homologous to amino acids 1-159 of SEQ ID NO. 640, which also corresponds to amino acids 110-268 of SEQ ID NO. 592, and a third amino acid sequence being at least 70%, optionally at least 80%, preferably at least 85%, more preferably at least 90% and most preferably at least 95% homologous to a polypeptide sequence corresponding to amino acids 269-313 of SEQ ID NO. 592, wherein said first amino acid sequence, second amino acid sequence and third amino acid sequence are contiguous and in a sequential order.

[0235] According to preferred embodiments of the present invention, there is provided an isolated polypeptide encoding for a head of SEQ ID NO. 592, comprising a polypeptide being at least 70%, optionally at least about 80%, preferably at least about 85%, more preferably at least about 90% and most preferably at least about 95% homologous to amino acids 1-109 of SEQ ID NO. 592.

[0236] According to preferred embodiments of the present invention, there is provided an isolated polypeptide encoding for a tail of SEQ ID NO. 592, comprising a polypeptide being at least 70%, optionally at least about 80%, preferably at least about 85%, more preferably at least about 90% and most preferably at least about 95% homologous to amino in SEQ ID NO. 592.

[0237] According to preferred embodiments of the present invention, there is provided an isolated chimeric polypeptide encoding for SEQ ID NO. 592, comprising a first amino acid sequence being at least 90% homologous to amino acids 1-128 of SEQ ID NO. 638, which also corresponds to amino acids 1-128 of SEQ ID NO. 592, a bridging amino acid L corresponding to amino acid 129 of SEQ ID NO. 592, a second amino acid sequence being at least 90% homologous to amino acids 130-268 of SEQ ID NO. 638, which also corresponds to amino acids 130-268 of SEQ ID NO. 592, and a third amino acid sequence being at least 90% homologous to amino acids 312-356 of SEQ ID NO. 638, which also corresponds to amino acids 269-313 of SEQ ID NO. 592, wherein said first amino acid sequence, bridging amino acid, second amino acid sequence and third amino acid sequence are contiguous and in a sequential order.

[0238] According to preferred embodiments of the present invention, there is provided an isolated chimeric polypeptide encoding for an edge portion of SEQ ID NO. 592, comprising a polypeptide having a length “n”, wherein n is at least about 10 amino acids in length, optionally at least about 20 amino acids in length, preferably at least about 30 amino acids in length, more preferably at least about 40 amino acids in length and most preferably at least about 50 amino acids in length, wherein at least two amino acids comprise HA, having a structure as follows: a sequence starting from any of amino acid numbers 268−x to 268; and ending at any of amino acid numbers 269+((n−2)−x), in which x varies from 0 to n−2.

[0239] According to preferred embodiments of the present invention, there is provided an isolated chimeric polypeptide encoding for SEQ ID NO. 592, comprising a first amino acid sequence being at least 90% homologous to amino acids 1-268 of Q9UJZ1 (SEQ ID NO:637), which also corresponds to amino acids 1-268 of SEQ ID NO. 592, and a second amino acid sequence being at least 90% homologous to amino acids 312-356 of Q9UJZ1 (SEQ ID NO:637), which also corresponds to amino acids 269-313 of SEQ ID NO. 592, wherein said first amino acid sequence and second amino acid sequence are contiguous and in a sequential order.

[0240] According to preferred embodiments of the present invention, there is provided an isolated chimeric polypeptide encoding for an edge portion of SEQ ID NO. 592, comprising a polypeptide having a length “n”, wherein n is at least about 10 amino acids in length, optionally at least about 20 amino acids in length, preferably at least about 30 amino acids in length, more preferably at least about 40 amino acids in length and most preferably at least about 50 amino acids in length, wherein at least two amino acids comprise HA, having a structure as follows: a sequence starting from any of amino acid numbers 268−x to 268; and ending at any of amino acid numbers 269+((n−2)−x), in which x varies from 0 to n−2.

[0241] According to preferred embodiments of the present invention, there is provided an isolated chimeric polypeptide encoding for SEQ ID NO. 592, comprising a first amino acid sequence being at least 70%, optionally at least 80%, preferably at least 85%, more preferably at least 90% and most preferably at least 95% homologous to a polypeptide sequence amino acids 1-109 of SEQ ID NO. 592, a second amino acid sequence being at least 90% homologous to amino acids 1-159 of SEQ ID NO. 640, which also corresponds to amino acids 110-268 of SEQ ID NO. 592, and a third amino acid sequence being at least 70%, optionally at least 80%, preferably at least 85%, more preferably at least 90% and most preferably at least 95% homologous to a polypeptide sequence corresponding to amino acids 269-313 of SEQ ID NO. 592, wherein said first amino acid sequence, second amino acid sequence and third amino acid sequence are contiguous and in a sequential order.

[0242] According to preferred embodiments of the present invention, there is provided an isolated polypeptide encoding for a head of SEQ ID NO. 592, comprising a polypeptide being at least 70%, optionally at least about 80%, preferably at least about 85%, more preferably at least about 90% and most preferably at least about 95% homologous to amino acids 269-313 of SEQ ID NO. 592.

[0243] According to preferred embodiments of the present invention, there is provided an isolated polypeptide encoding for a tail of SEQ ID NO. 592, comprising a polypeptide being at least 70%, optionally at least about 80%, preferably at least about 85%, more preferably at least about 90% and most preferably at least about 95% homologous to amino in SEQ ID NO. 592.

[0244] According to preferred embodiments of the present invention, there is provided an isolated chimeric polypeptide encoding for SEQ ID NO. 592, comprising a first amino acid sequence being at least 90% homologous to amino acids 1-128 of SEQ ID NO. 638, which also corresponds to amino acids 1-128 of SEQ ID NO. 592, a bridging amino acid L corresponding to amino acid 129 of SEQ ID NO. 592, a second amino acid sequence being at least 90% homologous to amino acids 130-268 of SEQ ID NO. 638, which also corresponds to amino acids 130-268 of SEQ ID NO. 592, and a third amino acid sequence being at least 90% homologous to amino acids 312-356 of SEQ ID NO. 638, which also corresponds to amino acids 269-313 of SEQ ID NO. 592, wherein said first amino acid sequence, bridging amino acid, second amino acid sequence and third amino acid sequence are contiguous and in a sequential order.

[0245] According to preferred embodiments of the present invention, there is provided an isolated chimeric polypeptide encoding for an edge portion of SEQ ID NO. 592, comprising a polypeptide having a length “n”, wherein n is at least about 10 amino acids in length, optionally at least about 20 amino acids in length, preferably at least about 30 amino acids in length, more preferably at least about 40 amino acids in length and most preferably at least about 50 amino acids in length, wherein at least two amino acids comprise HA, having a structure as follows: a sequence starting from any of amino acid numbers 268−x to 268; and ending at any of amino acid numbers 269+((n−2)−x), in which x varies from 0 to n−2.

[0246] According to preferred embodiments of the present invention, there is provided an isolated chimeric polypeptide encoding for SEQ ID NO. 592, comprising a first amino acid sequence being at least 90% homologous to amino acids 1-268 of Q9UJZ1 (SEQ ID NO:637), which also corresponds to amino acids 1-268 of SEQ ID NO. 592, and a second amino acid sequence being at least 90% homologous to amino acids 312-356 of Q9UJZ1 (SEQ ID NO:637), which also corresponds to amino acids 269-313 of SEQ ID NO. 592, wherein said first amino acid sequence and second amino acid sequence are contiguous and in a sequential order.

[0247] According to preferred embodiments of the present invention, there is provided an isolated chimeric polypeptide encoding for an edge portion of SEQ ID NO. 592, comprising a polypeptide having a length “n”, wherein n is at least about 10 amino acids in length, optionally at least about 20 amino acids in length, preferably at least about 30 amino acids in length, more preferably at least about 40 amino acids in length and most preferably at least about 50 amino acids in length, wherein at least two amino acids comprise HA, having a structure as follows: a sequence starting from any of amino acid numbers 268−x to 268; and ending at any of amino acid numbers 269+((n−2)−x), in which x varies from 0 to n−2.

[0248] According to preferred embodiments of the present invention, there is provided an isolated chimeric polypeptide encoding for SEQ ID NO. 593, comprising a first amino acid sequence being at least 70%, optionally at least 80%, preferably at least 85%, more preferably at least 90% and most preferably at least 95% homologous to a polypeptide sequence corresponding to amino acids 1-26 of SEQ ID NO. 593, a second amino acid sequence being at least 90% homologous to amino acids 13-187 of SEQ ID NO. 639, which also corresponds to amino acids 27-201 of SEQ ID NO. 593, a bridging amino acid A corresponding to amino acid 202 of SEQ ID NO. 593, a third amino acid sequence being at least 90% homologous to amino acids 227-254 of SEQ ID NO. 639, which also corresponds to amino acids 282-309 of SEQ ID NO. 593, a fourth amino acid sequence being at least 70%, optionally at least 80%, preferably at least 85%, more preferably at least 90% and most preferably at least 95% homologous to a polypeptide sequence corresponding to amino acids 241-281 of SEQ ID NO. 593, a fifth amino acid sequence being at least 90% homologous to amino acids 227-254 of SEQ ID NO. 639, which also corresponds to amino acids 282-309 of SEQ ID NO. 593, and a sixth amino acid sequence being at least 70%, optionally at least 80%, preferably at least 85%, more preferably at least 90% and most preferably at least 95% homologous to a polypeptide sequence corresponding to amino acids 310-331 of SEQ ID NO. 593, wherein said first amino acid sequence, second amino acid sequence, bridging amino acid, third amino acid sequence, fourth amino acid sequence, fifth amino acid sequence and sixth amino acid sequence are contiguous and in a sequential order.

[0249] According to preferred embodiments of the present invention, there is provided an isolated polypeptide encoding for a head of SEQ ID NO. 593, comprising a polypeptide being at least 70%, optionally at least about 80%, preferably at least about 85%, more preferably at least about 90% and most preferably at least about 95% homologous to amino acids 1-26 of SEQ ID NO. 593.

[0250] According to preferred embodiments of the present invention, there is provided an isolated polypeptide encoding for an edge portion of SEQ ID NO. 593, comprising an amino acid sequence being at least 70%, optionally at least about 80%, preferably at least about 85%, more preferably at least about 90% and most preferably at least about 95% homologous to the sequence encoding for amino corresponding to SEQ ID NO. 593.

[0251] According to preferred embodiments of the present invention, there is provided an isolated polypeptide encoding for a tail of SEQ ID NO. 593, comprising a polypeptide being at least 70%, optionally at least about 80%, preferably at least about 85%, more preferably at least about 90% and most preferably at least about 95% homologous to amino in SEQ ID NO. 593.

[0252] According to preferred embodiments of the present invention, there is provided an isolated chimeric polypeptide encoding for SEQ ID NO. 593, comprising a first amino acid sequence being at least 70%, optionally at least 80%, preferably at least 85%, more preferably at least 90% and most preferably at least 95% homologous to a polypeptide sequence corresponding to amino acids 1-109 of SEQ ID NO. 593, a second amino acid sequence being at least 90% homologous to amino acids 1-131 of SEQ ID NO. 640, which also corresponds to amino acids 110-240 of SEQ ID NO. 593, a third amino acid sequence being at least 70%, optionally at least 80%, preferably at least 85%, more preferably at least 90% and most preferably at least 95% homologous to a polypeptide sequence corresponding to amino acids 241-281 of SEQ ID NO. 593, and a fourth amino acid sequence being at least 90% homologous to amino acids 132-181 of SEQ ID NO. 640, which also corresponds to amino acids 282-331 of SEQ ID NO. 593, wherein said first amino acid sequence, second amino acid sequence, third amino acid sequence and fourth amino acid sequence are contiguous and in a sequential order.

[0253] According to preferred embodiments of the present invention, there is provided an isolated polypeptide encoding for a head of SEQ ID NO. 593, comprising a polypeptide being at least 70%, optionally at least about 80%, preferably at least about 85%, more preferably at least about 90% and most preferably at least about 95% homologous to amino acids 1-109 of SEQ ID NO. 593.

[0254] According to preferred embodiments of the present invention, there is provided an isolated polypeptide encoding for an edge portion of SEQ ID NO. 593, comprising an amino acid sequence being at least 70%, optionally at least about 80%, preferably at least about 85%, more preferably at least about 90% and most preferably at least about 95% homologous to the sequence encoding for amino corresponding to SEQ ID NO. 593.

[0255] According to preferred embodiments of the present invention, there is provided an isolated chimeric polypeptide encoding for SEQ ID NO. 593, comprising a first amino acid sequence being at least 90% homologous to amino acids 1-128 of SEQ ID NO. 638, which also corresponds to amino acids 1-128 of SEQ ID NO. 593, a bridging amino acid L corresponding to amino acid 129 of SEQ ID NO. 593, a second amino acid sequence being at least 90% homologous to amino acids 130-240 of SEQ ID NO. 638, which also corresponds to amino acids 130-240 of SEQ ID NO. 593, a third amino acid sequence being at least 70%, optionally at least 80%, preferably at least 85%, more preferably at least 90% and most preferably at least 95% homologous to a polypeptide sequence corresponding to amino acids 241-281 of SEQ ID NO. 593, a fourth amino acid sequence being at least 90% homologous to amino acids 241-268 of SEQ ID NO. 638, which also corresponds to amino acids 282-309 of SEQ ID NO. 593, and a fifth amino acid sequence being at least 70%, optionally at least 80%, preferably at least 85%, more preferably at least 90% and most preferably at least 95% homologous to a polypeptide sequence corresponding to amino acids 310-331 of SEQ ID NO. 593, wherein said first amino acid sequence, bridging amino acid, second amino acid sequence, third amino acid sequence, fourth amino acid sequence and fifth amino acid sequence are contiguous and in a sequential order.

[0256] According to preferred embodiments of the present invention, there is provided an isolated polypeptide encoding for an edge portion of SEQ ID NO. 593, comprising an amino acid sequence being at least 70%, optionally at least about 80%, preferably at least about 85%, more preferably at least about 90% and most preferably at least about 95% homologous to the sequence encoding for amino corresponding to SEQ ID NO. 593.

[0257] According to preferred embodiments of the present invention, there is provided an isolated polypeptide encoding for a tail of SEQ ID NO. 593, comprising a polypeptide being at least 70%, optionally at least about 80%, preferably at least about 85%, more preferably at least about 90% and most preferably at least about 95% homologous to amino in SEQ ID NO. 593.

[0258] According to preferred embodiments of the present invention, there is provided an isolated chimeric polypeptide encoding for SEQ ID NO. 593, comprising a first amino acid sequence being at least 90% homologous to amino acids 1-240 of Q9UJZ1 (SEQ ID NO:637), which also corresponds to amino acids 1-240 of SEQ ID NO. 593, a second amino acid sequence being at least 70%, optionally at least 80%, preferably at least 85%, more preferably at least 90% and most preferably at least 95% homologous to a polypeptide sequence corresponding to amino acids 310-331 of SEQ ID NO. 593, a third amino acid sequence being at least 90% homologous to amino acids 241-268 of Q9UJZ1 (SEQ ID NO:637), which also corresponds to amino acids 282-309 of SEQ ID NO. 593, and a fourth amino acid sequence being at least 70%, optionally at least 80%, preferably at least 85%, more preferably at least 90% and most preferably at least 95% homologous to a polypeptide sequence corresponding to amino acids 310-331 of SEQ ID NO. 593, wherein said first amino acid sequence, second amino acid sequence, third amino acid sequence and fourth amino acid sequence are contiguous and in a sequential order.

[0259] According to preferred embodiments of the present invention, there is provided an isolated polypeptide encoding for an edge portion of SEQ ID NO. 593, comprising an amino acid sequence being at least 70%, optionally at least about 80%, preferably at least about 85%, more preferably at least about 90% and most preferably at least about 95% homologous to the sequence encoding for amino corresponding to SEQ ID NO. 593.

[0260] According to preferred embodiments of the present invention, there is provided an isolated polypeptide encoding for a tail of SEQ ID NO. 593, comprising a polypeptide being at least 70%, optionally at least about 80%, preferably at least about 85%, more preferably at least about 90% and most preferably at least about 95% homologous to amino in SEQ ID NO. 593.

[0261] According to preferred embodiments of the present invention, there is provided an isolated chimeric polypeptide encoding for SEQ ID NO. 594, comprising a first amino acid sequence being at least 70%, optionally at least 80%, preferably at least 85%, more preferably at least 90% and most preferably at least 95% homologous to a polypeptide sequence corresponding to amino acids 1-26 of SEQ ID NO. 594, a second amino acid sequence being at least 90% homologous to amino acids 13-134 of SEQ ID NO. 639, which also corresponds to amino acids 27-148 of SEQ ID NO. 594, and a third amino acid sequence being at least 70%, optionally at least 80%, preferably at least 85%, more preferably at least 90% and most preferably at least 95% homologous to a polypeptide sequence corresponding to amino acids 149-183 of SEQ ID NO. 594, wherein said first amino acid sequence, second amino acid sequence and third amino acid sequence are contiguous and in a sequential order.

[0262] According to preferred embodiments of the present invention, there is provided an isolated polypeptide encoding for a head of SEQ ID NO. 594, comprising a polypeptide being at least 70%, optionally at least about 80%, preferably at least about 85%, more preferably at least about 90% and most preferably at least about 95% homologous to amino acids 1-26 of SEQ ID NO. 594.

[0263] According to preferred embodiments of the present invention, there is provided an isolated polypeptide encoding for a tail of SEQ ID NO. 594, comprising a polypeptide being at least 70%, optionally at least about 80%, preferably at least about 85%, more preferably at least about 90% and most preferably at least about 95% homologous to amino in SEQ ID NO. 594.

[0264] According to preferred embodiments of the present invention, there is provided an isolated chimeric polypeptide encoding for SEQ ID NO. 594, comprising a first amino acid sequence being at least 90% homologous to amino acids 1-128 of SEQ ID NO. 638, which also corresponds to amino acids 1-128 of SEQ ID NO. 594, a bridging amino acid L corresponding to amino acid 129 of SEQ ID NO. 594, a second amino acid sequence being at least 90% homologous to amino acids 130-148 of SEQ ID NO. 638, which also corresponds to amino acids 130-148 of SEQ ID NO. 594, and a third amino acid sequence being at least 70%, optionally at least 80%, preferably at least 85%, more preferably at least 90% and most preferably at least 95% homologous to a polypeptide sequence corresponding to amino acids 149-183 of SEQ ID NO. 594, wherein said first amino acid sequence, bridging amino acid, second amino acid sequence and third amino acid sequence are contiguous and in a sequential order.

[0265] According to preferred embodiments of the present invention, there is provided an isolated polypeptide encoding for a tail of SEQ ID NO. 594, comprising a polypeptide being at least 70%, optionally at least about 80%, preferably at least about 85%, more preferably at least about 90% and most preferably at least about 95% homologous to amino in SEQ ID NO. 594.

[0266] According to preferred embodiments of the present invention, there is provided an isolated chimeric polypeptide encoding for SEQ ID NO. 594, comprising a first amino acid sequence being at least 90% homologous to amino acids 1-148 of Q9UJZ1 (SEQ ID NO:637), which also corresponds to amino acids 1-148 of SEQ ID NO. 594, and a second amino acid sequence being at least 70%, optionally at least 80%, preferably at least 85%, more preferably at least 90% and most preferably at least 95% homologous to a polypeptide sequence corresponding to amino acids 149-183 of SEQ ID NO. 594, wherein said first amino acid sequence and second amino acid sequence are contiguous and in a sequential order.

[0267] According to preferred embodiments of the present invention, there is provided an isolated polypeptide encoding for a tail of SEQ ID NO. 594, comprising a polypeptide being at least 70%, optionally at least about 80%, preferably at least about 85%, more preferably at least about 90% and most preferably at least about 95% homologous to amino in SEQ ID NO. 594.

[0268] According to preferred embodiments of the present invention, there is provided an isolated chimeric polypeptide encoding for SEQ ID NO. 595, comprising a first amino acid sequence being at least 70%, optionally at least 80%, preferably at least 85%, more preferably at least 90% and most preferably at least 95% homologous to a polypeptide sequence corresponding to amino acids 1-26 of SEQ ID NO. 595, a second amino acid sequence being at least 90% homologous to amino acids 13-180 of SEQ ID NO. 639, which also corresponds to amino acids 27-194 of SEQ ID NO. 595, and a third amino acid sequence being at least 70%, optionally at least 80%, preferably at least 85%, more preferably at least 90% and most preferably at least 95% homologous to a polypeptide sequence corresponding to amino acids 195-220 of SEQ ID NO. 595, wherein said first amino acid sequence, second amino acid sequence and third amino acid sequence are contiguous and in a sequential order.

[0269] According to preferred embodiments of the present invention, there is provided an isolated polypeptide encoding for a head of SEQ ID NO. 595, comprising a polypeptide being at least 70%, optionally at least about 80%, preferably at least about 85%, more preferably at least about 90% and most preferably at least about 95% homologous to amino acids 1-26 of SEQ ID NO. 595.

[0270] According to preferred embodiments of the present invention, there is provided an isolated polypeptide encoding for a tail of SEQ ID NO. 595, comprising a polypeptide being at least 70%, optionally at least about 80%, preferably at least about 85%, more preferably at least about 90% and most preferably at least about 95% homologous to amino in SEQ ID NO. 595.

[0271] According to preferred embodiments of the present invention, there is provided an isolated chimeric polypeptide encoding for SEQ ID NO. 595, comprising a first amino acid sequence being at least 90% homologous to amino acids 1-128 of SEQ ID NO. 638, which also corresponds to amino acids 1-128 of SEQ ID NO. 595, a bridging amino acid L corresponding to amino acid 129 of SEQ ID NO. 595, a second amino acid sequence being at least 90% homologous to amino acids 130-194 of SEQ ID NO. 638, which also corresponds to amino acids 130-194 of SEQ ID NO. 595, and a third amino acid sequence being at least 70%, optionally at least 80%, preferably at least 85%, more preferably at least 90% and most preferably at least 95% homologous to a polypeptide sequence corresponding to amino acids 195-220 of SEQ ID NO. 595, wherein said first amino acid sequence, bridging amino acid, second amino acid sequence and third amino acid sequence are contiguous and in a sequential order.

[0272] According to preferred embodiments of the present invention, there is provided an isolated polypeptide encoding for a tail of SEQ ID NO. 595, comprising a polypeptide being at least 70%, optionally at least about 80%, preferably at least about 85%, more preferably at least about 90% and most preferably at least about 95% homologous to amino in SEQ ID NO. 595.

[0273] According to preferred embodiments of the present invention, there is provided an isolated chimeric polypeptide encoding for SEQ ID NO. 595, comprising a first amino acid sequence being at least 90% homologous to amino acids 1-194 of Q9UJZ1 (SEQ ID NO:637), which also corresponds to amino acids 1-194 of SEQ ID NO. 595, and a second amino acid sequence being at least 70%, optionally at least 80%, preferably at least 85%, more preferably at least 90% and most preferably at least 95% homologous to a polypeptide sequence corresponding to amino acids 195-220 of SEQ ID NO. 595, wherein said first amino acid sequence and second amino acid sequence are contiguous and in a sequential order.

[0274] According to preferred embodiments of the present invention, there is provided an isolated polypeptide encoding for a tail of SEQ ID NO. 595, comprising a polypeptide being at least 70%, optionally at least about 80%, preferably at least about 85%, more preferably at least about 90% and most preferably at least about 95% homologous to amino in SEQ ID NO. 595.

[0275] According to preferred embodiments of the present invention, there is provided an isolated chimeric polypeptide encoding for SEQ ID NO. 596, comprising a first amino acid sequence being at least 70%, optionally at least 80%, preferably at least 85%, more preferably at least 90% and most preferably at least 95% homologous to a polypeptide sequence corresponding to amino acids 1-26 of SEQ ID NO. 596, a second amino acid sequence being at least 90% homologous to amino acids 13-134 of SEQ ID NO. 639, which also corresponds to amino acids 27-148 of SEQ ID NO. 596, a third amino acid sequence being at least 90% homologous to amino acids 180-187 of SEQ ID NO. 639, which also corresponds to amino acids 149-156 of SEQ ID NO. 596, a bridging amino acid A corresponding to amino acid 157 of SEQ ID NO. 596, and a fourth amino acid sequence being at least 90% homologous to amino acids 189-342 of SEQ ID NO. 639, which also corresponds to amino acids 158-311 of SEQ ID NO. 596, wherein said first amino acid sequence, second amino acid sequence, third amino acid sequence, bridging amino acid and fourth amino acid sequence are contiguous and in a sequential order.

[0276] According to preferred embodiments of the present invention, there is provided an isolated polypeptide encoding for a head of SEQ ID NO. 596, comprising a polypeptide being at least 70%, optionally at least about 80%, preferably at least about 85%, more preferably at least about 90% and most preferably at least about 95% homologous to amino acids 1-26 of SEQ ID NO. 596.

[0277] According to preferred embodiments of the present invention, there is provided an isolated chimeric polypeptide encoding for an edge portion of SEQ ID NO. 596, comprising a polypeptide having a length “n”, wherein n is at least about 10 amino acids in length, optionally at least about 20 amino acids in length, preferably at least about 30 amino acids in length, more preferably at least about 40 amino acids in length and most preferably at least about 50 amino acids in length, wherein at least two amino acids comprise RV, having a structure as follows: a sequence starting from any of amino acid numbers 148−x to 148; and ending at any of amino acid numbers 149+((n−2)−x), in which x varies from 0 to n−2.

[0278] According to preferred embodiments of the present invention, there is provided an isolated chimeric polypeptide encoding for SEQ ID NO. 596, comprising a first amino acid sequence being at least 70%, optionally at least 80%, preferably at least 85%, more preferably at least 90% and most preferably at least 95% homologous to a polypeptide sequence corresponding to amino acids 149-223 of SEQ ID NO. 596, a second amino acid sequence being at least 90% homologous to amino acids 1-39 of SEQ ID NO. 640, which also corresponds to amino acids 110-148 of SEQ ID NO. 596, a third amino acid sequence being at least 90% homologous to amino acids 85-159 of SEQ ID NO. 640, which also corresponds to amino acids 149-223 of SEQ ID NO. 596, and a fourth amino acid sequence being at least 70%, optionally at least 80%, preferably at least 85%, more preferably at least 90% and most preferably at least 95% homologous to a polypeptide sequence corresponding to amino acids 224-311 of SEQ ID NO. 596, wherein said first amino acid sequence, second amino acid sequence, third amino acid sequence and fourth amino acid sequence are contiguous and in a sequential order.

[0279] According to preferred embodiments of the present invention, there is provided an isolated polypeptide encoding for a head of SEQ ID NO. 596, comprising a polypeptide being at least 70%, optionally at least about 80%, preferably at least about 85%, more preferably at least about 90% and most preferably at least about 95% homologous to amino acids 1-109 of SEQ ID NO. 596.

[0280] According to preferred embodiments of the present invention, there is provided an isolated chimeric polypeptide encoding for an edge portion of SEQ ID NO. 596, comprising a polypeptide having a length “n”, wherein n is at least about 10 amino acids in length, optionally at least about 20 amino acids in length, preferably at least about 30 amino acids in length, more preferably at least about 40 amino acids in length and most preferably at least about 50 amino acids in length, wherein at least two amino acids comprise RV, having a structure as follows: a sequence starting from any of amino acid numbers 148−x to 148; and ending at any of amino acid numbers 149+((n−2)−x), in which x varies from 0 to n−2.

[0281] According to preferred embodiments of the present invention, there is provided an isolated polypeptide encoding for a tail of SEQ ID NO. 596, comprising a polypeptide being at least 70%, optionally at least about 80%, preferably at least about 85%, more preferably at least about 90% and most preferably at least about 95% homologous to amino in SEQ ID NO. 596.

[0282] According to preferred embodiments of the present invention, there is provided an isolated chimeric polypeptide encoding for SEQ ID NO. 596, comprising a first amino acid sequence being at least 90% homologous to amino acids 1-128 of Q96FY2 (SEQ ID NO:638), which also corresponds to amino acids 1-128 of SEQ ID NO. 596, a bridging amino acid L corresponding to amino acid 129 of SEQ ID NO. 596, a second amino acid sequence being at least 90% homologous to amino acids 130-148 of SEQ ID NO. 638, which also corresponds to amino acids 130-148 of SEQ ID NO. 596, and a third amino acid sequence being at least 90% homologous to corresponding to amino acids 194-356 of SEQ ID NO. 638, which also corresponds to amino acids 149-311 of SEQ ID NO. 596, wherein said first amino acid sequence, bridging amino acid, second amino acid sequence and third amino acid sequence are contiguous and in a sequential order.

[0283] According to preferred embodiments of the present invention, there is provided an isolated chimeric polypeptide encoding for an edge portion of SEQ ID NO. 596, comprising a polypeptide having a length “n”, wherein n is at least about 10 amino acids in length, optionally at least about 20 amino acids in length, preferably at least about 30 amino acids in length, more preferably at least about 40 amino acids in length and most preferably at least about 50 amino acids in length, wherein at least two amino acids comprise RV, having a structure as follows: a sequence starting from any of amino acid numbers 148−x to 148; and ending at any of amino acid numbers 149+((n−2)−x), in which x varies from 0 to n−2.

[0284] According to preferred embodiments of the present invention, there is provided an isolated chimeric polypeptide encoding for SEQ ID NO. 596, comprising a first amino acid sequence being at least 90% homologous to amino acids 1-148 of Q9UJZ1 (SEQ ID NO:637), which also corresponds to amino acids 1-148 of SEQ ID NO. 596, and a second amino acid sequence being at least 90% homologous to amino acids 194-356 of Q9UJZ1 (SEQ ID NO:637), which also corresponds to amino acids 149-311 of SEQ ID NO. 596, wherein said first amino acid sequence and second amino acid sequence are contiguous and in a sequential order.

[0285] According to preferred embodiments of the present invention, there is provided an isolated chimeric polypeptide encoding for an edge portion of SEQ ID NO. 596, comprising a polypeptide having a length “n”, wherein n is at least about 10 amino acids in length, optionally at least about 20 amino acids in length, preferably at least about 30 amino acids in length, more preferably at least about 40 amino acids in length and most preferably at least about 50 amino acids in length, wherein at least two amino acids comprise RV, having a structure as follows: a sequence starting from any of amino acid numbers 148−x to 148; and ending at any of amino acid numbers 149+((n−2)−x), in which x varies from 0 to n−2.

[0286] According to preferred embodiments of the present invention, there is provided an isolated chimeric polypeptide encoding for SEQ ID NO. 597, comprising a first amino acid sequence being at least 70%, optionally at least 80%, preferably at least 85%, more preferably at least 90% and most preferably at least 95% homologous to a polypeptide sequence corresponding to amino acids 1-26 of SEQ ID NO. 597, a second amino acid sequence being at least 90% homologous to amino acids 13-143 of SEQ ID NO. 639, which also corresponds to amino acids 27-157 of SEQ ID NO. 597, and a third amino acid sequence being at least 90% homologous to amino acids 295-342 of SEQ ID NO. 639, which also corresponds to amino acids 158-205 of SEQ ID NO. 597, wherein said first amino acid sequence, second amino acid sequence and third amino acid sequence are contiguous and in a sequential order.

[0287] According to preferred embodiments of the present invention, there is provided an isolated polypeptide encoding for a head of SEQ ID NO. 597, comprising a polypeptide being at least 70%, optionally at least about 80%, preferably at least about 85%, more preferably at least about 90% and most preferably at least about 95% homologous to amino acids 1-26 of SEQ ID NO. 597.

[0288] According to preferred embodiments of the present invention, there is provided an isolated chimeric polypeptide encoding for an edge portion of SEQ ID NO. 597, comprising a polypeptide having a length “n”, wherein n is at least about 10 amino acids in length, optionally at least about 20 amino acids in length, preferably at least about 30 amino acids in length, more preferably at least about 40 amino acids in length and most preferably at least about 50 amino acids in length, wherein at least two amino acids comprise IV, having a structure as follows: a sequence starting from any of amino acid numbers 157−x to 157; and ending at any of amino acid numbers 158+((n−2)−x), in which x varies from 0 to n−2.

[0289] According to preferred embodiments of the present invention, there is provided an isolated chimeric polypeptide encoding for SEQ ID NO. 597, comprising a first amino acid sequence being at least 90% homologous to amino acids 1-128 of Q96FY2 (SEQ ID NO:638), which also corresponds to amino acids 1-128 of SEQ ID NO. 597, a bridging amino acid L corresponding to amino acid 129 of SEQ ID NO. 597, a second amino acid sequence being at least 90% homologous to amino acids 130-157 of SEQ ID NO. 639, which also corresponds to amino acids 130-157 of SEQ ID NO. 597, and a third amino acid sequence being at least 90% homologous to amino acids 309-356 of ID NO. 639, which also corresponds to amino acids 158-205 of SEQ ID NO. 597, wherein said first amino acid sequence, bridging amino acid, second amino acid sequence and third amino acid sequence are contiguous and in a sequential order.

[0290] According to preferred embodiments of the present invention, there is provided an isolated chimeric polypeptide encoding for an edge portion of SEQ ID NO. 597, comprising a polypeptide having a length “n”, wherein n is at least about 10 amino acids in length, optionally at least about 20 amino acids in length, preferably at least about 30 amino acids in length, more preferably at least about 40 amino acids in length and most preferably at least about 50 amino acids in length, wherein at least two amino acids comprise IV, having a structure as follows: a sequence starting from any of amino acid numbers 157−x to 157; and ending at any of amino acid numbers 158+((n−2)−x), in which x varies from 0 to n−2.

[0291] According to preferred embodiments of the present invention, there is provided an isolated chimeric polypeptide encoding for SEQ ID NO. 597, comprising a first amino acid sequence being at least 90% homologous to amino acids 1-157 of Q9UJZ1 (SEQ ID NO:637), which also corresponds to amino acids 1-157 of SEQ ID NO. 597, and a second amino acid sequence being at least 90% homologous to amino acids 309-356 of Q9UJZ1 (SEQ ID NO:637), which also corresponds to amino acids 158-205 of SEQ ID NO. 597, wherein said first amino acid sequence and second amino acid sequence are contiguous and in a sequential order.

[0292] According to preferred embodiments of the present invention, there is provided an isolated chimeric polypeptide encoding for an edge portion of SEQ ID NO. 597, comprising a polypeptide having a length “n”, wherein n is at least about 10 amino acids in length, optionally at least about 20 amino acids in length, preferably at least about 30 amino acids in length, more preferably at least about 40 amino acids in length and most preferably at least about 50 amino acids in length, wherein at least two amino acids comprise IV, having a structure as follows: a sequence starting from any of amino acid numbers 157−x to 157; and ending at any of amino acid numbers 158+((n−2)−x), in which x varies from 0 to n−2.

[0293] According to preferred embodiments of the present invention, there is provided an isolated chimeric polypeptide encoding for SEQ ID NO. 598, comprising a first amino acid sequence being at least 70%, optionally at least 80%, preferably at least 85%, more preferably at least 90% and most preferably at least 95% homologous to a polypeptide sequence corresponding to amino acids 1-26 of SEQ ID NO. 598, a second amino acid sequence being at least 90% homologous to amino acids 13-128 of SEQ ID NO. 639, which also corresponds to amino acids 27-142 of SEQ ID NO. 598, and a third amino acid sequence being at least 70%, optionally at least 80%, preferably at least 85%, more preferably at least 90% and most preferably at least 95% homologous to a polypeptide sequence corresponding to amino acids 143-161 of SEQ ID NO. 598, wherein said first amino acid sequence, second amino acid sequence and third amino acid sequence are contiguous and in a sequential order.

[0294] According to preferred embodiments of the present invention, there is provided an isolated polypeptide encoding for a head of SEQ ID NO. 598, comprising a polypeptide being at least 70%, optionally at least about 80%, preferably at least about 85%, more preferably at least about 90% and most preferably at least about 95% homologous to amino acids 1-26 of SEQ ID NO. 598.

[0295] According to preferred embodiments of the present invention, there is provided an isolated polypeptide encoding for a tail of SEQ ID NO. 598, comprising a polypeptide being at least 70%, optionally at least about 80%, preferably at least about 85%, more preferably at least about 90% and most preferably at least about 95% homologous to amino in SEQ ID NO. 598.

[0296] According to preferred embodiments of the present invention, there is provided an isolated chimeric polypeptide encoding for SEQ ID NO. 598, comprising a first amino acid sequence being at least 90% homologous to amino acids 1-128 of SEQ ID NO. 638, which also corresponds to amino acids 1-128 of SEQ ID NO. 598, a bridging amino acid L corresponding to amino acid 129 of SEQ ID NO. 598, a second amino acid sequence being at least 90% homologous to amino acids 130-142 of SEQ ID NO. 638, which also corresponds to amino acids 130-142 of SEQ ID NO. 598, and a third amino acid sequence being at least 70%, optionally at least 80%, preferably at least 85%, more preferably at least 90% and most preferably at least 95% homologous to a polypeptide sequence corresponding to amino acids 143-161 of SEQ ID NO. 598, wherein said first amino acid sequence, bridging amino acid, second amino acid sequence and third amino acid sequence are contiguous and in a sequential order.

[0297] According to preferred embodiments of the present invention, there is provided an isolated polypeptide encoding for a tail of SEQ ID NO. 598, comprising a polypeptide being at least 70%, optionally at least about 80%, preferably at least about 85%, more preferably at least about 90% and most preferably at least about 95% homologous to amino in SEQ ID NO. 598.

[0298] According to preferred embodiments of the present invention, there is provided an isolated chimeric polypeptide encoding for SEQ ID NO. 598, comprising a first amino acid sequence being at least 90% homologous to amino acids 1-142 of Q9UJZ1 (SEQ ID NO:637), which also corresponds to amino acids 1-142 of SEQ ID NO. 598, and a second amino acid sequence being at least 70%, optionally at least 80%, preferably at least 85%, more preferably at least 90% and most preferably at least 95% homologous to a polypeptide sequence corresponding to amino acids 143-161 of SEQ ID NO. 598, wherein said first amino acid sequence and second amino acid sequence are contiguous and in a sequential order.

[0299] According to preferred embodiments of the present invention, there is provided an isolated polypeptide encoding for a tail of SEQ ID NO. 598, comprising a polypeptide being at least 70%, optionally at least about 80%, preferably at least about 85%, more preferably at least about 90% and most preferably at least about 95% homologous to amino in SEQ ID NO. 598.

[0300] According to preferred embodiments of the present invention, there is provided an isolated chimeric polypeptide encoding for SEQ ID NO. 600, comprising a first amino acid sequence being at least 90% homologous to amino acids 1-61 of SEQ ID NO. 638, which also corresponds to amino acids 1-61 of SEQ ID NO. 600, and a second amino acid sequence being at least 70%, optionally at least 80%, preferably at least 85%, more preferably at least 90% and most preferably at least 95% homologous to a polypeptide sequence corresponding to amino acids 62-102 of SEQ ID NO. 600, wherein said first amino acid sequence and second amino acid sequence are contiguous and in a sequential order.

[0301] According to preferred embodiments of the present invention, there is provided an isolated polypeptide encoding for a tail of SEQ ID NO. 600, comprising a polypeptide being at least 70%, optionally at least about 80%, preferably at least about 85%, more preferably at least about 90% and most preferably at least about 95% homologous to the sequence amino in SEQ ID NO. 600.

[0302] According to preferred embodiments of the present invention, there is provided an isolated chimeric polypeptide encoding for SEQ ID NO. 600, comprising a first amino acid sequence being at least 90% homologous to amino acids 1-61 of Q9UJZ1 (SEQ ID NO:637), which also corresponds to amino acids 1-61 of SEQ ID NO. 600, and a second amino acid sequence being at least 70%, optionally at least 80%, preferably at least 85%, more preferably at least 90% and most preferably at least 95% homologous to a polypeptide sequence corresponding to amino acids 62-102 of SEQ ID NO. 600, wherein said first amino acid sequence and second amino acid sequence are contiguous and in a sequential order.

[0303] According to preferred embodiments of the present invention, there is provided an isolated polypeptide encoding for a tail of SEQ ID NO. 600, comprising a polypeptide being at least 70%, optionally at least about 80%, preferably at least about 85%, more preferably at least about 90% and most preferably at least about 95% homologous to amino in SEQ ID NO. 600.

[0304] According to preferred embodiments of the present invention, there is provided an isolated chimeric polypeptide encoding for SEQ ID NO. 601, comprising a first amino acid sequence being at least 70%, optionally at least 80%, preferably at least 85%, more preferably at least 90% and most preferably at least 95% homologous to a polypeptide sequence corresponding to amino acids 1-26 of SEQ ID NO. 601, a second amino acid sequence being at least 90% homologous to amino acids 13-47 of SEQ ID NO. 639, which also corresponds to amino acids 27-61 of SEQ ID NO. 601, and a third amino acid sequence being at least 70%, optionally at least 80%, preferably at least 85%, more preferably at least 90% and most preferably at least 95% homologous to a polypeptide sequence corresponding to amino acids 62-72 of SEQ ID NO. 601, wherein said first amino acid sequence, second amino acid sequence and third amino acid sequence are contiguous and in a sequential order.

[0305] According to preferred embodiments of the present invention, there is provided an isolated polypeptide encoding for a head of SEQ ID NO. 601, comprising a polypeptide being at least 70%, optionally at least about 80%, preferably at least about 85%, more preferably at least about 90% and most preferably at least about 95% homologous to amino acids 1-26 of SEQ ID NO. 601.

[0306] According to preferred embodiments of the present invention, there is provided an isolated polypeptide encoding for a tail of SEQ ID NO. 601, comprising a polypeptide being at least 70%, optionally at least about 80%, preferably at least about 85%, more preferably at least about 90% and most preferably at least about 95% homologous to amino acids 62-72 in SEQ ID NO. 601.

[0307] According to preferred embodiments of the present invention, there is provided an isolated chimeric polypeptide encoding for SEQ ID NO. 601, comprising a first amino acid sequence being at least 90% homologous to amino acids 1-61 of Q96FY2 (SEQ ID NO:638), which also corresponds to amino acids 1-61 of SEQ ID NO. 601, and a second amino acid sequence being at least 70%, optionally at least 80%, preferably at least 85%, more preferably at least 90% and most preferably at least 95% homologous to a polypeptide sequence corresponding to amino acids 62-72 of SEQ ID NO. 601, wherein said first amino acid sequence and second amino acid sequence are contiguous and in a sequential order.

[0308] According to preferred embodiments of the present invention, there is provided an isolated polypeptide encoding for a tail of SEQ ID NO. 601, comprising a polypeptide being at least 70%, optionally at least about 80%, preferably at least about 85%, more preferably at least about 90% and most preferably at least about 95% homologous to amino acids 62-72 in SEQ ID NO. 601.

[0309] According to preferred embodiments of the present invention, there is provided an isolated chimeric polypeptide encoding for SEQ ID NO. 601, comprising a first amino acid sequence being at least 90% homologous to amino acids 1-61 of Q9UJZ1 (SEQ ID NO:637), which also corresponds to amino acids 1-61 of SEQ ID NO. 601, and a second amino acid sequence being at least 70%, optionally at least 80%, preferably at least 85%, more preferably at least 90% and most preferably at least 95% homologous to a polypeptide sequence corresponding to amino acids 62-72 of SEQ ID NO. 601, wherein said first amino acid sequence and second amino acid sequence are contiguous and in a sequential order.

[0310] According to preferred embodiments of the present invention, there is provided an isolated polypeptide encoding for a tail of SEQ ID NO. 601, comprising a polypeptide being at least 70%, optionally at least about 80%, preferably at least about 85%, more preferably at least about 90% and most preferably at least about 95% homologous to amino acids 62-72 in SEQ ID NO. 601.

[0311] According to preferred embodiments of the present invention, there is provided an isolated chimeric polypeptide encoding for SEQ ID NO. 602, comprising a first amino acid sequence being at least 70%, optionally at least 80%, preferably at least 85%, more preferably at least 90% and most preferably at least 95% homologous to a polypeptide sequence corresponding to amino acids 1-26 of SEQ ID NO. 602, a second amino acid sequence being at least 90% homologous to amino acids 13-80 of SEQ ID NO. 639, which also corresponds to amino acids 27-94 of SEQ ID NO. 602, and a third amino acid sequence being at least 70%, optionally at least 80%, preferably at least 85%, more preferably at least 90% and most preferably at least 95% homologous to a polypeptide sequence corresponding to amino acids 95-111 of SEQ ID NO. 602, wherein said first amino acid sequence, second amino acid sequence and third amino acid sequence are contiguous and in a sequential order.

[0312] According to preferred embodiments of the present invention, there is provided an isolated polypeptide encoding for a head of SEQ ID NO. 602, comprising a polypeptide being at least 70%, optionally at least about 80%, preferably at least about 85%, more preferably at least about 90% and most preferably at least about 95% homologous to amino acids 1-26 of SEQ ID NO. 602.

[0313] According to preferred embodiments of the present invention, there is provided an isolated polypeptide encoding for a tail of SEQ ID NO. 602, comprising a polypeptide being at least 70%, optionally at least about 80%, preferably at least about 85%, more preferably at least about 90% and most preferably at least about 95% homologous to amino in SEQ ID NO. 602.

[0314] According to preferred embodiments of the present invention, there is provided an isolated chimeric polypeptide encoding for SEQ ID NO. 602, comprising a first amino acid sequence being at least 90% homologous to amino acids 1-94 of SEQ ID NO. 638, which also corresponds to amino acids 1-94 of SEQ ID NO. 602, and a second amino acid sequence being at least 70%, optionally at least 80%, preferably at least 85%, more preferably at least 90% and most preferably at least 95% homologous to a polypeptide sequence corresponding to amino acids 95-111 of SEQ ID NO. 602, wherein said first amino acid sequence and second amino acid sequence are contiguous and in a sequential order.

[0315] According to preferred embodiments of the present invention, there is provided an isolated polypeptide encoding for a tail of SEQ ID NO. 602, comprising a polypeptide being at least 70%, optionally at least about 80%, preferably at least about 85%, more preferably at least about 90% and most preferably at least about 95% homologous to amino in SEQ ID NO. 602.

[0316] According to preferred embodiments of the present invention, there is provided an isolated chimeric polypeptide encoding for SEQ ID NO. 602, comprising a first amino acid sequence being at least 90% homologous to amino acids 1-94 of Q9UJZ1 (SEQ ID NO:637), which also corresponds to amino acids 1-94 of SEQ ID NO. 602, and a second amino acid sequence being at least 70%, optionally at least 80%, preferably at least 85%, more preferably at least 90% and most preferably at least 95% homologous to a polypeptide sequence corresponding to amino acids 95-111 of SEQ ID NO. 602, wherein said first amino acid sequence and second amino acid sequence are contiguous and in a sequential order.

[0317] According to preferred embodiments of the present invention, there is provided an isolated polypeptide encoding for a tail of SEQ ID NO. 602, comprising a polypeptide being at least 70%, optionally at least about 80%, preferably at least about 85%, more preferably at least about 90% and most preferably at least about 95% homologous to amino in SEQ ID NO. 602.

[0318] According to preferred embodiments of the present invention, there is provided an isolated chimeric polypeptide encoding for SEQ ID NO. 581, comprising a first amino acid sequence being at least 90% homologous to amino acids 1-67 of PLTP_HUMAN (SEQ ID NO:636), which also corresponds to amino acids 1-67 of SEQ ID NO. 581, and a second amino acid sequence being at least 90% homologous to amino acids 163-493 of PLTP_HUMAN (SEQ ID NO:636), which also corresponds to amino acids 68-398 of SEQ ID NO. 581, wherein said first amino acid sequence and second amino acid sequence are contiguous and in a sequential order.

[0319] According to preferred embodiments of the present invention, there is provided an isolated chimeric polypeptide encoding for an edge portion of SEQ ID NO. 581, comprising a polypeptide having a length “n”, wherein n is at least about 10 amino acids in length, optionally at least about 20 amino acids in length, preferably at least about 30 amino acids in length, more preferably at least about 40 amino acids in length and most preferably at least about 50 amino acids in length, wherein at least two amino acids comprise EK, having a structure as follows: a sequence starting from any of amino acid numbers 67−x to 67; and ending at any of amino acid numbers 68+((n−2)−x), in which x varies from 0 to n−2.

[0320] According to preferred embodiments of the present invention, there is provided an isolated chimeric polypeptide encoding for SEQ ID NO. 582, comprising a first amino acid sequence being at least 90% homologous to amino acids 1-427 of PLTP_HUMAN (SEQ ID NO:636), which also corresponds to amino acids 1-427 of SEQ ID NO. 582, and a second amino acid sequence being at least 70%, optionally at least 80%, preferably at least 85%, more preferably at least 90% and most preferably at least 95% homologous to a polypeptide sequence corresponding to amino acids 428-432 of SEQ ID NO. 582, wherein said first amino acid sequence and second amino acid sequence are contiguous and in a sequential order.

[0321] According to preferred embodiments of the present invention, there is provided an isolated polypeptide encoding for a tail of SEQ ID NO. 582, comprising a polypeptide being at least 70%, optionally at least about 80%, preferably at least about 85%, more preferably at least about 90% and most preferably at least about 95% homologous to amino in SEQ ID NO. 582.

[0322] According to preferred embodiments of the present invention, there is provided an isolated chimeric polypeptide encoding for SEQ ID NO. 584, comprising a first amino acid sequence being at least 90% homologous to amino acids 1-67 of PLTP_HUMAN (SEQ ID NO:636), which also corresponds to amino acids 1-67 of SEQ ID NO. 584, and a second amino acid sequence being at least 70%, optionally at least 80%, preferably at least 85%, more preferably at least 90% and most preferably at least 95% homologous to a polypeptide sequence corresponding to amino acids 68-98 of SEQ ID NO. 584, wherein said first amino acid sequence and second amino acid sequence are contiguous and in a sequential order.

[0323] According to preferred embodiments of the present invention, there is provided an isolated polypeptide encoding for a tail of SEQ ID NO. 584, comprising a polypeptide being at least 70%, optionally at least about 80%, preferably at least about 85%, more preferably at least about 90% and most preferably at least about 95% homologous to amino acids 68-98 in SEQ ID NO. 584.

[0324] According to preferred embodiments of the present invention, there is provided an isolated chimeric polypeptide encoding for SEQ ID NO. 585, comprising a first amino acid sequence being at least 90% homologous to amino acids 1-183 of PLTP_HUMAN (SEQ ID NO:636), which also corresponds to amino acids 1-183 of SEQ ID NO. 585, and a second amino acid sequence being at least 70%, optionally at least 80%, preferably at least 85%, more preferably at least 90% and most preferably at least 95% homologous to a polypeptide sequence corresponding to amino acids 184-200 of SEQ ID NO. 585, wherein said first amino acid sequence and second amino acid sequence are contiguous and in a sequential order.

[0325] According to preferred embodiments of the present invention, there is provided an isolated polypeptide encoding for a tail of SEQ ID NO. 585, comprising a polypeptide being at least 70%, optionally at least about 80%, preferably at least about 85%, more preferably at least about 90% and most preferably at least about 95% homologous to amino in SEQ ID NO. 585.

[0326] According to preferred embodiments of the present invention, there is provided an isolated chimeric polypeptide encoding for SEQ ID NO. 586, comprising a first amino acid sequence being at least 90% homologous to amino acids 1-205 of PLTP_HUMAN (SEQ ID NO:636), which also corresponds to amino acids 1-205 of SEQ ID NO. 586, and a second amino acid sequence being at least 70%, optionally at least 80%, preferably at least 85%, more preferably at least 90% and most preferably at least 95% homologous to a polypeptide sequence corresponding to amino acids 206-217 of SEQ ID NO. 586, wherein said first amino acid sequence and second amino acid sequence are contiguous and in a sequential order.

[0327] According to preferred embodiments of the present invention, there is provided an isolated polypeptide encoding for a tail of SEQ ID NO. 586, comprising a polypeptide being at least 70%, optionally at least about 80%, preferably at least about 85%, more preferably at least about 90% and most preferably at least about 95% homologous to amino in SEQ ID NO. 586.

[0328] According to preferred embodiments of the present invention, there is provided an isolated chimeric polypeptide encoding for SEQ ID NO. 587, comprising a first amino acid sequence being at least 90% homologous to amino acids 1-109 of PLTP_HUMAN (SEQ ID NO:636), which also corresponds to amino acids 1-109 of SEQ ID NO. 587, a second amino acid sequence bridging amino acid sequence comprising of L, a third amino acid sequence being at least 90% homologous to amino acids 163-183 of PLTP_HUMAN (SEQ ID NO:636), which also corresponds to amino acids 111-131 of SEQ ID NO. 587, and a fourth amino acid sequence being at least 70%, optionally at least 80%, preferably at least 85%, more preferably at least 90% and most preferably at least 95% homologous to a polypeptide sequence corresponding to amino acids 132-148 of SEQ ID NO. 587, wherein said first amino acid sequence, second amino acid sequence, third amino acid sequence and fourth amino acid sequence are contiguous and in a sequential order.

[0329] According to preferred embodiments of the present invention, there is provided an isolated polypeptide encoding for an edge portion of SEQ ID NO. 587, comprising a polypeptide having a length “n”, wherein n is at least about 10 amino acids in length, optionally at least about 20 amino acids in length, preferably at least about 30 amino acids in length, more preferably at least about 40 amino acids in length and most preferably at least about 50 amino acids in length, wherein at least three amino acids comprise FLK having a structure as follows (numbering according to SEQ ID NO. 587): a sequence starting from any of amino acid numbers 109−x to 109; and ending at any of amino acid numbers 111+((n−2)−x), in which x varies from 0 to n−2.

[0330] According to preferred embodiments of the present invention, there is provided an isolated polypeptide encoding for a tail of SEQ ID NO. 587, comprising a polypeptide being at least 70%, optionally at least about 80%, preferably at least about 85%, more preferably at least about 90% and most preferably at least about 95% homologous to amino in SEQ ID NO. 587.

[0331] According to preferred embodiments of the present invention, there is provided an isolated chimeric polypeptide encoding for SEQ ID NO. 576, comprising a first amino acid sequence being at least 90% homologous to amino acids 1-1056 of SEQ ID NO. 634, which also corresponds to amino acids 1-1056 of SEQ ID NO. 576, and a second amino acid sequence being at least 70%, optionally at least 80%, preferably at least 85%, more preferably at least 90% and most preferably at least 95% homologous to a polypeptide sequence corresponding to amino acids 1057-1081 of SEQ ID NO. 576, wherein said first amino acid sequence and second amino acid sequence are contiguous and in a sequential order.

[0332] According to preferred embodiments of the present invention, there is provided an isolated polypeptide encoding for a tail of SEQ ID NO. 576, comprising a polypeptide being at least 70%, optionally at least about 80%, preferably at least about 85%, more preferably at least about 90% and most preferably at least about 95% homologous to amino acids 1057-1081 in SEQ ID NO. 576.

[0333] According to preferred embodiments of the present invention, there is provided an isolated chimeric polypeptide encoding for SEQ ID NO. 577, comprising a first amino acid sequence being at least 90% homologous to amino acids 1-714 of SEQ ID NO. 634, which also corresponds to amino acids 1-714 of SEQ ID NO. 577, and a second amino acid sequence being at least 70%, optionally at least 80%, preferably at least 85%, more preferably at least 90% and most preferably at least 95% homologous to a polypeptide sequence corresponding to amino acids 715-729 of SEQ ID NO. 577, wherein said first amino acid sequence and second amino acid sequence are contiguous and in a sequential order.

[0334] According to preferred embodiments of the present invention, there is provided an isolated polypeptide encoding for a tail of SEQ ID NO. 577, comprising a polypeptide being at least 70%, optionally at least about 80%, preferably at least about 85%, more preferably at least about 90% and most preferably at least about 95% homologous to amino in SEQ ID NO. 577.

[0335] According to preferred embodiments of the present invention, there is provided an isolated chimeric polypeptide encoding for SEQ ID NO. 578, comprising a first amino acid sequence being at least 90% homologous to amino acids 1-648 of SEQ ID NO. 634, which also corresponds to amino acids 1-648 of SEQ ID NO. 578, a second amino acid sequence being at least 90% homologous to amino acids 667-714 of SEQ ID NO. 634, which also corresponds to amino acids 649-696 of SEQ ID NO. 578, and a third amino acid sequence being at least 70%, optionally at least 80%, preferably at least 85%, more preferably at least 90% and most preferably at least 95% homologous to a polypeptide sequence corresponding to amino acids 697-738 of SEQ ID NO. 578, wherein said first amino acid sequence, second amino acid sequence and third amino acid sequence are contiguous and in a sequential order.

[0336] According to preferred embodiments of the present invention, there is provided an isolated chimeric polypeptide encoding for an edge portion of SEQ ID NO. 578, comprising a polypeptide having a length “n”, wherein n is at least about 10 amino acids in length, optionally at least about 20 amino acids in length, preferably at least about 30 amino acids in length, more preferably at least about 40 amino acids in length and most preferably at least about 50 amino acids in length, wherein at least two amino acids comprise AG, having a structure as follows: a sequence starting from any of amino acid numbers 648−x to 648; and ending at any of amino acid numbers 649+((n−2)−x), in which x varies from 0 to n−2.

[0337] According to preferred embodiments of the present invention, there is provided an isolated polypeptide encoding for a tail of SEQ ID NO. 578, comprising a polypeptide being at least 70%, optionally at least about 80%, preferably at least about 85%, more preferably at least about 90% and most preferably at least about 95% homologous to amino in SEQ ID NO. 578.

[0338] According to preferred embodiments of the present invention, there is provided an isolated chimeric polypeptide encoding for SEQ ID NO. 579, comprising a first amino acid sequence being at least 90% homologous to amino acids 1-260 of SEQ ID NO. 634, which also corresponds to amino acids 1-260 of SEQ ID NO. 579, and a second amino acid sequence being at least 70%, optionally at least 80%, preferably at least 85%, more preferably at least 90% and most preferably at least 95% homologous to a polypeptide sequence corresponding to amino acids 261-273 of SEQ ID NO. 579, wherein said first amino acid sequence and second amino acid sequence are contiguous and in a sequential order.

[0339] According to preferred embodiments of the present invention, there is provided an isolated polypeptide encoding for a tail of SEQ ID NO. 579, comprising a polypeptide being at least 70%, optionally at least about 80%, preferably at least about 85%, more preferably at least about 90% and most preferably at least about 95% homologous to amino in SEQ ID NO. 579.

[0340] According to preferred embodiments of the present invention, there is provided an isolated chimeric polypeptide encoding for SEQ ID NO. 575, comprising a first amino acid sequence being at least 90% homologous to amino acids 1-13 of GFR2_HUMAN (SEQ ID NO:632), which also corresponds to amino acids 1-13 of SEQ ID NO. 575, and a second amino acid sequence being at least 70%, optionally at least 80%, preferably at least 85%, more preferably at least 90% and most preferably at least 95% homologous to a polypeptide sequence corresponding to amino acids 14-30 of SEQ ID NO. 575, wherein said first amino acid sequence and second amino acid sequence are contiguous and in a sequential order.

[0341] According to preferred embodiments of the present invention, there is provided an isolated polypeptide encoding for a tail of SEQ ID NO. 575, comprising a polypeptide being at least 70%, optionally at least about 80%, preferably at least about 85%, more preferably at least about 90% and most preferably at least about 95% homologous to amino acids 14-30 in SEQ ID NO. 575.

[0342] According to preferred embodiments of the present invention, there is provided an isolated chimeric polypeptide encoding for SEQ ID NO. 567, comprising a first amino acid sequence being at least 90% homologous to amino acids 1-123 of SEQ ID NO. 631, which also corresponds to amino acids 1-123 of SEQ ID NO. 567, and a second amino acid sequence being at least 70%, optionally at least 80%, preferably at least 85%, more preferably at least 90% and most preferably at least 95% homologous to a polypeptide sequence corresponding to amino acids 124-156 of SEQ ID NO. 567, wherein said first amino acid sequence and second amino acid sequence are contiguous and in a sequential order.

[0343] According to preferred embodiments of the present invention, there is provided an isolated polypeptide encoding for a tail of SEQ ID NO. 567, comprising a polypeptide being at least 70%, optionally at least about 80%, preferably at least about 85%, more preferably at least about 90% and most preferably at least about 95% homologous to amino in SEQ ID NO. 567.

[0344] According to preferred embodiments of the present invention, there is provided an isolated chimeric polypeptide encoding for SEQ ID NO. 567, comprising a first amino acid sequence being at least 70%, optionally at least 80%, preferably at least 85%, more preferably at least 90% and most preferably at least 95% homologous to a polypeptide sequence corresponding to amino acids 1-73 of SEQ ID NO. 567, and a second amino acid sequence being at least 90% homologous to amino acids 1799-1881 of SEQ ID NO. 629, which also corresponds to amino acids 74-156 of SEQ ID NO. 567, wherein said first amino acid sequence and second amino acid sequence are contiguous and in a sequential order.

[0345] According to preferred embodiments of the present invention, there is provided an isolated polypeptide encoding for a head of SEQ ID NO. 567, comprising a polypeptide being at least 70%, optionally at least about 80%, preferably at least about 85%, more preferably at least about 90% and most preferably at least about 95% homologous to the sequence amino acids 1-73 of SEQ ID NO. 567.

[0346] According to preferred embodiments of the present invention, there is provided an isolated chimeric polypeptide encoding for SEQ ID NO. 567, comprising a first amino acid sequence being at least 90% homologous to amino acids 1-52 of SEQ ID NO. 630, which also corresponds to amino acids 1-52 of SEQ ID NO. 567, a bridging amino acid G corresponding to amino acid 53 of SEQ ID NO. 567, a second amino acid sequence being at least 90% homologous to amino acids 54-124 of SEQ ID NO. 630, which also corresponds to amino acids 54-124 of SEQ ID NO. 567, and a third amino acid sequence being at least 70%, optionally at least 80%, preferably at least 85%, more preferably at least 90% and most preferably at least 95% homologous to a polypeptide sequence corresponding to amino acids 125-156 of SEQ ID NO. 567, wherein said first amino acid sequence, bridging amino acid, second amino acid sequence and third amino acid sequence are contiguous and in a sequential order.

[0347] According to preferred embodiments of the present invention, there is provided an isolated polypeptide encoding for a tail of SEQ ID NO. 567, comprising a polypeptide being at least 70%, optionally at least about 80%, preferably at least about 85%, more preferably at least about 90% and most preferably at least about 95% homologous to amino in SEQ ID NO. 567.

[0348] According to preferred embodiments of the present invention, there is provided an isolated chimeric polypeptide encoding for SEQ ID NO. 568, comprising a first amino acid sequence being at least 90% homologous to amino acids 1-123 of SEQ ID NO. 631, which also corresponds to amino acids 1-123 of SEQ ID NO. 568, and a second amino acid sequence being at least 70%, optionally at least 80%, preferably at least 85%, more preferably at least 90% and most preferably at least 95% homologous to a polypeptide sequence corresponding to amino acids 124-169 of SEQ ID NO. 568, wherein said first amino acid sequence and second amino acid sequence are contiguous and in a sequential order.

[0349] According to preferred embodiments of the present invention, there is provided an isolated polypeptide encoding for a tail of SEQ ID NO. 568, comprising a polypeptide being at least 70%, optionally at least about 80%, preferably at least about 85%, more preferably at least about 90% and most preferably at least about 95% homologous to amino in SEQ ID NO. 568.

[0350] According to preferred embodiments of the present invention, there is provided an isolated chimeric polypeptide encoding for SEQ ID NO. 568, comprising a first amino acid sequence being at least 90% homologous to amino acids 1-52 of SEQ ID NO. 630, which also corresponds to amino acids 1-52 of SEQ ID NO. 568, a bridging amino acid G corresponding to amino acid 53 of SEQ ID NO. 568, a second amino acid sequence being at least 90% homologous to amino acids 54-122 of SEQ ID NO. 630, which also corresponds to amino acids 54-122 of SEQ ID NO. 568, a third amino acid sequence being at least 70%, optionally at least 80%, preferably at least 85%, more preferably at least 90% and most preferably at least 95% homologous to a polypeptide sequence corresponding to amino acids 123-136 of SEQ ID NO. 568, and a fourth amino acid sequence being at least 90% homologous to amino acids 123-155 of SEQ ID NO. 630, which also corresponds to amino acids 137-169 of SEQ ID NO. 568, wherein said first amino acid sequence, bridging amino acid, second amino acid sequence, third amino acid sequence and fourth amino acid sequence are contiguous and in a sequential order.

[0351] According to preferred embodiments of the present invention, there is provided an isolated polypeptide encoding for an edge portion of SEQ ID NO. 568, comprising an amino acid sequence being at least 70%, optionally at least about 80%, preferably at least about 85%, more preferably at least about 90% and most preferably at least about 95% homologous to the sequence encoding for amino acids 123-136, corresponding to SEQ ID NO. 568.

[0352] According to preferred embodiments of the present invention, there is provided an isolated chimeric polypeptide encoding for SEQ ID NO. 569, comprising a first amino acid sequence being at least 90% homologous to amino acids 1-123 of SEQ ID NO. 631, which also corresponds to amino acids 1-123 of SEQ ID NO. 569, and a second amino acid sequence being at least 70%, optionally at least 80%, preferably at least 85%, more preferably at least 90% and most preferably at least 95% homologous to a polypeptide sequence corresponding to amino acids 124-180 of SEQ ID NO. 569, wherein said first amino acid sequence and second amino acid sequence are contiguous and in a sequential order.

[0353] According to preferred embodiments of the present invention, there is provided an isolated polypeptide encoding for a tail of SEQ ID NO. 569, comprising a polypeptide being at least 70%, optionally at least about 80%, preferably at least about 85%, more preferably at least about 90% and most preferably at least about 95% homologous to the sequence amino in SEQ ID NO. 569.

[0354] According to preferred embodiments of the present invention, there is provided an isolated chimeric polypeptide encoding for SEQ ID NO. 569, comprising a first amino acid sequence being at least 90% homologous to amino acids 1-52 of SEQ ID NO. 630, which also corresponds to amino acids 1-52 of SEQ ID NO. 569, a bridging amino acid G corresponding to amino acid 53 of SEQ ID NO. 569, a second amino acid sequence being at least 90% homologous to amino acids 54-123 of SEQ ID NO. 630, which also corresponds to amino acids 54-123 of SEQ ID NO. 569, a third amino acid sequence being at least 70%, optionally at least 80%, preferably at least 85%, more preferably at least 90% and most preferably at least 95% homologous to a polypeptide sequence corresponding to amino acids 124-148 of SEQ ID NO. 569, and a fourth amino acid sequence being at least 90% homologous to amino acids 124-155 of SEQ ID NO. 630, which also corresponds to amino acids 149-180 of SEQ ID NO. 569, wherein said first amino acid sequence, bridging amino acid, second amino acid sequence, third amino acid sequence and fourth amino acid sequence are contiguous and in a sequential order.

[0355] According to preferred embodiments of the present invention, there is provided an isolated polypeptide encoding for an edge portion of SEQ ID NO. 569, comprising an amino acid sequence being at least 70%, optionally at least about 80%, preferably at least about 85%, more preferably at least about 90% and most preferably at least about 95% homologous to the sequence encoding for amino acids 124-148, corresponding to SEQ ID NO. 569.

[0356] According to preferred embodiments of the present invention, there is provided an isolated chimeric polypeptide encoding for SEQ ID NO. 570, comprising a first amino acid sequence being at least 90% homologous to amino acids 1-123 of SEQ ID NO. 631, which also corresponds to amino acids 1-123 of SEQ ID NO. 570, and a second amino acid sequence being at least 70%, optionally at least 80%, preferably at least 85%, more preferably at least 90% and most preferably at least 95% homologous to a polypeptide sequence corresponding to amino acids 124-145 of SEQ ID NO. 570, wherein said first amino acid sequence and second amino acid sequence are contiguous and in a sequential order.

[0357] According to preferred embodiments of the present invention, there is provided an isolated polypeptide encoding for a tail of SEQ ID NO. 570, comprising a polypeptide being at least 70%, optionally at least about 80%, preferably at least about 85%, more preferably at least about 90% and most preferably at least about 95% homologous to amino in SEQ ID NO. 570.

[0358] According to preferred embodiments of the present invention, there is provided an isolated chimeric polypeptide encoding for SEQ ID NO. 570, comprising a first amino acid sequence being at least 90% homologous to amino acids 1-52 of SEQ ID NO. 630, which also corresponds to amino acids 1-52 of SEQ ID NO. 570, a bridging amino acid G corresponding to amino acid 53 of SEQ ID NO. 570, a second amino acid sequence being at least 90% homologous to amino acids 54-124 of SEQ ID NO. 630, which also corresponds to amino acids 54-124 of SEQ ID NO. 570, and a third amino acid sequence being at least 70%, optionally at least 80%, preferably at least 85%, more preferably at least 90% and most preferably at least 95% homologous to a polypeptide sequence corresponding to amino acids 125-145 of SEQ ID NO. 570, wherein said first amino acid sequence, bridging amino acid, second amino acid sequence and third amino acid sequence are contiguous and in a sequential order.

[0359] According to preferred embodiments of the present invention, there is provided an isolated polypeptide encoding for a tail of SEQ ID NO. 570, comprising a polypeptide being at least 70%, optionally at least about 80%, preferably at least about 85%, more preferably at least about 90% and most preferably at least about 95% homologous to amino in SEQ ID NO. 570.

[0360] According to preferred embodiments of the present invention, there is provided an isolated chimeric polypeptide encoding for SEQ ID NO. 571, comprising a first amino acid sequence being at least 90% homologous to amino acids 1-101 of SEQ ID NO. 631, which also corresponds to amino acids 1-101 of SEQ ID NO. 571, and a second amino acid sequence being at least 70%, optionally at least 80%, preferably at least 85%, more preferably at least 90% and most preferably at least 95% homologous to a polypeptide sequence corresponding to amino acids 102-122 of SEQ ID NO. 571, wherein said first amino acid sequence and second amino acid sequence are contiguous and in a sequential order.

[0361] According to preferred embodiments of the present invention, there is provided an isolated polypeptide encoding for a tail of SEQ ID NO. 571, comprising a polypeptide being at least 70%, optionally at least about 80%, preferably at least about 85%, more preferably at least about 90% and most preferably at least about 95% homologous to amino in SEQ ID NO. 571.

[0362] According to preferred embodiments of the present invention, there is provided an isolated chimeric polypeptide encoding for SEQ ID NO. 571, comprising a first amino acid sequence being at least 90% homologous to amino acids 1-52 of SEQ ID NO. 630, which also corresponds to amino acids 1-52 of SEQ ID NO. 571, a bridging amino acid G corresponding to amino acid 53 of SEQ ID NO. 571, a second amino acid sequence being at least 90% homologous to amino acids 54-101 of SEQ ID NO. 630, which also corresponds to amino acids 54-101 of SEQ ID NO. 571, and a third amino acid sequence being at least 70%, optionally at least 80%, preferably at least 85%, more preferably at least 90% and most preferably at least 95% homologous to a polypeptide sequence corresponding to amino acids 102-122 of SEQ ID NO. 571, wherein said first amino acid sequence, bridging amino acid, second amino acid sequence and third amino acid sequence are contiguous and in a sequential order.

[0363] According to preferred embodiments of the present invention, there is provided an isolated polypeptide encoding for a tail of SEQ ID NO. 571, comprising a polypeptide being at least 70%, optionally at least about 80%, preferably at least about 85%, more preferably at least about 90% and most preferably at least about 95% homologous to amino in SEQ ID NO. 571.

[0364] According to preferred embodiments of the present invention, there is provided an isolated chimeric polypeptide encoding for SEQ ID NO. 572, comprising a first amino acid sequence being at least 90% homologous to amino acids 1-62 of SEQ ID NO. 631, which also corresponds to amino acids 1-62 of SEQ ID NO. 572, a bridging amino acid P corresponding to amino acid 63 of SEQ ID NO. 572, a second amino acid sequence being at least 90% homologous to amino acids 64-123 of SEQ ID NO. 631, which also corresponds to amino acids 64-123 of SEQ ID NO. 572, and a third amino acid sequence being at least 70%, optionally at least 80%, preferably at least 85%, more preferably at least 90% and most preferably at least 95% homologous to a polypeptide sequence corresponding to amino acids 124-155 of SEQ ID NO. 572, wherein said first amino acid sequence, bridging amino acid, second amino acid sequence and third amino acid sequence are contiguous and in a sequential order.

[0365] According to preferred embodiments of the present invention, there is provided an isolated polypeptide encoding for a tail of SEQ ID NO. 572, comprising a polypeptide being at least 70%, optionally at least about 80%, preferably at least about 85%, more preferably at least about 90% and most preferably at least about 95% homologous to amino in SEQ ID NO. 572.

[0366] According to preferred embodiments of the present invention, there is provided an isolated chimeric polypeptide encoding for SEQ ID NO. 572, comprising a first amino acid sequence being at least 90% homologous to amino acids 1-52 of SEQ ID NO. 630, which also corresponds to amino acids 1-52 of SEQ ID NO. 572, a bridging amino acid G corresponding to amino acid 53 of SEQ ID NO. 572, a second amino acid sequence being at least 90% homologous to LSDDEETIS corresponding to amino acids 54-62 of SEQ ID NO. 630, which also corresponds to amino acids 54-62 of SEQ ID NO. 572, a bridging amino acid P corresponding to amino acid 63 of SEQ ID NO. 572, and a third amino acid sequence being at least 90% homologous to amino acids 64-155 of SEQ ID NO. 630, which also corresponds to amino acids 64-155 of SEQ ID NO. 572, wherein said first amino acid sequence, bridging amino acid, second amino acid sequence, bridging amino acid and third amino acid sequence are contiguous and in a sequential order.

[0367] According to preferred embodiments of the present invention, there is provided an isolated chimeric polypeptide encoding for SEQ ID NO. 573 comprising a first amino acid sequence being at least 90% homologous to amino acids 1-62 of SEQ ID NO. 631 which also corresponds to amino acids 1-62 of SEQ ID NO. 573, a bridging amino acid P corresponding to amino acid 63 of SEQ ID NO. 573, a second amino acid sequence being at least 90% homologous to amino acids 64-101 of SEQ ID NO. 631, which also corresponds to amino acids 64-101 of SEQ ID NO. 573, and a third amino acid sequence being at least 70%, optionally at least 80%, preferably at least 85%, more preferably at least 90% and most preferably at least 95% homologous to a polypeptide sequence corresponding to amino acids 102-109 of SEQ ID NO. 573, wherein said first amino acid sequence, bridging amino acid, second amino acid sequence and third amino acid sequence are contiguous and in a sequential order.

[0368] According to preferred embodiments of the present invention, there is provided an isolated polypeptide encoding for a tail of SEQ ID NO. 573, comprising a polypeptide being at least 70%, optionally at least about 80%, preferably at least about 85%, more preferably at least about 90% and most preferably at least about 95% homologous to amino in SEQ ID NO. 573.

[0369] According to preferred embodiments of the present invention, there is provided an isolated chimeric polypeptide encoding for SEQ ID NO. 573, comprising a first amino acid sequence being at least 90% homologous to amino acids 1-52 of SEQ ID NO. 630 which also corresponds to amino acids 1-52 of SEQ ID NO. 573, a bridging amino acid G corresponding to amino acid 53 of SEQ ID NO. 573, a second amino acid sequence being at least 90% homologous to amino acids 54-62 of SEQ ID NO. 630, which also corresponds to amino acids 54-62 of SEQ ID NO. 573, a bridging amino acid P corresponding to amino acid 63 of SEQ ID NO. 573, a third amino acid sequence being at least 90% homologous to amino acids 64-101 of SEQ ID NO. 630, which also corresponds to amino acids 64-101 of SEQ ID NO. 573, and a fourth amino acid sequence being at least 70%, optionally at least 80%, preferably at least 85%, more preferably at least 90% and most preferably at least 95% homologous to a polypeptide sequence corresponding to amino acids 102-109 of SEQ ID NO. 573, wherein said first amino acid sequence, bridging amino acid, second amino acid sequence, bridging amino acid, third amino acid sequence and fourth amino acid sequence are contiguous and in a sequential order.

[0370] According to preferred embodiments of the present invention, there is provided an isolated polypeptide encoding for a tail of SEQ ID NO. 573, comprising a polypeptide being at least 70%, optionally at least about 80%, preferably at least about 85%, more preferably at least about 90% and most preferably at least about 95% homologous to amino in SEQ ID NO. 573.

[0371] According to preferred embodiments of the present invention, there is provided an isolated chimeric polypeptide encoding for SEQ ID NO. 574, comprising a first amino acid sequence being at least 90% homologous to amino acids 1-62 of SEQ ID NO. 631, which also corresponds to amino acids 1-62 of SEQ ID NO. 574, a bridging amino acid P corresponding to amino acid 63 of SEQ ID NO. 574, a second amino acid sequence being at least 90% homologous to amino acids 64-101 of SEQ ID NO. 631, which also corresponds to amino acids 64-101 of SEQ ID NO. 574, and a third amino acid sequence being at least 70%, optionally at least 80%, preferably at least 85%, more preferably at least 90% and most preferably at least 95% homologous to a polypeptide sequence corresponding to amino acids 102-133 of SEQ ID NO. 574, wherein said first amino acid sequence, bridging amino acid, second amino acid sequence and third amino acid sequence are contiguous and in a sequential order.

[0372] According to preferred embodiments of the present invention, there is provided an isolated polypeptide encoding for a tail of SEQ ID NO. 574, comprising a polypeptide being at least 70%, optionally at least about 80%, preferably at least about 85%, more preferably at least about 90% and most preferably at least about 95% homologous to amino in SEQ ID NO. 574.

[0373] According to preferred embodiments of the present invention, there is provided an isolated chimeric polypeptide encoding for SEQ ID NO. 574, comprising a first amino acid sequence being at least 90% homologous to amino acids 1-52 of SEQ ID NO. 630, which also corresponds to amino acids 1-52 of SEQ ID NO. 574, a bridging amino acid G corresponding to amino acid 53 of SEQ ID NO. 574, a second amino acid sequence being at least 90% homologous to amino acids 54-62 of SEQ ID NO. 630, which also corresponds to amino acids 54-62 of SEQ ID NO. 574, a bridging amino acid P corresponding to amino acid 63 of SEQ ID NO. 574, a third amino acid sequence being at least 90% homologous to amino acids 64-101 of SEQ ID NO. 630, which also corresponds to amino acids 64-101 of SEQ ID NO. 574, and a fourth amino acid sequence being at least 90% homologous to amino acids 124-155 of SEQ ID NO. 630, which also corresponds to amino acids 102-133 of SEQ ID NO. 574, wherein said first amino acid sequence, bridging amino acid, second amino acid sequence, bridging amino acid, third amino acid sequence and fourth amino acid sequence are contiguous and in a sequential order.

[0374] According to preferred embodiments of the present invention, there is provided an isolated chimeric polypeptide encoding for an edge portion of SEQ ID NO. 574, comprising a polypeptide having a length “n”, wherein n is at least about 10 amino acids in length, optionally at least about 20 amino acids in length, preferably at least about 30 amino acids in length, more preferably at least about 40 amino acids in length and most preferably at least about 50 amino acids in length, wherein at least two amino acids comprise KV, having a structure as follows: a sequence starting from any of amino acid numbers 101−x to 101; and ending at any of amino acid numbers 102+((n−2)−x), in which x varies from 0 to n−2.

[0375] According to preferred embodiments of the present invention, there is provided an isolated chimeric polypeptide encoding for SEQ ID NO. 564, comprising a first amino acid sequence being at least 90% homologous to amino acids 1-1617 of SEQ ID NO. 627, which also corresponds to amino acids 1-1617 of SEQ ID NO. 564, and a second amino acid sequence being at least 70%, optionally at least 80%, preferably at least 85%, more preferably at least 90% and most preferably at least 95% homologous to a polypeptide sequence corresponding to amino acids 1618-1645 of SEQ ID NO. 564, wherein said first amino acid sequence and second amino acid sequence are contiguous and in a sequential order.

[0376] According to preferred embodiments of the present invention, there is provided an isolated polypeptide encoding for a tail of SEQ ID NO. 564, comprising a polypeptide being at least 70%, optionally at least about 80%, preferably at least about 85%, more preferably at least about 90% and most preferably at least about 95% homologous to amino acids 1618-1645 in SEQ ID NO. 564.

[0377] According to preferred embodiments of the present invention, there is provided an isolated chimeric polypeptide encoding for SEQ ID NO. 565, comprising a first amino acid sequence being at least 90% homologous to amino acids 1-2062 of SEQ ID NO. 627, which also corresponds to amino acids 1-2062 of SEQ ID NO. 565, and a second amino acid sequence being at least 70%, optionally at least 80%, preferably at least 85%, more preferably at least 90% and most preferably at least 95% homologous to a polypeptide sequence corresponding to amino acids 2063-2074 of SEQ ID NO. 565, wherein said first amino acid sequence and second amino acid sequence are contiguous and in a sequential order.

[0378] According to preferred embodiments of the present invention, there is provided an isolated polypeptide encoding for a tail of SEQ ID NO. 565, comprising a polypeptide being at least 70%, optionally at least about 80%, preferably at least about 85%, more preferably at least about 90% and most preferably at least about 95% homologous to amino acids 2063-2074 in SEQ ID NO. 565.

[0379] According to preferred embodiments of the present invention, there is provided an isolated chimeric polypeptide encoding for SEQ ID NO. 566, comprising a first amino acid sequence being at least 90% homologous to amino acids 1-587 of SEQ ID NO. 627, which also corresponds to amino acids 1-587 of SEQ ID NO. 566, and a second amino acid sequence being at least 70%, optionally at least 80%, preferably at least 85%, more preferably at least 90% and most preferably at least 95% homologous to a polypeptide sequence corresponding to amino acids 588-603 of SEQ ID NO. 566, wherein said first amino acid sequence and second amino acid sequence are contiguous and in a sequential order.

[0380] According to preferred embodiments of the present invention, there is provided an isolated polypeptide encoding for a tail of SEQ ID NO. 566, comprising a polypeptide being at least 70%, optionally at least about 80%, preferably at least about 85%, more preferably at least about 90% and most preferably at least about 95% homologous to amino in SEQ ID NO. 566.

[0381] According to preferred embodiments of the present invention, there is provided an isolated chimeric polypeptide encoding for SEQ ID NO. 560, comprising a first amino acid sequence being at least 90% homologous to amino acids 1-131 of SEQ ID NO. 625, which also corresponds to amino acids 1-131 of SEQ ID NO. 560, and a second amino acid sequence being at least 70%, optionally at least 80%, preferably at least 85%, more preferably at least 90% and most preferably at least 95% homologous to a polypeptide sequence corresponding to amino acids 132-139 of SEQ ID NO. 560, wherein said first and second amino acid sequences are contiguous and in a sequential order.

[0382] According to preferred embodiments of the present invention, there is provided an isolated polypeptide encoding for a tail of SEQ ID NO. 560, comprising a polypeptide being at least 70%, optionally at least about 80%, preferably at least about 85%, more preferably at least about 90% and most preferably at least about 95% homologous to amino in SEQ ID NO. 560.

[0383] According to preferred embodiments of the present invention, there is provided an isolated chimeric polypeptide encoding for SEQ ID NO. 561, comprising a first amino acid sequence being at least 90% homologous to amino acids 1-131 of SEQ ID NO. 625, which also corresponds to amino acids 1-131 of SEQ ID NO. 561, and a second amino acid sequence being at least 70%, optionally at least 80%, preferably at least 85%, more preferably at least 90% and most preferably at least 95% homologous to a polypeptide sequence corresponding to amino acids 132-156 of SEQ ID NO. 561, wherein said first and second amino acid sequences are contiguous and in a sequential order.

[0384] According to preferred embodiments of the present invention, there is provided an isolated polypeptide encoding for a tail of SEQ ID NO. 561, comprising a polypeptide being at least 70%, optionally at least about 80%, preferably at least about 85%, more preferably at least about 90% and most preferably at least about 95% homologous to amino in SEQ ID NO. 561.

[0385] According to preferred embodiments of the present invention, there is provided an isolated chimeric polypeptide encoding for SEQ ID NO. 562, comprising a first amino acid sequence being at least 90% homologous to amino acids 1-81 of SEQ ID NO. 625, which also corresponds to amino acids 1-81 of SEQ ID NO. 562, and a second amino acid sequence being at least 70%, optionally at least 80%, preferably at least 85%, more preferably at least 90% and most preferably at least 95% homologous to a polypeptide sequence corresponding to amino acids 82-89 of SEQ ID NO. 562, wherein said first and second amino acid sequences are contiguous and in a sequential order.

[0386] According to preferred embodiments of the present invention, there is provided an isolated polypeptide encoding for a tail of SEQ ID NO. 562, comprising a polypeptide being at least 70%, optionally at least about 80%, preferably at least about 85%, more preferably at least about 90% and most preferably at least about 95% homologous to amino acids 82-89 in SEQ ID NO. 562.

[0387] According to preferred embodiments of the present invention, there is provided an isolated chimeric polypeptide encoding for SEQ ID NO. 563, comprising a first amino acid sequence being at least 90% homologous to amino acids 1-82 of SEQ ID NO. 625 which also corresponds to amino acids 1-82 of SEQ ID NO. 563.

[0388] According to preferred embodiments of the present invention, there is provided an isolated chimeric polypeptide encoding for SEQ ID NO. 552, comprising a first amino acid sequence being at least 70%, optionally at least 80%, preferably at least 85%, more preferably at least 90% and most preferably at least 95% homologous to a polypeptide sequence corresponding to amino acids 1-116 of FABH_HUMAN (SEQ ID NO:623), which also corresponds to amino acids 1-116 of SEQ ID NO. 552, and a second amino acid sequence being at least 70%, optionally at least 80%, preferably at least 85%, more preferably at least 90% and most preferably at least 95% homologous to a polypeptide sequence corresponding to amino acids 117-215 of SEQ ID NO. 552, wherein said first and second amino acid sequences are contiguous and in a sequential order.

[0389] According to preferred embodiments of the present invention, there is provided an isolated polypeptide encoding for a tail of SEQ ID NO. 552, comprising a polypeptide being at least 70%, optionally at least about 80%, preferably at least about 85%, more preferably at least about 90% and most preferably at least about 95% homologous to amino in SEQ ID NO. 552.

[0390] According to preferred embodiments of the present invention, there is provided an isolated chimeric polypeptide encoding for SEQ ID NO. 552, comprising a first amino acid sequence being at least 90% homologous to amino acids 1-116 of AAP35373 (SEQ ID NO:1392), which also corresponds to amino acids 1-116 of SEQ ID NO. 552, and a second amino acid sequence being at least 70%, optionally at least 80%, preferably at least 85%, more preferably at least 90% and most preferably at least 95% homologous to a polypeptide sequence corresponding to amino acids 117-215 of SEQ ID NO. 552, wherein said first and second amino acid sequences are contiguous and in a sequential order.

[0391] According to preferred embodiments of the present invention, there is provided an isolated polypeptide encoding for a tail of SEQ ID NO. 552, comprising a polypeptide being at least 70%, optionally at least about 80%, preferably at least about 85%, more preferably at least about 90% and most preferably at least about 95% homologous to amino in SEQ ID NO. 552.

[0392] According to preferred embodiments of the present invention, there is provided an isolated chimeric polypeptide encoding for SEQ ID NO. 553, comprising a first amino acid sequence being at least 70%, optionally at least 80%, preferably at least 85%, more preferably at least 90% and most preferably at least 95% homologous to a polypeptide sequence amino acids 1-116 of FABH_HUMAN (SEQ ID NO:623), which also corresponds to amino acids 1-116 of SEQ ID NO. 553, and a second amino acid sequence being at least 70%, optionally at least 80%, preferably at least 85%, more preferably at least 90% and most preferably at least 95% homologous to a polypeptide sequence corresponding to amino acids 117-178 of SEQ ID NO. 553, wherein said first and second amino acid sequences are contiguous and in a sequential order.

[0393] According to preferred embodiments of the present invention, there is provided an isolated polypeptide encoding for a tail of SEQ ID NO. 553, comprising a polypeptide being at least 70%, optionally at least about 80%, preferably at least about 85%, more preferably at least about 90% and most preferably at least about 95% homologous to amino in SEQ ID NO. 553.

[0394] According to preferred embodiments of the present invention, there is provided an isolated chimeric polypeptide encoding for SEQ ID NO. 553, comprising a first amino acid sequence being at least 90% homologous to amino acids 1-116 of AAP35373 (SEQ ID NO:1392), which also corresponds to amino acids 1-116 of SEQ ID NO. 553, and a second amino acid sequence being at least 70%, optionally at least 80%, preferably at least 85%, more preferably at least 90% and most preferably at least 95% homologous to a polypeptide sequence corresponding to amino acids 117-178 of SEQ ID NO. 553, wherein said first and second amino acid sequences are contiguous and in a sequential order.

[0395] According to preferred embodiments of the present invention, there is provided an isolated polypeptide encoding for a tail of SEQ ID NO. 553, comprising a polypeptide being at least 70%, optionally at least about 80%, preferably at least about 85%, more preferably at least about 90% and most preferably at least about 95% homologous to in SEQ ID NO. 553.

[0396] According to preferred embodiments of the present invention, there is provided an isolated chimeric polypeptide encoding for SEQ ID NO. 553, comprising a first amino acid sequence being at least 70%, optionally at least 80%, preferably at least 85%, more preferably at least 90% and most preferably at least 95% homologous to a polypeptide sequence corresponding to amino acids 1-116 of FABH_HUMAN (SEQ ID NO:623), which also corresponds to amino acids 1-116 of SEQ ID NO. 553, and a second amino acid sequence being at least 70%, optionally at least 80%, preferably at least 85%, more preferably at least 90% and most preferably at least 95% homologous to a polypeptide sequence corresponding to amino acids 117-178 of SEQ ID NO. 553, wherein said first and second amino acid sequences are contiguous and in a sequential order.

[0397] According to preferred embodiments of the present invention, there is provided an isolated polypeptide encoding for a tail of SEQ ID NO. 553, comprising a polypeptide being at least 70%, optionally at least about 80%, preferably at least about 85%, more preferably at least about 90% and most preferably at least about 95% homologous to amino in SEQ ID NO. 553.

[0398] According to preferred embodiments of the present invention, there is provided an isolated chimeric polypeptide encoding for SEQ ID NO. 553, comprising a first amino acid sequence being at least 90% homologous to amino acids 1-116 of AAP35373 (SEQ ID NO:1392), which also corresponds to amino acids 1-116 of SEQ ID NO. 553, and a second amino acid sequence being at least 70%, optionally at least 80%, preferably at least 85%, more preferably at least 90% and most preferably at least 95% homologous to a polypeptide sequence corresponding to amino acids 117-178 of SEQ ID NO. 553, wherein said first and second amino acid sequences are contiguous and in a sequential order.

[0399] According to preferred embodiments of the present invention, there is provided an isolated polypeptide encoding for a tail of SEQ ID NO. 553, comprising a polypeptide being at least 70%, optionally at least about 80%, preferably at least about 85%, more preferably at least about 90% and most preferably at least about 95% homologous to amino in SEQ ID NO. 553.

[0400] According to preferred embodiments of the present invention, there is provided an isolated chimeric polypeptide encoding for SEQ ID NO. 554, comprising a first amino acid sequence being at least 70%, optionally at least 80%, preferably at least 85%, more preferably at least 90% and most preferably at least 95% homologous to a polypeptide sequence corresponding to amino acids 1-116 of FABH_HUMAN (SEQ ID NO:623), which also corresponds to amino acids 1-116 of SEQ ID NO. 554, and a second amino acid sequence being at least 70%, optionally at least 80%, preferably at least 85%, more preferably at least 90% and most preferably at least 95% homologous to a polypeptide sequence corresponding to amino acids 117-126 of SEQ ID NO. 554, wherein said first and second amino acid sequences are contiguous and in a sequential order.

[0401] According to preferred embodiments of the present invention, there is provided an isolated polypeptide encoding for a tail of SEQ ID NO. 554, comprising a polypeptide being at least 70%, optionally at least about 80%, preferably at least about 85%, more preferably at least about 90% and most preferably at least about 95% homologous to amino in SEQ ID NO. 554.

[0402] According to preferred embodiments of the present invention, there is provided an isolated chimeric polypeptide encoding for SEQ ID NO. 554, comprising a first amino acid sequence being at least 90% homologous to amino acids 1-116 of AAP35373 (SEQ ID NO:1392), which also corresponds to amino acids 1-116 of SEQ ID NO. 554, and a second amino acid sequence being at least 70%, optionally at least 80%, preferably at least 85%, more preferably at least 90% and most preferably at least 95% homologous to a polypeptide sequence corresponding to amino acids 117-126 of SEQ ID NO. 554, wherein said first and second amino acid sequences are contiguous and in a sequential order.

[0403] According to preferred embodiments of the present invention, there is provided an isolated polypeptide encoding for a tail of SEQ ID NO. 554, comprising a polypeptide being at least 70%, optionally at least about 80%, preferably at least about 85%, more preferably at least about 90% and most preferably at least about 95% homologous to amino in SEQ ID NO. 554.

[0404] According to preferred embodiments of the present invention, there is provided an isolated chimeric polypeptide encoding for SEQ ID NO. 555, comprising a first amino acid sequence being at least 90% homologous to amino acids 1-24 of FABH_HUMAN (SEQ ID NO:623), which also corresponds to amino acids 1-24 of SEQ ID NO. 555, second amino acid sequence being at least 70%, optionally at least 80%, preferably at least 85%, more preferably at least 90% and most preferably at least 95% homologous to a polypeptide sequence corresponding to amino acids 25-35 of SEQ ID NO. 555, and a third amino acid sequence being at least 90% homologous to amino acids 25-133 of FABH_HUMAN (SEQ ID NO:623), which also corresponds to amino acids 36-144 of SEQ ID NO. 555, wherein said first, second, third and fourth amino acid sequences are contiguous and in a sequential order.

[0405] According to preferred embodiments of the present invention, there is provided an isolated polypeptide encoding for an edge portion of SEQ ID NO. 555, comprising an amino acid sequence being at least 70%, optionally at least about 80%, preferably at least about 85%, more preferably at least about 90% and most preferably at least about 95% homologous to the sequence encoding for amino acids 25-35 corresponding to SEQ ID NO. 555.

[0406] According to preferred embodiments of the present invention, there is provided an isolated chimeric polypeptide encoding for SEQ ID NO. 555, comprising a first amino acid sequence being at least 90% homologous to amino acids 1-24 of AAP35373 (SEQ ID NO:1392), which also corresponds to amino acids 1-24 of SEQ ID NO. 555, second amino acid sequence being at least 70%, optionally at least 80%, preferably at least 85%, more preferably at least 90% and most preferably at least 95% homologous to a polypeptide sequence corresponding to amino acids 25-35 of SEQ ID NO. 555, and a third amino acid sequence being at least 90% homologous to GVGFATRQVASMTKPTTIIEKNGDILTLKTHSTFKNTEISFKLGVEFDETTADDRKVKSIVTLDGGKLVHLQK WDGQETTLVRELIDGKLILTLTHGTAVCTRTYEKEA corresponding to amino acids 25-133 of AAP35373 (SEQ ID NO:1392), which also corresponds to amino acids 36-144 of SEQ ID NO. 555, wherein said first, second and third amino acid sequences are contiguous and in a sequential order.

[0407] According to preferred embodiments of the present invention, there is provided an isolated polypeptide encoding for an edge portion of SEQ ID NO. 555, comprising an amino acid sequence being at least 70%, optionally at least about 80%, preferably at least about 85%, more preferably at least about 90% and most preferably at least about 95% homologous to the sequence encoding for amino acids 25-35 corresponding to SEQ ID NO. 555.

[0408] According to preferred embodiments of the present invention, there is provided an isolated chimeric polypeptide encoding for SEQ ID NO. 534, comprising a first amino acid sequence being at least 90% homologous to amino acids 1-476 of EPB2_HUMAN (SEQ ID NO:616), which also corresponds to amino acids 1-476 of SEQ ID NO. 534, and a second amino acid sequence being at least 70%, optionally at least 80%, preferably at least 85%, more preferably at least 90% and most preferably at least 95% homologous to a polypeptide sequence corresponding to amino acids 477-496 of SEQ ID NO. 534, wherein said first and second amino acid sequences are contiguous and in a sequential order.

[0409] According to preferred embodiments of the present invention, there is provided an isolated polypeptide encoding for a tail of SEQ ID NO. 534, comprising a polypeptide being at least 70%, optionally at least about 80%, preferably at least about 85%, more preferably at least about 90% and most preferably at least about 95% homologous to amino in SEQ ID NO. 534.

[0410] According to preferred embodiments of the present invention, there is provided an isolated chimeric polypeptide encoding for SEQ ID NO. 535, comprising a first amino acid sequence being at least 90% homologous to amino acids 1-270 of EPB2_HUMAN (SEQ ID NO:616), which also corresponds to amino acids 1-270 of SEQ ID NO. 535, and a second amino acid sequence being at least 70%, optionally at least 80%, preferably at least 85%, more preferably at least 90% and most preferably at least 95% homologous to a polypeptide sequence corresponding to amino acids 271-301 of SEQ ID NO. 535, wherein said first and second amino acid sequences are contiguous and in a sequential order.

[0411] According to preferred embodiments of the present invention, there is provided an isolated polypeptide encoding for a tail of SEQ ID NO. 535, comprising a polypeptide being at least 70%, optionally at least about 80%, preferably at least about 85%, more preferably at least about 90% and most preferably at least about 95% homologous to amino in SEQ ID NO. 535.

[0412] According to preferred embodiments of the present invention, there is provided an isolated chimeric polypeptide encoding for SEQ ID NO. 536, comprising a first amino acid sequence being at least 90% homologous to amino acids 1-319 of CEA6_HUMAN (SEQ ID NO:617), which also corresponds to amino acids 1-319 of SEQ ID NO. 536, and a second amino acid sequence being at least 70%, optionally at least 80%, preferably at least 85%, more preferably at least 90% and most preferably at least 95% homologous to a polypeptide sequence corresponding to amino acids 320-324 of SEQ ID NO. 536, wherein said first and second amino acid sequences are contiguous and in a sequential order.

[0413] According to preferred embodiments of the present invention, there is provided an isolated polypeptide encoding for a tail of SEQ ID NO. 536, comprising a polypeptide being at least 70%, optionally at least about 80%, preferably at least about 85%, more preferably at least about 90% and most preferably at least about 95% homologous to amino in SEQ ID NO. 536.

[0414] According to preferred embodiments of the present invention, there is provided an isolated chimeric polypeptide encoding for SEQ ID NO. 537, comprising a first amino acid sequence being at least 90% homologous to amino acids 1-234 of CEA6_HUMAN (SEQ ID NO:617), which also corresponds to amino acids 1-234 of SEQ ID NO. 537, and a second amino acid sequence being at least 70%, optionally at least 80%, preferably at least 85%, more preferably at least 90% and most preferably at least 95% homologous to a polypeptide sequence corresponding to amino acids 235-256 of SEQ ID NO. 537, wherein said first and second amino acid sequences are contiguous and in a sequential order.

[0415] According to preferred embodiments of the present invention, there is provided an isolated polypeptide encoding for a tail of SEQ ID NO. 537, comprising a polypeptide being at least 70%, optionally at least about 80%, preferably at least about 85%, more preferably at least about 90% and most preferably at least about 95% homologous to amino in SEQ ID NO. 537.

[0416] According to preferred embodiments of the present invention, there is provided an isolated chimeric polypeptide encoding for SEQ ID NO. 537, comprising a first amino acid sequence being at least 90% homologous to amino acids 1-234 of Q13774 (SEQ ID NO:1382), which also corresponds to amino acids 1-234 of SEQ ID NO. 537, and a second amino acid sequence being at least 70%, optionally at least 80%, preferably at least 85%, more preferably at least 90% and most preferably at least 95% homologous to a polypeptide sequence corresponding to amino acids 235-256 of SEQ ID NO. 537, wherein said first and second amino acid sequences are contiguous and in a sequential order.

[0417] According to preferred embodiments of the present invention, there is provided an isolated polypeptide encoding for a tail of SEQ ID NO. 537, comprising a polypeptide being at least 70%, optionally at least about 80%, preferably at least about 85%, more preferably at least about 90% and most preferably at least about 95% homologous to in SEQ ID NO. 537.

[0418] According to preferred embodiments of the present invention, there is provided an isolated chimeric polypeptide encoding for SEQ ID NO. 538, comprising a first amino acid sequence being at least 90% homologous to amino acids 1-320 of CEA6_HUMAN (SEQ ID NO:617), which also corresponds to amino acids 1-320 of SEQ ID NO. 538, and a second amino acid sequence being at least 70%, optionally at least 80%, preferably at least 85%, more preferably at least 90% and most preferably at least 95% homologous to a polypeptide sequence corresponding to amino acids 321-390 of SEQ ID NO. 538, wherein said first and second amino acid sequences are contiguous and in a sequential order.

[0419] According to preferred embodiments of the present invention, there is provided an isolated polypeptide encoding for a tail of SEQ ID NO. 538, comprising a polypeptide being at least 70%, optionally at least about 80%, preferably at least about 85%, more preferably at least about 90% and most preferably at least about 95% homologous to amino in SEQ ID NO. 538.

[0420] According to preferred embodiments of the present invention, there is provided an isolated chimeric polypeptide encoding for SEQ ID NO. 539, comprising a first amino acid sequence being at least 90% homologous to amino acids 1-141 of CEA6_HUMAN (SEQ ID NO:617), which also corresponds to amino acids 1-141 of SEQ ID NO. 539, and a second amino acid sequence being at least 70%, optionally at least 80%, preferably at least 85%, more preferably at least 90% and most preferably at least 95% homologous to a polypeptide sequence corresponding to amino acids 142-183 of SEQ ID NO. 539, wherein said first and second amino acid sequences are contiguous and in a sequential order.

[0421] According to preferred embodiments of the present invention, there is provided an isolated polypeptide encoding for a tail of SEQ ID NO. 539, comprising a polypeptide being at least 70%, optionally at least about 80%, preferably at least about 85%, more preferably at least about 90% and most preferably at least about 95% homologous to amino in SEQ ID NO. 539.

[0422] According to preferred embodiments of the present invention, there is provided an isolated chimeric polypeptide encoding for SEQ ID NO. 540, comprising a first amino acid sequence being at least 90% homologous to amino acids 168-180 of Q9HAP5 (SEQ ID NO:1384), which also corresponds to amino acids 1-167 of SEQ ID NO. 540, and a second amino acid sequence being at least 70%, optionally at least 80%, preferably at least 85%, more preferably at least 90% and most preferably at least 95% homologous to a polypeptide sequence corresponding to amino acids 168-180 of SEQ ID NO. 540, wherein said first and second amino acid sequences are contiguous and in a sequential order.

[0423] According to preferred embodiments of the present invention, there is provided an isolated polypeptide encoding for a tail of SEQ ID NO. 540, comprising a polypeptide being at least 70%, optionally at least about 80%, preferably at least about 85%, more preferably at least about 90% and most preferably at least about 95% homologous to amino in SEQ ID NO. 540.

[0424] According to preferred embodiments of the present invention, there is provided an isolated chimeric polypeptide encoding for SEQ ID NO. 541, comprising a first amino acid sequence being at least 90% homologous to amino acids 1-357 of Q8N441 (SEQ ID NO:1385), which also corresponds to amino acids 1-357 of SEQ ID NO. 541, second amino acid sequence being at least 70%, optionally at least 80%, preferably at least 85%, more preferably at least 90% and most preferably at least 95% homologous to a polypeptide sequence corresponding to amino acids 358-437 of SEQ ID NO. 541, and a third amino acid sequence being at least 90% homologous to amino acids 358-504 of Q8N441 (SEQ ID NO:1385), which also corresponds to amino acids 438-584 of SEQ ID NO. 541, wherein said first, second and third amino acid sequences are contiguous and in a sequential order.

[0425] According to preferred embodiments of the present invention, there is provided an isolated polypeptide encoding for an edge portion of SEQ ID NO. 541, comprising an amino acid sequence being at least 70%, optionally at least about 80%, preferably at least about 85%, more preferably at least about 90% and most preferably at least about 95% homologous to the sequence encoding for corresponding to SEQ ID NO. 541.

[0426] According to preferred embodiments of the present invention, there is provided an isolated chimeric polypeptide encoding for SEQ ID NO. 542, comprising a first amino acid sequence being at least 90% homologous to amino acids 1-269 of Q9H4D7 (SEQ ID NO:1386), which also corresponds to amino acids 1-269 of SEQ ID NO. 542, and a second amino acid sequence being at least 70%, optionally at least 80%, preferably at least 85%, more preferably at least 90% and most preferably at least 95% homologous to a polypeptide sequence corresponding to amino acids 270-490 of SEQ ID NO. 542, wherein said first and second amino acid sequences are contiguous and in a sequential order.

[0427] According to preferred embodiments of the present invention, there is provided an isolated polypeptide encoding for a tail of SEQ ID NO. 542, comprising a polypeptide being at least 70%, optionally at least about 80%, preferably at least about 85%, more preferably at least about 90% and most preferably at least about 95% homologous to amino in SEQ ID NO. 542.

[0428] According to preferred embodiments of the present invention, there is provided an isolated chimeric polypeptide encoding for SEQ ID NO. 542, comprising a first amino acid sequence being at least 90% homologous to amino acids 1-269 of Q8N441 (SEQ ID NO:1385), which also corresponds to amino acids 1-269 of SEQ ID NO. 542, and a second amino acid sequence being at least 70%, optionally at least 80%, preferably at least 85%, more preferably at least 90% and most preferably at least 95% homologous to a polypeptide sequence corresponding to amino acids 270-490 of SEQ ID NO. 542, wherein said first and second amino acid sequences are contiguous and in a sequential order.

[0429] According to preferred embodiments of the present invention, there is provided an isolated polypeptide encoding for a tail of SEQ ID NO. 542, comprising a polypeptide being at least 70%, optionally at least about 80%, preferably at least about 85%, more preferably at least about 90% and most preferably at least about 95% homologous to amino in SEQ ID NO. 542.

[0430] According to preferred embodiments of the present invention, there is provided an isolated chimeric polypeptide encoding for SEQ ID NO. 543, comprising a first amino acid sequence being at least 90% homologous to amino acids 1-81 of SZ05_HUMAN (SEQ ID NO:618), which also corresponds to amino acids 1-81 of SEQ ID NO. 543.

[0431] According to preferred embodiments of the present invention, there is provided an isolated chimeric polypeptide encoding for SEQ ID NO. 544, comprising a first amino acid sequence being at least 90% homologous to amino acids 1-74 of MI2B_HUMAN (SEQ ID NO:619), which also corresponds to amino acids 1-74 of SEQ ID NO. 544.

[0432] According to preferred embodiments of the present invention, there is provided an isolated chimeric polypeptide encoding for SEQ ID NO. 545, comprising a first amino acid sequence being at least 90% homologous to amino acids 1-103 of MI2B_HUMAN (SEQ ID NO:619), which also corresponds to amino acids 1-103 of SEQ ID NO. 545.

[0433] According to preferred embodiments of the present invention, there is provided an isolated chimeric polypeptide encoding for SEQ ID NO. 546, comprising a first amino acid sequence being at least 90% homologous to amino acids 1-61 of MI2B_HUMAN (SEQ ID NO:619), which also corresponds to amino acids 1-61 of SEQ ID NO. 546, and a second amino acid sequence being at least 70%, optionally at least 80%, preferably at least 85%, more preferably at least 90% and most preferably at least 95% homologous to a polypeptide sequence corresponding to amino acids 62-98 of SEQ ID NO. 546, wherein said first and second amino acid sequences are contiguous and in a sequential order.

[0434] According to preferred embodiments of the present invention, there is provided an isolated polypeptide encoding for a tail of SEQ ID NO. 546, comprising a polypeptide being at least 70%, optionally at least about 80%, preferably at least about 85%, more preferably at least about 90% and most preferably at least about 95% homologous to amino acids 62-98 in SEQ ID NO. 546.

[0435] According to preferred embodiments of the present invention, there is provided an isolated chimeric polypeptide encoding for SEQ ID NO. 547, comprising a first amino acid sequence being at least 70%, optionally at least 80%, preferably at least 85%, more preferably at least 90% and most preferably at least 95% homologous to a polypeptide sequence corresponding to amino acids 1-103 of SEQ ID NO. 547, and a second amino acid sequence being at least 90% homologous to amino acids 34-107 of MI2B_HUMAN (SEQ ID NO:619), which also corresponds to amino acids 104-177 of SEQ ID NO. 547, wherein said first and second amino acid sequences are contiguous and in a sequential order.

[0436] According to preferred embodiments of the present invention, there is provided an isolated polypeptide encoding for a head of SEQ ID NO. 547, comprising a polypeptide being at least 70%, optionally at least about 80%, preferably at least about 85%, more preferably at least about 90% and most preferably at least about 95% homologous to amino acids 1-103 of SEQ ID NO. 547.

[0437] According to preferred embodiments of the present invention, there is provided an isolated chimeric polypeptide encoding for SEQ ID NO. 548, comprising a first amino acid sequence being at least 70%, optionally at least 80%, preferably at least 85%, more preferably at least 90% and most preferably at least 95% homologous to a polypeptide sequence corresponding to amino acids 1-29 of SEQ ID NO. 548, and a second amino acid sequence being at least 90% homologous to amino acids 151-461 of DCOR_HUMAN (SEQ ID NO:620), which also corresponds to amino acids 30-340 of SEQ ID NO. 548, wherein said first and second amino acid sequences are contiguous and in a sequential order.

[0438] According to preferred embodiments of the present invention, there is provided an isolated polypeptide encoding for a head of SEQ ID NO. 548, comprising a polypeptide being at least 70%, optionally at least about 80%, preferably at least about 85%, more preferably at least about 90% and most preferably at least about 95% homologous to amino acids 1-29 of SEQ ID NO. 548.

[0439] According to preferred embodiments of the present invention, there is provided an isolated chimeric polypeptide encoding for SEQ ID NO. 548, comprising a first amino acid sequence being at least 70%, optionally at least 80%, preferably at least 85%, more preferably at least 90% and most preferably at least 95% homologous to a polypeptide sequence corresponding to amino acids 1-29 of SEQ ID NO. 548, and a second amino acid sequence being at least 90% homologous to amino acids 40-350 of AAA59968 (SEQ ID NO:1387), which also corresponds to amino acids 30-340 of SEQ ID NO. 548, wherein said first and second amino acid sequences are contiguous and in a sequential order.

[0440] According to preferred embodiments of the present invention, there is provided an isolated polypeptide encoding for a head of SEQ ID NO. 548, comprising a polypeptide being at least 70%, optionally at least about 80%, preferably at least about 85%, more preferably at least about 90% and most preferably at least about 95% homologous to amino acids 1-29 of SEQ ID NO. 548.

[0441] According to preferred embodiments of the present invention, there is provided an isolated chimeric polypeptide encoding for SEQ ID NO. 548, comprising a first amino acid sequence being at least 70%, optionally at least 80%, preferably at least 85%, more preferably at least 90% and most preferably at least 95% homologous to a polypeptide sequence corresponding to amino acids 1-29 of SEQ ID NO. 548, and a second amino acid sequence being at least 90% homologous to amino acids 86-396 of AAH14562 (SEQ ID NO:1388), which also corresponds to amino acids 30-340 of SEQ ID NO. 548, wherein said first and second amino acid sequences are contiguous and in a sequential order.

[0442] According to preferred embodiments of the present invention, there is provided an isolated polypeptide encoding for a head of SEQ ID NO. 548, comprising a polypeptide being at least 70%, optionally at least about 80%, preferably at least about 85%, more preferably at least about 90% and most preferably at least about 95% homologous to amino acids 1-29 of SEQ ID NO. 548.

[0443] According to preferred embodiments of the present invention, there is provided an isolated chimeric polypeptide encoding for SEQ ID NO. 549, comprising a first amino acid sequence being at least 70%, optionally at least 80%, preferably at least 85%, more preferably at least 90% and most preferably at least 95% homologous to a polypeptide sequence corresponding to amino acids 1-44 of SEQ ID NO. 549, second amino acid sequence being at least 90% homologous to amino acids 74-191 of Q9NWT9 (SEQ ID NO:1389), which also corresponds to amino acids 45-162 of SEQ ID NO. 549, and a third amino acid sequence being at least 70%, optionally at least 80%, preferably at least 85%, more preferably at least 90% and most preferably at least 95% homologous to a polypeptide sequence corresponding to amino acids 163-238 of SEQ ID NO. 549, wherein said first, second and third amino acid sequences are contiguous and in a sequential order.

[0444] According to preferred embodiments of the present invention, there is provided an isolated polypeptide encoding for a head of SEQ ID NO. 549, comprising a polypeptide being at least 70%, optionally at least about 80%, preferably at least about 85%, more preferably at least about 90% and most preferably at least about 95% homologous to amino acids 1-44 of SEQ ID NO. 549.

[0445] According to preferred embodiments of the present invention, there is provided an isolated polypeptide encoding for a tail of SEQ ID NO. 549, comprising a polypeptide being at least 70%, optionally at least about 80%, preferably at least about 85%, more preferably at least about 90% and most preferably at least about 95% homologous to amino in SEQ ID NO. 549.

[0446] According to preferred embodiments of the present invention, there is provided an isolated chimeric polypeptide encoding for SEQ ID NO. 549, comprising a first amino acid sequence being at least 70%, optionally at least 80%, preferably at least 85%, more preferably at least 90% and most preferably at least 95% homologous to a polypeptide sequence corresponding to amino acids 1-44 of SEQ ID NO. 549, and a second amino acid sequence being at least 90% homologous to amino acids 21-214 of TESC_HUMAN (SEQ ID NO:621), which also corresponds to amino acids 45-238 of SEQ ID NO. 549, wherein said first and second amino acid sequences are contiguous and in a sequential order.

[0447] According to preferred embodiments of the present invention, there is provided an isolated polypeptide encoding for a head of SEQ ID NO. 549, comprising a polypeptide being at least 70%, optionally at least about 80%, preferably at least about 85%, more preferably at least about 90% and most preferably at least about 95% homologous to amino acids 1-44 of SEQ ID NO. 549.

[0448] According to preferred embodiments of the present invention, there is provided an isolated chimeric polypeptide encoding for SEQ ID NO. 550, comprising a first amino acid sequence being at least 70%, optionally at least 80%, preferably at least 85%, more preferably at least 90% and most preferably at least 95% homologous to a polypeptide sequence corresponding to amino acids 1-130 of SEQ ID NO. 550, and a second amino acid sequence being at least 90% homologous to amino acids 1-172 of Q96C98 (SEQ ID NO:1390), which also corresponds to amino acids 131-302 of SEQ ID NO. 550, wherein said first and second amino acid sequences are contiguous and in a sequential order.

[0449] According to preferred embodiments of the present invention, there is provided an isolated polypeptide encoding for a head of SEQ ID NO. 550, comprising a polypeptide being at least 70%, optionally at least about 80%, preferably at least about 85%, more preferably at least about 90% and most preferably at least about 95% homologous to amino acids 1-130 of SEQ ID NO. 550.

[0450] According to preferred embodiments of the present invention, there is provided an isolated chimeric polypeptide encoding for SEQ ID NO. 550, comprising a first amino acid sequence being at least 70%, optionally at least 80%, preferably at least 85%, more preferably at least 90% and most preferably at least 95% homologous to a polypeptide sequence corresponding to amino acids 1-74 of SEQ ID NO. 550, and a second amino acid sequence being at least 90% homologous to amino acids 53-280 of Q9BVA2 (SEQ ID NO:1391), which also corresponds to amino acids 75-302 of SEQ ID NO. 550, wherein said first and second amino acid sequences are contiguous and in a sequential order.

[0451] According to preferred embodiments of the present invention, there is provided an isolated polypeptide encoding for a head of SEQ ID NO. 550, comprising a polypeptide being at least 70%, optionally at least about 80%, preferably at least about 85%, more preferably at least about 90% and most preferably at least about 95% homologous to amino acids 1-74 of SEQ ID NO. 550.

[0452] According to preferred embodiments of the present invention, there is provided an isolated chimeric polypeptide encoding for SEQ ID NO. 551, comprising a first amino acid sequence being at least 70%, optionally at least 80%, preferably at least 85%, more preferably at least 90% and most preferably at least 95% homologous to a polypeptide sequence corresponding to amino acids 1-34 of SEQ ID NO. 551, and a second amino acid sequence being at least 90% homologous to corresponding to amino acids 60-172 of Q96C98 (SEQ ID NO:1390), which also corresponds to amino acids 35-147 of SEQ ID NO. 551, wherein said first and second amino acid sequences are contiguous and in a sequential order.

[0453] According to preferred embodiments of the present invention, there is provided an isolated polypeptide encoding for a head of SEQ ID NO. 551 comprising a polypeptide being at least 70%, optionally at least about 80%, preferably at least about 85%, more preferably at least about 90% and most preferably at least about 95% homologous to amino acids 1-34 of SEQ ID NO. 551.

[0454] According to preferred embodiments of the present invention, there is provided an isolated chimeric polypeptide encoding for SEQ ID NO. 551, comprising a first amino acid sequence being at least 70%, optionally at least 80%, preferably at least 85%, more preferably at least 90% and most preferably at least 95% homologous to a polypeptide sequence corresponding to amino acids 1-34 of SEQ ID NO. 551, and a second amino acid sequence being at least 90% homologous to corresponding to amino acids 168-280 of Q9BVA2 (SEQ ID NO:1391), which also corresponds to amino acids 35-147 of SEQ ID NO. 551, wherein said first and second amino acid sequences are contiguous and in a sequential order.

[0455] According to preferred embodiments of the present invention, there is provided an isolated polypeptide encoding for a head of SEQ ID NO. 551, comprising a polypeptide being at least 70%, optionally at least about 80%, preferably at least about 85%, more preferably at least about 90% and most preferably at least about 95% homologous to amino acids 1-34 of SEQ ID NO. 551.

[0456] According to preferred embodiments of the present invention, there is provided an isolated polypeptide encoding for a head of SEQ ID NO. 548, comprising a polypeptide being at least 70%, optionally at least about 80%, preferably at least about 85%, more preferably at least about 90% and most preferably at least about 95% homologous to amino acids 1-29 of SEQ ID NO. 548.

[0457] According to preferred embodiments of the present invention, there is provided an isolated chimeric polypeptide encoding for SEQ ID NO. 556, comprising a first amino acid sequence being at least 90% homologous to amino acids 1-441 of SMO2_HUMAN (SEQ ID NO:624), which also corresponds to amino acids 1-441 of SEQ ID NO. 556, and a second amino acid sequence being at least 70%, optionally at least 80%, preferably at least 85%, more preferably at least 90% and most preferably at least 95% homologous to a polypeptide sequence corresponding to amino acids 442-464 of SEQ ID NO. 556, wherein said first and second amino acid sequences are contiguous and in a sequential order.

[0458] According to preferred embodiments of the present invention, there is provided an An isolated polypeptide encoding for a tail of SEQ ID NO. 556, comprising a polypeptide being at least 70%, optionally at least about 80%, preferably at least about 85%, more preferably at least about 90% and most preferably at least about 95% homologous to amino in SEQ ID NO. 556.

[0459] According to preferred embodiments of the present invention, there is provided an isolated chimeric polypeptide encoding for SEQ ID NO. 557, comprising a first amino acid sequence being at least 90% homologous to amino acids 1-428 of SMO2_HUMAN (SEQ ID NO:624), which also corresponds to amino acids 1-428 of SEQ ID NO. 557, and a second amino acid sequence being at least 70%, optionally at least 80%, preferably at least 85%, more preferably at least 90% and most preferably at least 95% homologous to a polypeptide sequence corresponding to amino acids 429-434 of SEQ ID NO. 557, wherein said first and second amino acid sequences are contiguous and in a sequential order.

[0460] According to preferred embodiments of the present invention, there is provided an isolated polypeptide encoding for a tail of SEQ ID NO. 557, comprising a polypeptide being at least 70%, optionally at least about 80%, preferably at least about 85%, more preferably at least about 90% and most preferably at least about 95% homologous to amino in SEQ ID NO. 557.

[0461] According to preferred embodiments of the present invention, there is provided an isolated chimeric polypeptide encoding for SEQ ID NO. 558, comprising a first amino acid sequence being at least 90% homologous to amino acids 1-441 of SMO2_HUMAN (SEQ ID NO:624), which also corresponds to amino acids 1-441 of SEQ ID NO. 558, and a second amino acid sequence being at least 70%, optionally at least 80%, preferably at least 85%, more preferably at least 90% and most preferably at least 95% homologous to a polypeptide sequence corresponding to amino acids 442-454 of SEQ ID NO. 558, wherein said first and second amino acid sequences are contiguous and in a sequential order.

[0462] According to preferred embodiments of the present invention, there is provided an isolated polypeptide encoding for a tail of SEQ ID NO. 558, comprising a polypeptide being at least 70%, optionally at least about 80%, preferably at least about 85%, more preferably at least about 90% and most preferably at least about 95% homologous amino in SEQ ID NO. 558.

[0463] According to preferred embodiments of the present invention, there is provided an isolated chimeric polypeptide encoding for SEQ ID NO. 559, comprising a first amino acid sequence being at least 90% homologous to amino acids 1-170 of SMO2_HUMAN (SEQ ID NO:624), which also corresponds to amino acids 1-170 of SEQ ID NO. 559, and a second amino acid sequence being at least 90% homologous to amino acids 188-446 of SMO2_HUMAN (SEQ ID NO:624), which also corresponds to amino acids 171-429 of SEQ ID NO. 559, wherein said first and second amino acid sequences are contiguous and in a sequential order.

[0464] According to preferred embodiments of the present invention, there is provided an isolated chimeric polypeptide encoding for an edge portion of SEQ ID NO. 559, comprising a polypeptide having a length “n”, wherein n is at least about 10 amino acids in length, optionally at least about 20 amino acids in length, preferably at least about 30 amino acids in length, more preferably at least about 40 amino acids in length and most preferably at least about 50 amino acids in length, wherein at least two amino acids comprise TD, having a structure as follows: a sequence starting from any of amino acid numbers 170−x to 170; and ending at any of amino acid numbers 171+((n−2)−x), in which x varies from 0 to n−2.

[0465] According to preferred embodiments of the present invention, there is provided an antibody capable of specifically binding to an epitope of an amino acid sequence from clusters of M85491, T10888, H14624, H53626, HSENA78, HUMGROG5, HUMODCA, R00299, Z19178, S67314, Z44808, Z25299, HUMF5A, HUMANK, Z39818, HUMCA1XIA, HSS100PCB, HUMPHOSLIP, D11853, R11723, M77903 and HSKITCR. Optionally said amino acid sequence corresponds to a bridge, edge portion, tail, head or insertion.

[0466] Optionally the antibody is capable of differentiating between a splice variant having said epitope and a corresponding known protein.

[0467] According to preferred embodiments of the present invention, there is provided a kit for detecting colon cancer, comprising a kit detecting overexpression of a splice variant from clusters of M85491, T10888, H14624, H53626, HSENA78, HUMGROG5, HUMODCA, R00299, Z19178, S67314, Z44808, Z25299, HUMF5A, HUMANK, Z39818, HUMCA1XIA, HSS100PCB, HUMPHOSLIP, D11853, R11723, M77903 and HSKITCR.

[0468] Optionally the kit comprises a NAT-based technology.

[0469] Optionally the kit further comprises at least one primer pair capable of selectively hybridizing to a nucleic acid sequence.

[0470] Optionally the kit further comprises at least one oligonucleotide capable of selectively hybridizing to a nucleic acid sequence.

[0471] Optionally the kit comprises an antibody.

[0472] Optionally the kit further comprises at least one reagent for performing an ELISA or a Western blot.

[0473] According to preferred embodiments of the present invention, there is provided an method for detecting colon cancer, comprising detecting overexpression of a splice variant from clusters of M85491, T10888, H14624, H53626, HSENA78, HUMGROG5, HUMODCA, R00299, Z19178, S67314, Z44808, Z25299, HUMF5A, HUMANK, Z39818, HUMCA1XIA, HSS100PCB, HUMPHOSLIP, D11853, R11723, M77903 and HSKITCR.

[0474] Optionally detecting overexpression is performed with a NAT-based technology.

[0475] Optionally said detecting overexpression is performed with an immunoassay.

[0476] Optionally the immunoassay comprises an antibody.

[0477] According to preferred embodiments of the present invention, there is provided a biomarker capable of detecting colon cancer, comprising nucleic acid sequences or a fragment thereof, or amino acid sequences or a fragment thereof from clusters of M85491, T10888, H14624, H53626, HSENA78, HUMGROG5, HUMODCA, R00299, Z19178, S67314, Z44808, Z25299, HUMF5A, HUMANK, Z39818, HUMCA1XIA, HSS100PCB, HUMPHOSLIP, D11853, R11723, M77903 and HSKITCR.

[0478] According to preferred embodiments of the present invention, there is provided a method for screening for colon cancer, comprising detecting colon cancer cells with a biomarker or an antibody or a method or assay.

[0479] According to preferred embodiments of the present invention, there is provided a method for diagnosing colon cancer, comprising detecting colon cancer cells with a biomarker or an antibody or a method or assay.

[0480] According to preferred embodiments of the present invention, there is provided a method for monitoring disease progression of colon cancer, comprising detecting colon cancer cells with a biomarker or an antibody or a method or assay.

[0481] According to preferred embodiments of the present invention, there is provided a method of selecting a therapy for colon cancer, comprising detecting colon cancer cells with a biomarker or an antibody or a method or assay and selecting a therapy according to said detection.

[0482] According to preferred embodiments of the present invention, there is provided an isolated polynucleotide comprising a nucleic acid sequence in the table below and/or:

Transcript Name

AA583399_PEA_1_T0 (SEQ ID NO: 643)
AA583399_PEA_1_T1 (SEQ ID NO: 644)
AA583399_PEA_1_T2 (SEQ ID NO: 645)
AA583399_PEA_1_T3 (SEQ ID NO: 646)
AA583399_PEA_1_T4 (SEQ ID NO: 647)
AA583399_PEA_1_T5 (SEQ ID NO: 648)
AA583399_PEA_1_T6 (SEQ ID NO: 649)
AA583399_PEA_1_T7 (SEQ ID NO: 650)
AA583399_PEA_1_T8 (SEQ ID NO: 651)
AA583399_PEA_1_T9 (SEQ ID NO: 652)
AA583399_PEA_1_T10 (SEQ ID NO: 653)
AA583399_PEA_1_T11 (SEQ ID NO: 654)
AA583399_PEA_1_T12 (SEQ ID NO: 655)
AA583399_PEA_1_T15 (SEQ ID NO: 656)
AA583399_PEA_1_T16 (SEQ ID NO: 657)
AA583399_PEA_1_T17 (SEQ ID NO: 658)

[0483] a nucleic acid sequence comprising a sequence selected from the table below:

Segment Name

AA583399_PEA_1_node_0 (SEQ ID NO: 659)
AA583399_PEA_1_node_3 (SEQ ID NO: 660)
AA583399_PEA_1_node_9 (SEQ ID NO: 661)
AA583399_PEA_1_node_10 (SEQ ID NO: 662)
AA583399_PEA_1_node_12 (SEQ ID NO: 663)
AA583399_PEA_1_node_14 (SEQ ID NO: 664)
AA583399_PEA_1_node_21 (SEQ ID NO: 665)
AA583399_PEA_1_node_24 (SEQ ID NO: 666)
AA583399_PEA_1_node_25 (SEQ ID NO: 667)
AA583399_PEA_1_node_29 (SEQ ID NO: 668)
AA583399_PEA_1_node_1 (SEQ ID NO: 669)
AA583399_PEA_1_node_2 (SEQ ID NO: 670)
AA583399_PEA_1_node_4 (SEQ ID NO: 671)
AA583399_PEA_1_node_5 (SEQ ID NO: 672)
AA583399_PEA_1_node_6 (SEQ ID NO: 673)
AA583399_PEA_1_node_7 (SEQ ID NO: 674)
AA583399_PEA_1_node_8 (SEQ ID NO: 675)
AA583399_PEA_1_node_11 (SEQ ID NO: 676)
AA583399_PEA_1_node_19 (SEQ ID NO: 677)
AA583399_PEA_1_node_27 (SEQ ID NO: 678)

[0484] According to preferred embodiments of the present invention, there is provided an isolated polypeptide comprising an amino acid sequence in the table below:

Protein Name

AA583399_PEA_1_P3 (SEQ ID NO: 683)
AA583399_PEA_1_P2 (SEQ ID NO: 684)
AA583399_PEA_1_P4 (SEQ ID NO: 685)
AA583399_PEA_1_P5 (SEQ ID NO: 686)
AA583399_PEA_1_P6 (SEQ ID NO: 687)
AA583399_PEA_1_P8 (SEQ ID NO: 688)
AA583399_PEA_1_P10 (SEQ ID NO: 689)
AA583399_PEA_1_P11 (SEQ ID NO: 690)
AA583399_PEA_1_P12 (SEQ ID NO: 691)
AA583399_PEA_1_P14 (SEQ ID NO: 692)

[0485] According to preferred embodiments of the present invention, there is provided an isolated polynucleotide comprising a nucleic acid sequence in the table below and/or:

Transcript Name

AI684092_PEA_1_T2 (SEQ ID NO: 693)
AI684092_PEA_1_T3 (SEQ ID NO: 694)

[0486] a nucleic acid sequence comprising a sequence in the table below:

Segment Name

AI684092_PEA_1_node_0 (SEQ ID NO: 695)
AI684092_PEA_1_node_2 (SEQ ID NO: 696)
AI684092_PEA_1_node_4 (SEQ ID NO: 697)
AI684092_PEA_1_node_5 (SEQ ID NO: 698)
AI684092_PEA_1_node_6 (SEQ ID NO: 699)
AI684092_PEA_1_node_7 (SEQ ID NO: 700)
AI684092_PEA_1_node_8 (SEQ ID NO: 701)
AI684092_PEA_1_node_9 (SEQ ID NO: 702)

[0487] According to preferred embodiments of the present invention, there is provided an isolated polypeptide comprising an amino acid sequence in the table below:

Protein Name

AI684092_PEA_1_P1 (SEQ ID NO: 703)
AI684092_PEA_1_P3 (SEQ ID NO: 704)

[0488] According to preferred embodiments of the present invention, there is provided an isolated polynucleotide comprising a nucleic acid sequence in the table below and/or:

Transcript Name

HUMCACH1A_PEA_1_T0 (SEQ ID NO: 705)
HUMCACH1A_PEA_1_T1 (SEQ ID NO: 706)
HUMCACH1A_PEA_1_T2 (SEQ ID NO: 707)
HUMCACH1A_PEA_1_T3 (SEQ ID NO: 708)
HUMCACH1A_PEA_1_T4 (SEQ ID NO: 709)
HUMCACH1A_PEA_1_T6 (SEQ ID NO: 710)
HUMCACH1A_PEA_1_T7 (SEQ ID NO: 711)
HUMCACH1A_PEA_1_T8 (SEQ ID NO: 712)
HUMCACH1A_PEA_1_T12 (SEQ ID NO: 713)
HUMCACH1A_PEA_1_T13 (SEQ ID NO: 714)
HUMCACH1A_PEA_1_T14 (SEQ ID NO: 715)
HUMCACH1A_PEA_1_T15 (SEQ ID NO: 716)
HUMCACH1A_PEA_1_T16 (SEQ ID NO: 717)
HUMCACH1A_PEA_1_T17 (SEQ ID NO: 718)
HUMCACH1A_PEA_1_T18 (SEQ ID NO: 719)
HUMCACH1A_PEA_1_T19 (SEQ ID NO: 720)
HUMCACH1A_PEA_1_T20 (SEQ ID NO: 721)
HUMCACH1A_PEA_1_T22 (SEQ ID NO: 722)

[0489] a nucleic acid sequence comprising a sequence in the table below:

Segment Name

HUMCACH1A_PEA_1_node_2 (SEQ ID NO: 723)
HUMCACH1A_PEA_1_node_5 (SEQ ID NO: 724)
HUMCACH1A_PEA_1_node_9 (SEQ ID NO: 725)
HUMCACH1A_PEA_1_node_11 (SEQ ID NO: 726)
HUMCACH1A_PEA_1_node_14 (SEQ ID NO: 727)
HUMCACH1A_PEA_1_node_16 (SEQ ID NO: 728)
HUMCACH1A_PEA_1_node_27 (SEQ ID NO: 729)
HUMCACH1A_PEA_1_node_30 (SEQ ID NO: 730)
HUMCACH1A_PEA_1_node_33 (SEQ ID NO: 731)
HUMCACH1A_PEA_1_node_41 (SEQ ID NO: 732)
HUMCACH1A_PEA_1_node_43 (SEQ ID NO: 733)
HUMCACH1A_PEA_1_node_45 (SEQ ID NO: 734)
HUMCACH1A_PEA_1_node_47 (SEQ ID NO: 735)
HUMCACH1A_PEA_1_node_55 (SEQ ID NO: 736)
HUMCACH1A_PEA_1_node_57 (SEQ ID NO: 737)
HUMCACH1A_PEA_1_node_70 (SEQ ID NO: 738)
HUMCACH1A_PEA_1_node_72 (SEQ ID NO: 739)
HUMCACH1A_PEA_1_node_74 (SEQ ID NO: 740)
HUMCACH1A_PEA_1_node_86 (SEQ ID NO: 741)
HUMCACH1A_PEA_1_node_92 (SEQ ID NO: 742)
HUMCACH1A_PEA_1_node_94 (SEQ ID NO: 743)
HUMCACH1A_PEA_1_node_103 (SEQ ID NO: 744)
HUMCACH1A_PEA_1_node_104 (SEQ ID NO: 745)
HUMCACH1A_PEA_1_node_106 (SEQ ID NO: 746)
HUMCACH1A_PEA_1_node_109 (SEQ ID NO: 747)
HUMCACH1A_PEA_1_node_113 (SEQ ID NO: 748)
HUMCACH1A_PEA_1_node_114 (SEQ ID NO: 749)
HUMCACH1A_PEA_1_node_116 (SEQ ID NO: 750)
HUMCACH1A_PEA_1_node_119 (SEQ ID NO: 751)
HUMCACH1A_PEA_1_node_121 (SEQ ID NO: 752)
HUMCACH1A_PEA_1_node_123 (SEQ ID NO: 753)
HUMCACH1A_PEA_1_node_125 (SEQ ID NO: 754)
HUMCACH1A_PEA_1_node_128 (SEQ ID NO: 755)
HUMCACH1A_PEA_1_node_0 (SEQ ID NO: 756)
HUMCACH1A_PEA_1_node_3 (SEQ ID NO: 757)
HUMCACH1A_PEA_1_node_7 (SEQ ID NO: 758)
HUMCACH1A_PEA_1_node_23 (SEQ ID NO: 759)
HUMCACH1A_PEA_1_node_26 (SEQ ID NO: 760)
HUMCACH1A_PEA_1_node_32 (SEQ ID NO: 761)
HUMCACH1A_PEA_1_node_35 (SEQ ID NO: 762)
HUMCACH1A_PEA_1_node_37 (SEQ ID NO: 763)
HUMCACH1A_PEA_1_node_39 (SEQ ID NO: 764)
HUMCACH1A_PEA_1_node_49 (SEQ ID NO: 765)
HUMCACH1A_PEA_1_node_51 (SEQ ID NO: 766)
HUMCACH1A_PEA_1_node_53 (SEQ ID NO: 767)
HUMCACH1A_PEA_1_node_58 (SEQ ID NO: 768)
HUMCACH1A_PEA_1_node_60 (SEQ ID NO: 769)
HUMCACH1A_PEA_1_node_62 (SEQ ID NO: 770)
HUMCACH1A_PEA_1_node_64 (SEQ ID NO: 771)
HUMCACH1A_PEA_1_node_66 (SEQ ID NO: 772)
HUMCACH1A_PEA_1_node_68 (SEQ ID NO: 773)
HUMCACH1A_PEA_1_node_76 (SEQ ID NO: 774)
HUMCACH1A_PEA_1_node_77 (SEQ ID NO: 775)
HUMCACH1A_PEA_1_node_79 (SEQ ID NO: 776)
HUMCACH1A_PEA_1_node_81 (SEQ ID NO: 777)
HUMCACH1A_PEA_1_node_84 (SEQ ID NO: 778)
HUMCACH1A_PEA_1_node_88 (SEQ ID NO: 779)
HUMCACH1A_PEA_1_node_90 (SEQ ID NO: 780)
HUMCACH1A_PEA_1_node_96 (SEQ ID NO: 781)
HUMCACH1A_PEA_1_node_98 (SEQ ID NO: 782)
HUMCACH1A_PEA_1_node_100 (SEQ ID NO: 783)
HUMCACH1A_PEA_1_node_101 (SEQ ID NO: 784)
HUMCACH1A_PEA_1_node_107 (SEQ ID NO: 785)
HUMCACH1A_PEA_1_node_111 (SEQ ID NO: 786)
HUMCACH1A_PEA_1_node_117 (SEQ ID NO: 787)
HUMCACH1A_PEA_1_node_124 (SEQ ID NO: 788)
HUMCACH1A_PEA_1_node_126 (SEQ ID NO: 789)

[0490] According to preferred embodiments of the present invention, there is provided an isolated polypeptide comprising an amino acid sequence in the table below:

Protein Name

HUMCACH1A_PEA_1_P2 (SEQ ID NO: 792)
HUMCACH1A_PEA_1_P3 (SEQ ID NO: 793)
HUMCACH1A_PEA_1_P4 (SEQ ID NO: 794)
HUMCACH1A_PEA_1_P5 (SEQ ID NO: 795)
HUMCACH1A_PEA_1_P7 (SEQ ID NO: 796)
HUMCACH1A_PEA_1_P8 (SEQ ID NO: 797)
HUMCACH1A_PEA_1_P9 (SEQ ID NO: 798)
HUMCACH1A_PEA_1_P10 (SEQ ID NO: 799)
HUMCACH1A_PEA_1_P11 (SEQ ID NO: 800)
HUMCACH1A_PEA_1_P12 (SEQ ID NO: 801)
HUMCACH1A_PEA_1_P13 (SEQ ID NO: 802)
HUMCACH1A_PEA_1_P14 (SEQ ID NO: 803)
HUMCACH1A_PEA_1_P15 (SEQ ID NO: 804)
HUMCACH1A_PEA_1_P17 (SEQ ID NO: 805)

[0491] According to preferred embodiments of the present invention, there is provided an isolated polynucleotide comprising a nucleic acid sequence in the table below and/or:

Transcript Name

HUMCEA_PEA_1_T8 (SEQ ID NO: 806)
HUMCEA_PEA_1_T9 (SEQ ID NO: 807)
HUMCEA_PEA_1_T12 (SEQ ID NO: 808)
HUMCEA_PEA_1_T14 (SEQ ID NO: 809)
HUMCEA_PEA_1_T16 (SEQ ID NO: 810)
HUMCEA_PEA_1_T20 (SEQ ID NO: 811)
HUMCEA_PEA_1_T25 (SEQ ID NO: 812)
HUMCEA_PEA_1_T26 (SEQ ID NO: 813)
HUMCEA_PEA_1_T29 (SEQ ID NO: 814)
HUMCEA_PEA_1_T30 (SEQ ID NO: 815)

[0492] a nucleic acid sequence comprising a sequence in the table below:

Segment Name

HUMCEA_PEA_1_node_0 (SEQ ID NO: 816)
HUMCEA_PEA_1_node_2 (SEQ ID NO: 817)
HUMCEA_PEA_1_node_6 (SEQ ID NO: 818)
HUMCEA_PEA_1_node_11 (SEQ ID NO: 819)
HUMCEA_PEA_1_node_12 (SEQ ID NO: 820)
HUMCEA_PEA_1_node_31 (SEQ ID NO: 821)
HUMCEA_PEA_1_node_36 (SEQ ID NO: 822)
HUMCEA_PEA_1_node_42 (SEQ ID NO: 823)
HUMCEA_PEA_1_node_43 (SEQ ID NO: 824)
HUMCEA_PEA_1_node_44 (SEQ ID NO: 825)
HUMCEA_PEA_1_node_46 (SEQ ID NO: 826)
HUMCEA_PEA_1_node_48 (SEQ ID NO: 827)
HUMCEA_PEA_1_node_63 (SEQ ID NO: 828)
HUMCEA_PEA_1_node_65 (SEQ ID NO: 829)
HUMCEA_PEA_1_node_67 (SEQ ID NO: 830)
HUMCEA_PEA_1_node_3 (SEQ ID NO: 831)
HUMCEA_PEA_1_node_7 (SEQ ID NO: 832)
HUMCEA_PEA_1_node_8 (SEQ ID NO: 833)
HUMCEA_PEA_1_node_9 (SEQ ID NO: 834)
HUMCEA_PEA_1_node_10 (SEQ ID NO: 835)
HUMCEA_PEA_1_node_15 (SEQ ID NO: 836)
HUMCEA_PEA_1_node_16 (SEQ ID NO: 837)
HUMCEA_PEA_1_node_17 (SEQ ID NO: 838)
HUMCEA_PEA_1_node_18 (SEQ ID NO: 839)
HUMCEA_PEA_1_node_19 (SEQ ID NO: 840)
HUMCEA_PEA_1_node_20 (SEQ ID NO: 841)
HUMCEA_PEA_1_node_21 (SEQ ID NO: 842)
HUMCEA_PEA_1_node_22 (SEQ ID NO: 843)
HUMCEA_PEA_1_node_23 (SEQ ID NO: 844)
HUMCEA_PEA_1_node_24 (SEQ ID NO: 845)
HUMCEA_PEA_1_node_27 (SEQ ID NO: 846)
HUMCEA_PEA_1_node_29 (SEQ ID NO: 847)
HUMCEA_PEA_1_node_30 (SEQ ID NO: 848)
HUMCEA_PEA_1_node_33 (SEQ ID NO: 849)
HUMCEA_PEA_1_node_34 (SEQ ID NO: 850)
HUMCEA_PEA_1_node_35 (SEQ ID NO: 851)
HUMCEA_PEA_1_node_45 (SEQ ID NO: 852)
HUMCEA_PEA_1_node_49 (SEQ ID NO: 853)
HUMCEA_PEA_1_node_50 (SEQ ID NO: 854)
HUMCEA_PEA_1_node_51 (SEQ ID NO: 855)
HUMCEA_PEA_1_node_56 (SEQ ID NO: 856)
HUMCEA_PEA_1_node_57 (SEQ ID NO: 857)
HUMCEA_PEA_1_node_58 (SEQ ID NO: 858)
HUMCEA_PEA_1_node_60 (SEQ ID NO: 859)
HUMCEA_PEA_1_node_61 (SEQ ID NO: 860)
HUMCEA_PEA_1_node_62 (SEQ ID NO: 861)
HUMCEA_PEA_1_node_64 (SEQ ID NO: 862)

[0493] According to preferred embodiments of the present invention, there is provided an isolated polypeptide comprising an amino acid sequence in the table below:

Protein Name

HUMCEA_PEA_1_P4 (SEQ ID NO: 864)
HUMCEA_PEA_1_P5 (SEQ ID NO: 865)
HUMCEA_PEA_1_P7 (SEQ ID NO: 866)
HUMCEA_PEA_1_P10 (SEQ ID NO: 867)
HUMCEA_PEA_1_P14 (SEQ ID NO: 868)
HUMCEA_PEA_1_P19 (SEQ ID NO: 869)
HUMCEA_PEA_1_P20 (SEQ ID NO: 870)

[0494] According to preferred embodiments of the present invention, there is provided an isolated polynucleotide comprising a nucleic acid sequence in the table below and/or:

Transcript Name

M78035_T0 (SEQ ID NO: 871)
M78035_T3 (SEQ ID NO: 872)
M78035_T4 (SEQ ID NO: 873)
M78035_T7 (SEQ ID NO: 874)
M78035_T9 (SEQ ID NO: 875)
M78035_T11 (SEQ ID NO: 876)
M78035_T17 (SEQ ID NO: 877)
M78035_T18 (SEQ ID NO: 878)
M78035_T19 (SEQ ID NO: 879)
M78035_T20 (SEQ ID NO: 880)
M78035_T27 (SEQ ID NO: 881)
M78035_T28 (SEQ ID NO: 882)

[0495] a nucleic acid sequence comprising a sequence in the table below:

Segment Name

M78035_node_4 (SEQ ID NO: 883)
M78035_node_6 (SEQ ID NO: 884)
M78035_node_10 (SEQ ID NO: 885)
M78035_node_17 (SEQ ID NO: 886)
M78035_node_18 (SEQ ID NO: 887)
M78035_node_21 (SEQ ID NO: 888)
M78035_node_25 (SEQ ID NO: 889)
M78035_node_33 (SEQ ID NO: 890)
M78035_node_55 (SEQ ID NO: 891)
M78035_node_58 (SEQ ID NO: 892)
M78035_node_60 (SEQ ID NO: 893)
M78035_node_62 (SEQ ID NO: 894)
M78035_node_63 (SEQ ID NO: 895)
M78035_node_64 (SEQ ID NO: 896)
M78035_node_65 (SEQ ID NO: 897)
M78035_node_69 (SEQ ID NO: 898)
M78035_node_71 (SEQ ID NO: 899)
M78035_node_14 (SEQ ID NO: 900)
M78035_node_15 (SEQ ID NO: 901)
M78035_node_20 (SEQ ID NO: 902)
M78035_node_24 (SEQ ID NO: 903)
M78035_node_26 (SEQ ID NO: 904)
M78035_node_28 (SEQ ID NO: 905)
M78035_node_29 (SEQ ID NO: 906)
M78035_node_30 (SEQ ID NO: 907)
M78035_node_31 (SEQ ID NO: 908)
M78035_node_34 (SEQ ID NO: 909)
M78035_node_35 (SEQ ID NO: 910)
M78035_node_37 (SEQ ID NO: 911)
M78035_node_40 (SEQ ID NO: 912)
M78035_node_48 (SEQ ID NO: 913)
M78035_node_49 (SEQ ID NO: 914)
M78035_node_50 (SEQ ID NO: 915)
M78035_node_52 (SEQ ID NO: 916)
M78035_node_53 (SEQ ID NO: 917)
M78035_node_54 (SEQ ID NO: 918)
M78035_node_56 (SEQ ID NO: 919)
M78035_node_57 (SEQ ID NO: 920)
M78035_node_59 (SEQ ID NO: 921)

[0496] According to preferred embodiments of the present invention, there is provided an isolated polypeptide comprising an amino acid sequence in the table below:

Protein Name

M78035_P2 (SEQ ID NO: 923)
M78035_P4 (SEQ ID NO: 924)
M78035_P6 (SEQ ID NO: 925)
M78035_P8 (SEQ ID NO: 926)
M78035_P18 (SEQ ID NO: 927)
M78035_P19 (SEQ ID NO: 928)

[0497] According to preferred embodiments of the present invention, there is provided an isolated polynucleotide comprising a nucleic acid sequence in the table below and/or:

Transcript Name

R30650_PEA_2_T2 (SEQ ID NO: 929)
R30650_PEA_2_T3 (SEQ ID NO: 930)
R30650_PEA_2_T6 (SEQ ID NO: 931)
R30650_PEA_2_T14 (SEQ ID NO: 932)
R30650_PEA_2_T15 (SEQ ID NO: 933)
R30650_PEA_2_T18 (SEQ ID NO: 934)
R30650_PEA_2_T21 (SEQ ID NO: 935)
R30650_PEA_2_T23 (SEQ ID NO: 936)

[0498] a nucleic acid sequence comprising a sequence in the table below:

Segment Name

R30650_PEA_2_node_0 (SEQ ID NO: 937)
R30650_PEA_2_node_1 (SEQ ID NO: 938)
R30650_PEA_2_node_3 (SEQ ID NO: 939)
R30650_PEA_2_node_5 (SEQ ID NO: 940)
R30650_PEA_2_node_9 (SEQ ID NO: 941)
R30650_PEA_2_node_11 (SEQ ID NO: 942)
R30650_PEA_2_node_14 (SEQ ID NO: 943)
R30650_PEA_2_node_20 (SEQ ID NO: 944)
R30650_PEA_2_node_22 (SEQ ID NO: 945)
R30650_PEA_2_node_24 (SEQ ID NO: 946)
R30650_PEA_2_node_26 (SEQ ID NO: 947)
R30650_PEA_2_node_32 (SEQ ID NO: 948)
R30650_PEA_2_node_34 (SEQ ID NO: 949)
R30650_PEA_2_node_36 (SEQ ID NO: 950)
R30650_PEA_2_node_37 (SEQ ID NO: 951)
R30650_PEA_2_node_39 (SEQ ID NO: 952)
R30650_PEA_2_node_41 (SEQ ID NO: 953)
R30650_PEA_2_node_42 (SEQ ID NO: 954)
R30650_PEA_2_node_44 (SEQ ID NO: 955)
R30650_PEA_2_node_46 (SEQ ID NO: 956)
R30650_PEA_2_node_50 (SEQ ID NO: 957)
R30650_PEA_2_node_56 (SEQ ID NO: 958)
R30650_PEA_2_node_60 (SEQ ID NO: 959)
R30650_PEA_2_node_63 (SEQ ID NO: 960)
R30650_PEA_2_node_67 (SEQ ID NO: 961)
R30650_PEA_2_node_70 (SEQ ID NO: 962)
R30650_PEA_2_node_72 (SEQ ID NO: 963)
R30650_PEA_2_node_73 (SEQ ID NO: 964)
R30650_PEA_2_node_75 (SEQ ID NO: 965)
R30650_PEA_2_node_79 (SEQ ID NO: 966)
R30650_PEA_2_node_86 (SEQ ID NO: 967)
R30650_PEA_2_node_87 (SEQ ID NO: 968)
R30650_PEA_2_node_89 (SEQ ID NO: 969)
R30650_PEA_2_node_93 (SEQ ID NO: 970)
R30650_PEA_2_node_8 (SEQ ID NO: 971)
R30650_PEA_2_node_17 (SEQ ID NO: 972)
R30650_PEA_2_node_28 (SEQ ID NO: 973)
R30650_PEA_2_node_31 (SEQ ID NO: 974)
R30650_PEA_2_node_48 (SEQ ID NO: 975)
R30650_PEA_2_node_53 (SEQ ID NO: 976)
R30650_PEA_2_node_58 (SEQ ID NO: 977)
R30650_PEA_2_node_68 (SEQ ID NO: 978)
R30650_PEA_2_node_77 (SEQ ID NO: 979)
R30650_PEA_2_node_82 (SEQ ID NO: 980)
R30650_PEA_2_node_85 (SEQ ID NO: 981)
R30650_PEA_2_node_88 (SEQ ID NO: 982)
R30650_PEA_2_node_90 (SEQ ID NO: 983)
R30650_PEA_2_node_91 (SEQ ID NO: 984)
R30650_PEA_2_node_92 (SEQ ID NO: 985)

[0499] According to preferred embodiments of the present invention, there is provided an isolated polypeptide comprising an amino acid sequence in the table below:

Protein Name

R30650_PEA_2_P4 (SEQ ID NO: 991)
R30650_PEA_2_P5 (SEQ ID NO: 992)
R30650_PEA_2_P8 (SEQ ID NO: 993)
R30650_PEA_2_P12 (SEQ ID NO: 994)
R30650_PEA_2_P13 (SEQ ID NO: 995)
R30650_PEA_2_P15 (SEQ ID NO: 996)
R30650_PEA_2_P17 (SEQ ID NO: 997)

[0500] According to preferred embodiments of the present invention, there is provided an isolated polynucleotide comprising a nucleic acid sequence in the table below and/or:

Transcript Name

T23657_T0 (SEQ ID NO: 998)
T23657_T1 (SEQ ID NO: 999)
T23657_T2 (SEQ ID NO: 1000)
T23657_T3 (SEQ ID NO: 1001)
T23657_T4 (SEQ ID NO: 1002)
T23657_T5 (SEQ ID NO: 1003)
T23657_T6 (SEQ ID NO: 1004)
T23657_T7 (SEQ ID NO: 1005)
T23657_T8 (SEQ ID NO: 1006)
T23657_T9 (SEQ ID NO: 1007)
T23657_T10 (SEQ ID NO: 1008)
T23657_T11 (SEQ ID NO: 1009)
T23657_T12 (SEQ ID NO: 1010)
T23657_T13 (SEQ ID NO: 1011)
T23657_T14 (SEQ ID NO: 1012)
T23657_T15 (SEQ ID NO: 1013)
T23657_T16 (SEQ ID NO: 1014)
T23657_T17 (SEQ ID NO: 1015)
T23657_T19 (SEQ ID NO: 1016)
T23657_T20 (SEQ ID NO: 1017)
T23657_T21 (SEQ ID NO: 1018)
T23657_T22 (SEQ ID NO: 1019)
T23657_T23 (SEQ ID NO: 1020)
T23657_T24 (SEQ ID NO: 1021)
T23657_T28 (SEQ ID NO: 1022)
T23657_T30 (SEQ ID NO: 1023)
T23657_T31 (SEQ ID NO: 1024)
T23657_T32 (SEQ ID NO: 1025)
T23657_T35 (SEQ ID NO: 1026)
T23657_T37 (SEQ ID NO: 1027)
T23657_T38 (SEQ ID NO: 1028)

[0501] a nucleic acid sequence comprising a sequence in the table below:

Segment Name

T23657_node_2 (SEQ ID NO: 1029)
T23657_node_3 (SEQ ID NO: 1030)
T23657_node_8 (SEQ ID NO: 1031)
T23657_node_16 (SEQ ID NO: 1032)
T23657_node_18 (SEQ ID NO: 1033)
T23657_node_23 (SEQ ID NO: 1034)
T23657_node_24 (SEQ ID NO: 1035)
T23657_node_27 (SEQ ID NO: 1036)
T23657_node_29 (SEQ ID NO: 1037)
T23657_node_34 (SEQ ID NO: 1038)
T23657_node_37 (SEQ ID NO: 1039)
T23657_node_38 (SEQ ID NO: 1040)
T23657_node_39 (SEQ ID NO: 1041)
T23657_node_40 (SEQ ID NO: 1042)
T23657_node_45 (SEQ ID NO: 1043)
T23657_node_46 (SEQ ID NO: 1044)
T23657_node_49 (SEQ ID NO: 1045)
T23657_node_0 (SEQ ID NO: 1046)
T23657_node_4 (SEQ ID NO: 1047)
T23657_node_6 (SEQ ID NO: 1048)
T23657_node_11 (SEQ ID NO: 1049)
T23657_node_20 (SEQ ID NO: 1050)
T23657_node_22 (SEQ ID NO: 1051)
T23657_node_25 (SEQ ID NO: 1052)
T23657_node_26 (SEQ ID NO: 1053)
T23657_node_28 (SEQ ID NO: 1054)
T23657_node_30 (SEQ ID NO: 1055)
T23657_node_31 (SEQ ID NO: 1056)
T23657_node_32 (SEQ ID NO: 1057)
T23657_node_41 (SEQ ID NO: 1058)
T23657_node_42 (SEQ ID NO: 1059)
T23657_node_43 (SEQ ID NO: 1060)
T23657_node_44 (SEQ ID NO: 1061)

[0502] According to preferred embodiments of the present invention, there is provided an isolated polypeptide comprising an amino acid sequence in the table below:

Protein Name

T23657_P1 (SEQ ID NO: 1063)
T23657_P2 (SEQ ID NO: 1064)
T23657_P3 (SEQ ID NO: 1065)
T23657_P4 (SEQ ID NO: 1066)
T23657_P5 (SEQ ID NO: 1067)
T23657_P6 (SEQ ID NO: 1068)
T23657_P7 (SEQ ID NO: 1069)
T23657_P8 (SEQ ID NO: 1070)
T23657_P9 (SEQ ID NO: 1071)
T23657_P10 (SEQ ID NO: 1072)
T23657_P11 (SEQ ID NO: 1073)
T23657_P12 (SEQ ID NO: 1074)
T23657_P16 (SEQ ID NO: 1075)
T23657_P17 (SEQ ID NO: 1076)
T23657_P19 (SEQ ID NO: 1077)
T23657_P21 (SEQ ID NO: 1078)
T23657_P22 (SEQ ID NO: 1079)
T23657_P23 (SEQ ID NO: 1080)

[0503] According to preferred embodiments of the present invention, there is provided an isolated polynucleotide comprising a nucleic acid sequence in the table below and/or:

Transcript Name

T51958_PEA_1_T4 (SEQ ID NO: 1081)
T51958_PEA_1_T5 (SEQ ID NO: 1082)
T51958_PEA_1_T6 (SEQ ID NO: 1083)
T51958_PEA_1_T8 (SEQ ID NO: 1084)
T51958_PEA_1_T12 (SEQ ID NO: 1085)
T51958_PEA_1_T16 (SEQ ID NO: 1086)
T51958_PEA_1_T33 (SEQ ID NO: 1087)
T51958_PEA_1_T35 (SEQ ID NO: 1088)
T51958_PEA_1_T37 (SEQ ID NO: 1089)
T51958_PEA_1_T39 (SEQ ID NO: 1090)
T51958_PEA_1_T40 (SEQ ID NO: 1091)
T51958_PEA_1_T41 (SEQ ID NO: 1092)

[0504] a nucleic acid sequence comprising a sequence in the table below:

Segment Name

T51958_PEA_1_node_0 (SEQ ID NO: 1093)
T51958_PEA_1_node_7 (SEQ ID NO: 1094)
T51958_PEA_1_node_8 (SEQ ID NO: 1095)
T51958_PEA_1_node_9 (SEQ ID NO: 1096)
T51958_PEA_1_node_14 (SEQ ID NO: 1097)
T51958_PEA_1_node_16 (SEQ ID NO: 1098)
T51958_PEA_1_node_18 (SEQ ID NO: 1099)
T51958_PEA_1_node_21 (SEQ ID NO: 1100)
T51958_PEA_1_node_22 (SEQ ID NO: 1101)
T51958_PEA_1_node_24 (SEQ ID NO: 1102)
T51958_PEA_1_node_27 (SEQ ID NO: 1103)
T51958_PEA_1_node_29 (SEQ ID NO: 1104)
T51958_PEA_1_node_33 (SEQ ID NO: 1105)
T51958_PEA_1_node_40 (SEQ ID NO: 1106)
T51958_PEA_1_node_41 (SEQ ID NO: 1107)
T51958_PEA_1_node_46 (SEQ ID NO: 1108)
T51958_PEA_1_node_51 (SEQ ID NO: 1109)
T51958_PEA_1_node_55 (SEQ ID NO: 1110)
T51958_PEA_1_node_67 (SEQ ID NO: 1111)
T51958_PEA_1_node_70 (SEQ ID NO: 1112)
T51958_PEA_1_node_74 (SEQ ID NO: 1113)
T51958_PEA_1_node_78 (SEQ ID NO: 1114)
T51958_PEA_1_node_11 (SEQ ID NO: 1115)
T51958_PEA_1_node_15 (SEQ ID NO: 1116)
T51958_PEA_1_node_20 (SEQ ID NO: 1117)
T51958_PEA_1_node_26 (SEQ ID NO: 1118)
T51958_PEA_1_node_35 (SEQ ID NO: 1119)
T51958_PEA_1_node_36 (SEQ ID NO: 1120)
T51958_PEA_1_node_38 (SEQ ID NO: 1121)
T51958_PEA_1_node_39 (SEQ ID NO: 1122)
T51958_PEA_1_node_42 (SEQ ID NO: 1123)
T51958_PEA_1_node_43 (SEQ ID NO: 1124)
T51958_PEA_1_node_44 (SEQ ID NO: 1125)
T51958_PEA_1_node_45 (SEQ ID NO: 1126)
T51958_PEA_1_node_47 (SEQ ID NO: 1127)
T51958_PEA_1_node_48 (SEQ ID NO: 1128)
T51958_PEA_1_node_49 (SEQ ID NO: 1129)
T51958_PEA_1_node_50 (SEQ ID NO: 1130)
T51958_PEA_1_node_54 (SEQ ID NO: 1131)
T51958_PEA_1_node_61 (SEQ ID NO: 1132)
T51958_PEA_1_node_71 (SEQ ID NO: 1133)
T51958_PEA_1_node_72 (SEQ ID NO: 1134)
T51958_PEA_1_node_75 (SEQ ID NO: 1135)
T51958_PEA_1_node_76 (SEQ ID NO: 1136)
T51958_PEA_1_node_77 (SEQ ID NO: 1137)
T51958_PEA_1_node_80 (SEQ ID NO: 1138)
T51958_PEA_1_node_82 (SEQ ID NO: 1139)
T51958_PEA_1_node_84 (SEQ ID NO: 1140)

[0505] According to preferred embodiments of the present invention, there is provided an isolated polypeptide comprising an amino acid sequence in the table below:

Protein Name

T51958_PEA_1_P5 (SEQ ID NO: 1151)
T51958_PEA_1_P6 (SEQ ID NO: 1152)
T51958_PEA_1_P28 (SEQ ID NO: 1153)
T51958_PEA_1_P30 (SEQ ID NO: 1154)
T51958_PEA_1_P34 (SEQ ID NO: 1155)
T51958_PEA_1_P35 (SEQ ID NO: 1156)

[0506] According to preferred embodiments of the present invention, there is provided an isolated polynucleotide comprising a nucleic acid sequence in the table below and/or:

Transcript Name

Z17877_PEA_1_T0 (SEQ ID NO: 1157)
Z17877_PEA_1_T2 (SEQ ID NO: 1158)
Z17877_PEA_1_T3 (SEQ ID NO: 1159)
Z17877_PEA_1_T4 (SEQ ID NO: 1160)
Z17877_PEA_1_T6 (SEQ ID NO: 1161)
Z17877_PEA_1_T7 (SEQ ID NO: 1162)
Z17877_PEA_1_T8 (SEQ ID NO: 1163)
Z17877_PEA_1_T11 (SEQ ID NO: 1164)
Z17877_PEA_1_T12 (SEQ ID NO: 1165)

[0507] a nucleic acid sequence comprising a sequence in the table below:

Segment Name

Z17877_PEA_1_node_0 (SEQ ID NO: 1166)
Z17877_PEA_1_node_3 (SEQ ID NO: 1167)
Z17877_PEA_1_node_8 (SEQ ID NO: 1168)
Z17877_PEA_1_node_9 (SEQ ID NO: 1169)
Z17877_PEA_1_node_10 (SEQ ID NO: 1170)
Z17877_PEA_1_node_11 (SEQ ID NO: 1171)
Z17877_PEA_1_node_13 (SEQ ID NO: 1172)
Z17877_PEA_1_node_15 (SEQ ID NO: 1173)
Z17877_PEA_1_node_16 (SEQ ID NO: 1174)
Z17877_PEA_1_node_18 (SEQ ID NO: 1175)
Z17877_PEA_1_node_1 (SEQ ID NO: 1176)
Z17877_PEA_1_node_2 (SEQ ID NO: 1177)
Z17877_PEA_1_node_4 (SEQ ID NO: 1178)
Z17877_PEA_1_node_5 (SEQ ID NO: 1179)
Z17877_PEA_1_node_6 (SEQ ID NO: 1180)
Z17877_PEA_1_node_14 (SEQ ID NO: 1181)
Z17877_PEA_1_node_17 (SEQ ID NO: 1182)

[0508] According to preferred embodiments of the present invention, there is provided an isolated polypeptide comprising an amino acid sequence in the table below

Protein Name

Z17877_PEA_1_P1 (SEQ ID NO: 1183)
Z17877_PEA_1_P2 (SEQ ID NO: 1184)
Z17877_PEA_1_P3 (SEQ ID NO: 1185)
Z17877_PEA_1_P6 (SEQ ID NO: 1186)

[0509] According to preferred embodiments of the present invention, there is provided an isolated polynucleotide comprising a nucleic acid sequence in the table below and/or:

Transcript Name

HSHCGI_PEA_3_T0 (SEQ ID NO: 1187)
HSHCGI_PEA_3_T1 (SEQ ID NO: 1188)
HSHCGI_PEA_3_T2 (SEQ ID NO: 1189)
HSHCGI_PEA_3_T3 (SEQ ID NO: 1190)
HSHCGI_PEA_3_T4 (SEQ ID NO: 1191)
HSHCGI_PEA_3_T5 (SEQ ID NO: 1192)
HSHCGI_PEA_3_T6 (SEQ ID NO: 1193)
HSHCGI_PEA_3_T7 (SEQ ID NO: 1194)
HSHCGI_PEA_3_T8 (SEQ ID NO: 1195)
HSHCGI_PEA_3_T9 (SEQ ID NO: 1196)
HSHCGI_PEA_3_T10 (SEQ ID NO: 1197)
HSHCGI_PEA_3_T11 (SEQ ID NO: 1198)
HSHCGI_PEA_3_T12 (SEQ ID NO: 1199)
HSHCGI_PEA_3_T13 (SEQ ID NO: 1200)
HSHCGI_PEA_3_T14 (SEQ ID NO: 1201)
HSHCGI_PEA_3_T15 (SEQ ID NO: 1202)
HSHCGI_PEA_3_T17 (SEQ ID NO: 1203)
HSHCGI_PEA_3_T18 (SEQ ID NO: 1204)
HSHCGI_PEA_3_T19 (SEQ ID NO: 1205)
HSHCGI_PEA_3_T20 (SEQ ID NO: 1206)
HSHCGI_PEA_3_T21 (SEQ ID NO: 1207)
HSHCGI_PEA_3_T22 (SEQ ID NO: 1208)
HSHCGI_PEA_3_T23 (SEQ ID NO: 1209)
HSHCGI_PEA_3_T24 (SEQ ID NO: 1210)

[0510] a nucleic acid sequence comprising a sequence in the table below:

Segment Name

HSHCGI_PEA_3_node_0 (SEQ ID NO: 1211)
HSHCGI_PEA_3_node_2 (SEQ ID NO: 1212)
HSHCGI_PEA_3_node_7 (SEQ ID NO: 1213)
HSHCGI_PEA_3_node_8 (SEQ ID NO: 1214)
HSHCGI_PEA_3_node_14 (SEQ ID NO: 1215)
HSHCGI_PEA_3_node_16 (SEQ ID NO: 1216)
HSHCGI_PEA_3_node_18 (SEQ ID NO: 1217)
HSHCGI_PEA_3_node_20 (SEQ ID NO: 1218)
HSHCGI_PEA_3_node_26 (SEQ ID NO: 1219)
HSHCGI_PEA_3_node_28 (SEQ ID NO: 1220)
HSHCGI_PEA_3_node_30 (SEQ ID NO: 1221)
HSHCGI_PEA_3_node_32 (SEQ ID NO: 1222)
HSHCGI_PEA_3_node_33 (SEQ ID NO: 1223)
HSHCGI_PEA_3_node_34 (SEQ ID NO: 1224)
HSHCGI_PEA_3_node_36 (SEQ ID NO: 1225)
HSHCGI_PEA_3_node_1 (SEQ ID NO: 1226)
HSHCGI_PEA_3_node_4 (SEQ ID NO: 1227)
HSHCGI_PEA_3_node_6 (SEQ ID NO: 1228)
HSHCGI_PEA_3_node_9 (SEQ ID NO: 1229)
HSHCGI_PEA_3_node_11 (SEQ ID NO: 1230)
HSHCGI_PEA_3_node_13 (SEQ ID NO: 1231)
HSHCGI_PEA_3_node_19 (SEQ ID NO: 1232)
HSHCGI_PEA_3_node_21 (SEQ ID NO: 1233)
HSHCGI_PEA_3_node_22 (SEQ ID NO: 1234)
HSHCGI_PEA_3_node_23 (SEQ ID NO: 1235)
HSHCGI_PEA_3_node_24 (SEQ ID NO: 1236)
HSHCGI_PEA_3_node_27 (SEQ ID NO: 1237)
HSHCGI_PEA_3_node_31 (SEQ ID NO: 1238)
HSHCGI_PEA_3_node_35 (SEQ ID NO: 1239)

[0511] According to preferred embodiments of the present invention, there is provided an isolated polypeptide comprising an amino acid sequence in the table below:

Protein Name

HSHCGI_PEA_3_P17 (SEQ ID NO: 1243)
HSHCGI_PEA_3_P18 (SEQ ID NO: 1244)
HSHCGI_PEA_3_P19 (SEQ ID NO: 1245)
HSHCGI_PEA_3_P1 (SEQ ID NO: 1246)
HSHCGI_PEA_3_P4 (SEQ ID NO: 1247)
HSHCGI_PEA_3_P6 (SEQ ID NO: 1248)
HSHCGI_PEA_3_P7 (SEQ ID NO: 1249)
HSHCGI_PEA_3_P8 (SEQ ID NO: 1250)
HSHCGI_PEA_3_P9 (SEQ ID NO: 1251)
HSHCGI_PEA_3_P12 (SEQ ID NO: 1252)
HSHCGI_PEA_3_P13 (SEQ ID NO: 1253)
HSHCGI_PEA_3_P14 (SEQ ID NO: 1254)
HSHCGI_PEA_3_P15 (SEQ ID NO: 1255)
HSHCGI_PEA_3_P16 (SEQ ID NO: 1256)
HSHCGI_PEA_3_P20 (SEQ ID NO: 1257)
HSHCGI_PEA_3_P21 (SEQ ID NO: 1258)
HSHCGI_PEA_3_P22 (SEQ ID NO: 1259)

[0512] According to preferred embodiments of the present invention, there is provided an isolated chimeric polypeptide encoding for HSHCGI_PEA_{—}3_P17 (SEQ ID NO:1243), comprising a first amino acid sequence being at least 90% homologous to MASGQFVNKLQEEVICPICLDILQKPVTIDCGHNFCPQCITQIGETSCGFFKCPLCKTSVRRDAIRFNSLLRNL VEKIQALQASEVQSKRKEATCPRHQEMFHYFCEDDGKFLCFVCRESKDHKSHNVSLIEEAAQNYQGQIQEQ IQVLQQKEKETVQVKAQGVHRVDVFTDQVEHEKQRILTEFELLHQVLEEEKNFLLSRIYWLGHEGTEAGKH YV corresponding to amino acids 1-218 of TM31_HUMAN (SEQ ID NO:1242), which also corresponds to amino acids 1-218 of HSHCGI_PEA_{—}3_P17 (SEQ ID NO:1243), and a second amino acid sequence being at least 70%, optionally at least 80%, preferably at least 85%, more preferably at least 90% and most preferably at least 95% homologous to a polypeptide having the sequence EIPLMPTVERSQEARCYP (SEQ ID NO:1442) corresponding to amino acids 219-236 of HSHCGI_PEA_{—}3_P17 (SEQ ID NO:1243), wherein said first amino acid sequence and second amino acid sequence are contiguous and in a sequential order.

[0513] According to preferred embodiments of the present invention, there is provided an isolated polypeptide encoding for a tail of HSHCGI_PEA_{—}3_P17 (SEQ ID NO:1243), comprising a polypeptide being at least 70%, optionally at least about 80%, preferably at least about 85%, more preferably at least about 90% and most preferably at least about 95% homologous to the sequence EIPLMPTVERSQEARCYP (SEQ ID NO:1442) in HSHCGI_PEA_{—}3_P17 (SEQ ID NO:1243).

[0514] According to preferred embodiments of the present invention, there is provided an isolated chimeric polypeptide encoding for HSHCGI_PEA_{—}3_P19 (SEQ ID NO:1245), comprising a first amino acid sequence being at least 90% homologous to MASGQFVNKLQEEVICPICLDILQKPVTIDCGHNFCLKCITQIGETSCGFFKCPLCKTSVRRDAIRFNSLLRNL VEKIQALQASEVQSKRKEATCPRHQEMFHYFCEDDGKFLCFVCRESKDHKSHNVSLIEEAAQNYQGQIQEQ IQVLQQKEKETVQVKAQGVHRVDVFTDQVEHEKQRILTEFELLHQVLEEEKNFLLSRIYWLGHEGTEAGKH YVASTEPQLNDLKKLVDSLKTKQNMPPRQLLE corresponding to amino acids 1-248 of TM31_HUMAN (SEQ ID NO:1242)_V2 (SEQ ID NO:1241), which also corresponds to amino acids 1-248 of HSHCGI_PEA_{—}3_P19 (SEQ ID NO:1245), and a second amino acid sequence being at least 70%, optionally at least 80%, preferably at least 85%, more preferably at least 90% and most preferably at least 95% homologous to a polypeptide having the sequence NWRKNSVKQNQDTTPSQGA (SEQ ID NO:1443) corresponding to amino acids 249-267 of HSHCGI_PEA_{—}3_P19 (SEQ ID NO:1245), wherein said first amino acid sequence and second amino acid sequence are contiguous and in a sequential order.

[0515] According to preferred embodiments of the present invention, there is provided an isolated polypeptide encoding for a tail of HSHCGI_PEA_{—}3_P19 (SEQ ID NO:1245), comprising a polypeptide being at least 70%, optionally at least about 80%, preferably at least about 85%, more preferably at least about 90% and most preferably at least about 95% homologous to the sequence NWRKNSVKQNQDTTPSQGA (SEQ ID NO:1443) in HSHCGI_PEA_{—}3_P19 (SEQ ID NO:1245).

[0516] According to preferred embodiments of the present invention, there is provided an isolated chimeric polypeptide encoding for HSHCGI_PEA_{—}3_P4 (SEQ ID NO:1247), comprising a first amino acid sequence being at least 90% homologous to MASGQFVNKLQEEVICPICLDILQKPVTIDCGHNFCLKCITQIGETSCGFFKCPLCKTSVRKNAIRFNSLLRNL VEKIQALQASEVQSKRKEATCPRHQEMFHYFCEDDGKFLCFVCRESKDHKSHNVSLIEEAAQNYQGQIQEQ IQVLQQKEKETVQVKAQGVHRVDVFTDQVEHEKQRILTEFELLHQVLEEEKNFLLSRIYWLGHEGTEAGKH YVASTEPQLNDLKKLVDSLKTKQNMPPRQLLEDIKVVLCR corresponding to amino acids 1-256 of TM31_HUMAN_V1 (SEQ ID NO:1240), which also corresponds to amino acids 1-256 of HSHCGI_PEA_{—}3_P4 (SEQ ID NO:1247), and a second amino acid sequence being at least 70%, optionally at least 80%, preferably at least 85%, more preferably at least 90% and most preferably at least 95% homologous to a polypeptide having the sequence YDGPPQMYFAY (SEQ ID NO:1444) corresponding to amino acids 257-267 of HSHCGI_PEA_{—}3_P4 (SEQ ID NO:1247), wherein said first amino acid sequence and second amino acid sequence are contiguous and in a sequential order.

[0517] According to preferred embodiments of the present invention, there is provided an isolated polypeptide encoding for a tail of HSHCGI_PEA_{—}3_P4 (SEQ ID NO:1247), comprising a polypeptide being at least 70%, optionally at least about 80%, preferably at least about 85%, more preferably at least about 90% and most preferably at least about 95% homologous to the sequence YDGPPQMYFAY (SEQ ID NO:1444) in HSHCGI_PEA_{—}3_P4 (SEQ ID NO:1247).

[0518] According to preferred embodiments of the present invention, there is provided an isolated chimeric polypeptide encoding for HSHCGI_PEA_{—}3_P6 (SEQ ID NO:1248), comprising a first amino acid sequence being at least 90% homologous to MASGQFVNKLQEEVICPICLDILQKPVTIDCGHNFCLKCITQIGETSCGFFKCPLCKTSVRKNAIRFNSLLRNL VEKIQALQASEVQSKRKEATCPRHQEMFHYFCEDDGKFLCFVCRESKDHKSHNVSLIEEAAQNYQGQIQEQ IQVLQQKEKETVQVKAQGVHRVDVFTDQVEHEKQRILTEFELLHQVLEEEKNFLLSRIYWLGHEGTEAGKH YVASTEPQLNDLKKLVDSLKTKQNMPPRQLLEDIKVVLCR corresponding to amino acids 1-256 of TM31_HUMAN_V1 (SEQ ID NO:1240), which also corresponds to amino acids 1-256 of HSHCGI_PEA_{—}3_P6 (SEQ ID NO:1248), and a second amino acid sequence being at least 70%, optionally at least 80%, preferably at least 85%, more preferably at least 90% and most preferably at least 95% homologous to a polypeptide having the sequence PTPG (SEQ ID NO:1445) corresponding to amino acids 257-260 of HSHCGI_PEA_{—}3_P6 (SEQ ID NO:1248), wherein said first amino acid sequence and second amino acid sequence are contiguous and in a sequential order.

[0519] According to preferred embodiments of the present invention, there is provided an isolated polypeptide encoding for a tail of HSHCGI_PEA_{—}3_P6 (SEQ ID NO:1248), comprising a polypeptide being at least 70%, optionally at least about 80%, preferably at least about 85%, more preferably at least about 90% and most preferably at least about 95% homologous to the sequence PTPG (SEQ ID NO:1445) in HSHCGI_PEA_{—}3_P6 (SEQ ID NO:1248).

[0520] According to preferred embodiments of the present invention, there is provided an isolated chimeric polypeptide encoding for HSHCGI_PEA_{—}3_P7 (SEQ ID NO:1249), comprising a first amino acid sequence being at least 90% homologous to MASGQFVNKLQEEVICPICLDILQKPVTIDCGHNFCLKCITQIGETSCGFFKCPLCKTSVRKNAIRFNSLLRNL VEKIQALQASEVQSKRKEATCPRHQEMFHYFCEDDGKFLCFVCRESKDHKSHNVSLIEEAAQNYQGQIQEQ IQVLQQKEKETVQVKAQGVHRVDVFTDQVEHEKQRILTEFELLHQVLEEEKNFLLSRIYWLGHEGTEAGKH YVASTEPQLNDLKKLVDSLKTKQNMPPRQLLEDIKVVLCRS corresponding to amino acids 1-257 of TM31_HUMAN_V1 (SEQ ID NO:1240), which also corresponds to amino acids 1-257 of HSHCGI_PEA_{—}3_P7 (SEQ ID NO:1249), and a second amino acid sequence being at least 70%, optionally at least 80%, preferably at least 85%, more preferably at least 90% and most preferably at least 95% homologous to a polypeptide having the sequence SFSHTSSPDLTNQLNHIFLEVKSFSFSTQPLFLWNWRKNSVKQNQDTTPSQGA (SEQ ID NO:1446) corresponding to amino acids 258-310 of HSHCGI_PEA_{—}3_P7 (SEQ ID NO:1249), wherein said first amino acid sequence and second amino acid sequence are contiguous and in a sequential order.

[0521] According to preferred embodiments of the present invention, there is provided an isolated polypeptide encoding for a tail of HSHCGI_PEA_{—}3_P7 (SEQ ID NO:1249), comprising a polypeptide being at least 70%, optionally at least about 80%, preferably at least about 85%, more preferably at least about 90% and most preferably at least about 95% homologous to the sequence SFSHTSSPDLTNQLNHIFLEVKSFSFSTQPLFLWNWRKNSVKQNQDTTPSQGA (SEQ ID NO:1446) in HSHCGI_PEA_{—}3_P7 (SEQ ID NO:1249).

[0522] According to preferred embodiments of the present invention, there is provided an isolated chimeric polypeptide encoding for HSHCGI_PEA_{—}3_P8 (SEQ ID NO:1250), comprising a first amino acid sequence being at least 90% homologous to MASGQFVNKLQEEVICPICLDILQKPVTIDCGHNFCLKCITQIGETSCGFFKCPLCKTSVRKNAIRFNSLLRNL VEKIQALQASEVQSKRKEATCPRHQEMFHYFCEDDGKFLCFVCRESKDHKSHNVSLIEEAAQNYQGQIQEQ IQVLQQKEKETVQVKAQGVHRVDVFTDQVEHEKQRILTEFELLHQVLEEEKNFLLSRIYWLGHEGTEAGKH YVASTEPQLNDLKKLVDSLKTKQNMPPRQLLEDIKVVLCRSEEFQFLNPTPVPLELEKKLSEAKSRHDSITGS LKKFKDQLQADRKKDENRFFKSMNKNDMKSWGLLQKNNHKMNKTSEPGSSSAG corresponding to amino acids 1-342 of TM31_HUMAN_V1 (SEQ ID NO:1240), which also corresponds to amino acids 343-349 of HSHCGI_PEA_{—}3_P8 (SEQ ID NO:1250), and a second amino acid sequence being at least 70%, optionally at least 80%, preferably at least 85%, more preferably at least 90% and most preferably at least 95% homologous to a polypeptide having the sequence KSPVSEY (SEQ ID NO:1447) corresponding to amino acids 343-349 of HSHCGI_PEA_{—}3_P8 (SEQ ID NO:1250), wherein said first amino acid sequence and second amino acid sequence are contiguous and in a sequential order.

[0523] According to preferred embodiments of the present invention, there is provided an isolated polypeptide encoding for a tail of HSHCGI_PEA_{—}3_P8 (SEQ ID NO:1250), comprising a polypeptide being at least 70%, optionally at least about 80%, preferably at least about 85%, more preferably at least about 90% and most preferably at least about 95% homologous to the sequence KSPVSEY (SEQ ID NO:1447) in HSHCGI_PEA_{—}3_P8 (SEQ ID NO:1250).

[0524] According to preferred embodiments of the present invention, there is provided an isolated chimeric polypeptide encoding for HSHCGI_PEA_{—}3_P9 (SEQ ID NO:1251), comprising a first amino acid sequence being at least 90% homologous to MASGQFVNKLQEEVICPICLDILQKPVTIDCGHNFCLKCITQIGETSCGFFKCPLCKTSVRKNAIRFNSLLRNL VEKIQALQASEVQSKRKEATCPRHQEMFHYFCEDDGKFLCFVCRESKDHKSHNVSLIEEAAQNYQGQIQEQ IQVLQQKEKETVQVKAQGVHRVDVFTDQVEHEKQRILTEFELLHQVLEEEKNFLLSRIYWLGHEGTEAGKH YVASTEPQLNDLKKLVDSLKTKQNMPPRQLLEDIKVVLCR corresponding to amino acids 1-256 of TM31_HUMAN_V1 (SEQ ID NO:1240), which also corresponds to amino acids 1-256 of HSHCGI_PEA_{—}3_P9 (SEQ ID NO:1251), and a second amino acid sequence being at least 70%, optionally at least 80%, preferably at least 85%, more preferably at least 90% and most preferably at least 95% homologous to a polypeptide having the sequence TGEKTQ (SEQ ID NO:1448) corresponding to amino acids 257-262 of HSHCGI_PEA_{—}3_P9 (SEQ ID NO:1251), wherein said first amino acid sequence and second amino acid sequence are contiguous and in a sequential order.

[0525] According to preferred embodiments of the present invention, there is provided an isolated polypeptide encoding for a tail of HSHCGI_PEA_{—}3_P9 (SEQ ID NO:1251), comprising a polypeptide being at least 70%, optionally at least about 80%, preferably at least about 85%, more preferably at least about 90% and most preferably at least about 95% homologous to the sequence TGEKTQ (SEQ ID NO:1448) in HSHCGI_PEA_{—}3_P9 (SEQ ID NO:1251).

[0526] According to preferred embodiments of the present invention, there is provided an isolated chimeric polypeptide encoding for HSHCGI_PEA_{—}3_P12 (SEQ ID NO:1252), comprising a first amino acid sequence being at least 90% homologous to MNKNDMKSWGLLQKNNHKMNKTSEPGSSSAGGRTTSGPPNHHSSAPSHSLFRASSAGKVTFPVCLLASYD EISGQGASSQDTKTFDVALSEELHAALSEWLTAIRAWFCEVPSS corresponding to amino acids 312-425 of TM31_HUMAN (SEQ ID NO:1242), which also corresponds to amino acids 1-114 of HSHCGI_PEA_{—}3_P12 (SEQ ID NO:1252).

[0527] According to preferred embodiments of the present invention, there is provided an isolated chimeric polypeptide encoding for HSHCGI_PEA_{—}3_P14 (SEQ ID NO:1254), comprising a first amino acid sequence being at least 90% homologous to MASGQFVNKLQEEVICPICLDILQKPVTIDCGHNFCLKCITQIGETSCGFFKCPLCKTSVRKNAIRFNSLLRNL VEKIQALQASEVQSKRKEATCPRHQEMFHYFCEDDGKFLCFVCRESKDHKSHNVSLIEEAAQNYQGQIQEQ IQVLQQKEKETVQVKAQGVHRVDVFTDQVEHEKQRILTEFELLHQVLEEEKNFLLSRIYWLGHEGTEAGKH YVASTEPQLNDLKKLVDSLKTKQNMPPRQLLEDIKVVLCRSEEFQFLNPTPVPLELEKKLSEAKSRHDSITGS LKKFKDQLQADRKKDENRFFKSMNKNDMKS corresponding to amino acids 1-319 of TM31_HUMAN_V1 (SEQ ID NO:1240), which also corresponds to amino acids 1-319 of HSHCGI_PEA_{—}3_P14 (SEQ ID NO:1254), and a second amino acid sequence being at least 70%, optionally at least 80%, preferably at least 85%, more preferably at least 90% and most preferably at least 95% homologous to a polypeptide having the sequence CK corresponding to amino acids 320-321 of HSHCGI_PEA_{—}3_P14 (SEQ ID NO:1254), wherein said first amino acid sequence and second amino acid sequence are contiguous and in a sequential order.

[0528] According to preferred embodiments of the present invention, there is provided an isolated chimeric polypeptide encoding for HSHCGI_PEA_{—}3_P16 (SEQ ID NO:1256), comprising a first amino acid sequence being at least 90% homologous to MASGQFVNKLQEEVICPICLDILQKPVTIDCGHNFCLKCITQIGETSCGFFKCPLCKTSVRKNAIRFNSLLRNL VEKIQALQASEVQSKRKEATCPRHQEMFHYFCEDDGKFLCFVCRESKDHKSHNVSLIEEAAQNYQGQIQEQ IQVLQQKEKETVQVKAQGVHRVDVFT corresponding to amino acids 1-171 of TM31_HUMAN_V1 (SEQ ID NO:1240), which also corresponds to amino acids 1-171 of HSHCGI_PEA_{—}3_P16 (SEQ ID NO:1256), and a second amino acid sequence being at least 70%, optionally at least 80%, preferably at least 85%, more preferably at least 90% and most preferably at least 95% homologous to a polypeptide having the sequence VRKTPSHDLWKQKHLCQSSWNPLLH (SEQ ID NO:1449) corresponding to amino acids 172-196 of HSHCGI_PEA_{—}3_P16 (SEQ ID NO:1256), wherein said first amino acid sequence and second amino acid sequence are contiguous and in a sequential order.

[0529] According to preferred embodiments of the present invention, there is provided an isolated polypeptide encoding for a tail of HSHCGI_PEA_{—}3_P16 (SEQ ID NO:1256), comprising a polypeptide being at least 70%, optionally at least about 80%, preferably at least about 85%, more preferably at least about 90% and most preferably at least about 95% homologous to the sequence VRKTPSHDLWKQKHLCQSSWNPLLH (SEQ ID NO:1449) in HSHCGI_PEA_{—}3_P16 (SEQ ID NO:1256).

[0530] According to preferred embodiments of the present invention, there is provided an isolated chimeric polypeptide encoding for HSHCGI_PEA_{—}3_P21 (SEQ ID NO:1258), comprising a first amino acid sequence being at least 70%, optionally at least 80%, preferably at least 85%, more preferably at least 90% and most preferably at least 95% homologous to a polypeptide having the sequence MHHSDWGNIMWIFQMSPLQNFRKEERNQ (SEQ ID NO:1450) corresponding to amino acids 1-28 of HSHCGI_PEA_{—}3_P21 (SEQ ID NO:1258), and a second amino acid sequence being at least 90% homologous to FLCFVCRESKDHKSHNVSLIEEAAQNYQGQIQEQIQVLQQKEKETVQVKAQGVHRVDVFTDQVEHEKQRIL TEFELLHQVLEEEKNFLLSRIYWLGHEGTEAGKHYVASTEPQLNDLKKLVDSLKTKQNMPPRQLLEDIKvv LCRSEEFQFLNPTPVPLELEKKLSEAKSRHDSITGSLKKFKDQLQADRKKDENRFFKSMNKNDMKSWGLLQ KNNHKMNKTSEPGSSSAGGRTTSGPPNHHSSAPSHSLFRASSAGKVTFPVCLLASYDEISGQGASSQDTKTF DVALSEELHAALSEWLTAIRAWFCEVPSS corresponding to amino acids 112-425 of TM31_HUMAN (SEQ ID NO:1242), which also corresponds to amino acids 29-342 of HSHCGI_PEA_{—}3_P21 (SEQ ID NO:1258), wherein said first amino acid sequence and second amino acid sequence are contiguous and in a sequential order.

[0531] According to preferred embodiments of the present invention, there is provided an isolated polypeptide encoding for a head of HSHCGI_PEA_{—}3_P21 (SEQ ID NO:1258), comprising a polypeptide being at least 70%, optionally at least about 80%, preferably at least about 85%, more preferably at least about 90% and most preferably at least about 95% homologous to the sequence MHHSDWGNIMWIFQMSPLQNFRKEERNQ (SEQ ID NO:1450) of HSHCGI_PEA_{—}3_P21 (SEQ ID NO:1258).

[0532] According to preferred embodiments of the present invention, there is provided an isolated chimeric polypeptide encoding for HSHCGI_PEA_{—}3_P22 (SEQ ID NO:1259), comprising a first amino acid sequence being at least 90% homologous to MPPRQLLEDIKVVLCRSEEFQFLNPTPVPLELEKKLSEAKSRHDSITGSLKKFKDQLQADRKKDENRFFKSM NKNDMKSWGLLQKNNHKMNKTSEPGSSSAGGRTTSGPPNHHSSAPSHSLFRASSAGKVTFPVCLLASYDEI SGQGASSQDTKTFDVALSEELHAALSEWLTAIRAWFCEVPSS corresponding to amino acids 241-425 of TM31_HUMAN (SEQ ID NO:1242), which also corresponds to amino acids 1-185 of HSHCGI_PEA_{—}3_P22 (SEQ ID NO:1259).

[0533] According to preferred embodiments of the present invention, there is provided an isolated chimeric polypeptide encoding for T51958_PEA_{—}1_P5 (SEQ ID NO:1151), comprising a first amino acid sequence being at least 90% homologous to MGAARGSPARPRRLPLLSVLLLPLLGGTQTAIVFIKQPSSQDALQGRRALLRCEVEAPGPVHVYWLLDGAP VQDTERRFAQGSSLSFAAVDRLQDSGTFQCVARDDVTGEEARSANASFNIKWIEAGPVVLKHPASEAEIQPQ TQVTLRCHIDGHPRPTYQWFRDGTPLSDGQSNHTVSSKERNLTLRPAGPEHSGLYSCCAHSAFGQACSSQNF TLSIADESFARVVLAPQDVVVARYEEAMFHCQFSAQPPPSLQWLFEDETPITNRSRPPHLRRATVFANGSLLL TQVRPRNAGIYRCIGQGQRGPPIILEATLHLAEIEDMPLFEPRVFTAGSEERVTCLPPKGLPEPSVWWEHAGV RLPTHGRVYQKGHELVLANIAESDAGVYTCHAANLAGQRRQDVNITVATVPSWLKKPQDSQLEEGKPGYL DCLTQATPKPTVVWYRNQMLISEDSRFEVFKNGTLRINSVEVYDGTWYRCMSSTPAGSIEAQARVQVLEKL KFTPPPQPQQCMEFDKEATVPCSATGREKPTIKWERADGSSLPEWVTDNAGTLHFARVTRDDAGNYTCIAS NGPQGQIRAHVQLTVAVFITFKVEPERTTVYQGHTALLQCEAQGDPKPLIQWKGKDRILDPTKLGPRMHIFQ NGSLVIHDVAPEDSGRYTCIAGNSCNIKHTEAPLYVV corresponding to amino acids 1-682 of PTK7_HUMAN_V4 (SEQ ID NO:1143), which also corresponds to amino acids 1-682 of T51958_PEA_{—}1_P5 (SEQ ID NO:1151), and a second amino acid sequence being at least 70%, optionally at least 80%, preferably at least 85%, more preferably at least 90% and most preferably at least 95% homologous to a polypeptide having the sequence GMGWGGLCCTGSGGPRRLSPCTQPLCTEHGTEAIFVAAVGIRPSHHAAAQS (SEQ ID NO:1451) corresponding to amino acids 683-733 of T51958_PEA_{—}1_P5 (SEQ ID NO:1151), wherein said first amino acid sequence and second amino acid sequence are contiguous and in a sequential order.

[0534] According to preferred embodiments of the present invention, there is provided an isolated polypeptide encoding for a tail of T51958_PEA_{—}1_P5 (SEQ ID NO:1151), comprising a polypeptide being at least 70%, optionally at least about 80%, preferably at least about 85%, more preferably at least about 90% and most preferably at least about 95% homologous to the sequence GMGWGGLCCTGSGGPRRLSPCTQPLCTEHGTEAIFVAAVGIRPSHHAAAQS (SEQ ID NO:1451) in T51958_PEA_{—}1_P5 (SEQ ID NO:1151).

[0535] According to preferred embodiments of the present invention, there is provided an isolated chimeric polypeptide encoding for T51958_PEA_{—}1_P6 (SEQ ID NO:1152), comprising a first amino acid sequence being at least 90% homologous to MGAARGSPARPRRLPLLSVLLLPLLGGTQTAIVFIKQPSSQDALQGRRALLRCEVEAPGPVHVYWLLDGAP VQDTERRFAQGSSLSFAAVDRLQDSGTFQCVARDDVTGEEARSANASFNIKWIEAGPVVLKHPASEAEIQPQ TQVTLRCHIDGHPRPTYQWFRDGTPLSDGQSNHTVSSKERNLTLRPAGPEHSGLYSCCAHSAFGQACSSQNF TLSIADESFARVVLAPQDVVVARYEEAMFHCQFSAQPPPSLQWLFEDETPITNRSRPPHLRRATVFANGSLLL TQVRPRNAGIYRCIGQGQRGPPIILEATLHLAEIEDMPLFEPRVFTAGSEERVTCLPPKGLPEPSVWWEHAGV RLPTHGRVYQKGHELVLANIAESDAGVYTCHAANLAGQRRQDVNITVATVPSWLKKPQDSQLEEGKPGYL DCLTQATPKPTVVWYRNQMLISEDSRFEVFKNGTLRINSVEVYDGTWYRCMSSTPAGSIEAQARVQVLEKL KFTPPPQPQQCMEFDKEATVPCSATGREKPTIKWERADGSSLPEWVTDNAGTLHFARVTRDDAGNYTCIAS NGPQGQIRAHVQLTVAVFITFKVEPERTTVYQGHTALLQCEAQGDPKPLIQWKGKDRILDPTKLGPRM corresponding to amino acids 1-641 of PTK7_HUMAN_V4 (SEQ ID NO:1143), which also corresponds to amino acids 1-641 of T51958_PEA_{—}1_P6 (SEQ ID NO:1152), and a second amino acid sequence being at least 70%, optionally at least 80%, preferably at least 85%, more preferably at least 90% and most preferably at least 95% homologous to a polypeptide having the sequence APW corresponding to amino acids 642-644 of T51958_PEA_{—}1_P6 (SEQ ID NO:1152), wherein said first amino acid sequence and second amino acid sequence are contiguous and in a sequential order.

[0536] According to preferred embodiments of the present invention, there is provided an isolated chimeric polypeptide encoding for T51958_PEA_{—}1_P28 (SEQ ID NO:1153), comprising a first amino acid sequence being at least 90% homologous to MGAARGSPARPRRLPLLSVLLLPLLGGTQTAIVFIKQPSSQDALQGRRALLRCEVEAPGPVHVYWLLDGAP VQDTERRFAQGSSLSFAAVDRLQDSGTFQCVARDDVTGEEARSANASFNIKWIEAGPVVLKHPASEAEIQPQ TQVTLRCHIDGHPRPTYQWFRDGTPLSDGQSNHTVSSKERNLTLRPAGPEHSGLYSCCAHSAFGQACSSQNF TLSIADESFARVVLAPQDVVVARYEEAMFHCQFSAQPPPSLQWLFEDETPITNRSRPPHLRRATVFANGSLLL TQVRPRNAGIYRCIGQGQRGPPIILEATLHLAEIEDMPLFEPRVFTAGSEERVTCLPPKGLPEPSVWWEHAGV RLPTHGRVYQKGHELVLANIAESDAGVYTCHAANLAGQRRQDVNITVA corresponding to amino acids 1-409 of PTK7_HUMAN_V11 (SEQ ID NO:1144), which also corresponds to amino acids 1-409 of T51958_PEA_{—}1_P28 (SEQ ID NO:1153), and a second amino acid sequence being at least 70%, optionally at least 80%, preferably at least 85%, more preferably at least 90% and most preferably at least 95% homologous to a polypeptide having the sequence SEHLCPEGQGEVEGNTGLGVMDRGFPGTHLRSSQFWALQAWESVHYWESV (SEQ ID NO:1452) corresponding to amino acids 410-459 of T51958_PEA_{—}1_P28 (SEQ ID NO:1153), wherein said first amino acid sequence and second amino acid sequence are contiguous and in a sequential order.

[0537] According to preferred embodiments of the present invention, there is provided an isolated polypeptide encoding for a tail of T51958_PEA_{—}1_P28 (SEQ ID NO:1153), comprising a polypeptide being at least 70%, optionally at least about 80%, preferably at least about 85%, more preferably at least about 90% and most preferably at least about 95% homologous to the sequence SEHLCPEGQGEVEGNTGLGVMDRGFPGTHLRSSQFWALQAWESVHYWESV (SEQ ID NO:1452) in T51958_PEA_{—}1_P28 (SEQ ID NO:1153).

[0538] According to preferred embodiments of the present invention, there is provided an isolated chimeric polypeptide encoding for T51958_PEA_{—}1_P28 (SEQ ID NO:1153), comprising a first amino acid sequence being at least 90% homologous to MGAARGSPARPRRLPLLSVLLLPLLGGTQTAIVFIKQPSSQDALQGRRALLRCEVEAPGPVHVYWLLDGAP VQDTERRFAQGSSLSFAAVDRLQDSGTFQCVARDDVTGEEARSANASFNIKWIEAGPVVLKHPASEAEIQPQ TQVTLRCHIDGHPRPTYQWFRDGTPLSDGQSNHTVSSKERNLTLRPAGPEHSGLYSCCAHSAFGQACSSQNF TLSIADESFARVVLAPQDVVVARYEEAMFHCQFSAQPPPSLQWLFEDETPITNRSRPPHLRRATVFANGSLLL TQVRPRNAGIYRCIGQGQRGPPIILEATLHLAEIEDMPLFEPRVFTAGSEERVTCLPPKGLPEPSVWWEHAGV RLPTHGRVYQKGHELVLANIAESDAGVYTCHAANLAGQRRQDVNITVA corresponding to amino acids 1-409 of Q8NFA5 (SEQ ID NO:1147), which also corresponds to amino acids 1-409 of T51958_PEA_{—}1_P28 (SEQ ID NO:1153), and a second amino acid sequence being at least 70%, optionally at least 80%, preferably at least 85%, more preferably at least 90% and most preferably at least 95% homologous to a polypeptide having the sequence SEHLCPEGQGEVEGNTGLGVMDRGFPGTHLRSSQFWALQAWESVHYWESV (SEQ ID NO:1452) corresponding to amino acids 410-459 of T51958_PEA_{—}1_P28 (SEQ ID NO:1153), wherein said first amino acid sequence and second amino acid sequence are contiguous and in a sequential order.

[0539] According to preferred embodiments of the present invention, there is provided an isolated polypeptide encoding for a tail of T51958_PEA_{—}1_P28 (SEQ ID NO:1153), comprising a polypeptide being at least 70%, optionally at least about 80%, preferably at least about 85%, more preferably at least about 90% and most preferably at least about 95% homologous to the sequence SEHLCPEGQGEVEGNTGLGVMDRGFPGTHLRSSQFWALQAWESVHYWESV (SEQ ID NO:1452) in T51958_PEA_{—}1_P28 (SEQ ID NO:1153).

[0540] According to preferred embodiments of the present invention, there is provided an isolated chimeric polypeptide encoding for T51958_PEA_{—}1_P28 (SEQ ID NO:1153), comprising a first amino acid sequence being at least 90% homologous to MGAARGSPARPRRLPLLSVLLLPLLGGTQTAIVFIKQPSSQDALQGRRALLRCEVEAPGPVHVYWLLDGAP VQDTERRFAQGSSLSFAAVDRLQDSGTFQCVARDDVTGEEARSANASFNIKWIEAGPVVLKHPASEAEIQPQ TQVTLRCHIDGHPRPTYQWFRDGTPLSDGQSNHTVSSKERNLTLRPAGPEHSGLYSCCAHSAFGQACSSQNF TLSIADESFARVVLAPQDVVVARYEEAMFHCQFSAQPPPSLQWLFEDETPITNRSRPPHLRRATVFANGSLLL TQVRPRNAGIYRCIGQGQRGPPIILEATLHLAEIEDMPLFEPRVFTAGSEERVTCLPPKGLPEPSVWWEHAGV RLPTHGRVYQKGHELVLANIAESDAGVYTCHAANLAGQRRQDVNITVA corresponding to amino acids 1-409 of Q8NFA6 (SEQ ID NO:1149), which also corresponds to amino acids 1-409 of T51958_PEA_{—}1_P28 (SEQ ID NO:1153), and a second amino acid sequence being at least 70%, optionally at least 80%, preferably at least 85%, more preferably at least 90% and most preferably at least 95% homologous to a polypeptide having the sequence SEHLCPEGQGEVEGNTGLGVMDRGFPGTHLRSSQFWALQAWESVHYWESV (SEQ ID NO:1452) corresponding to amino acids 410-459 of T51958_PEA_{—}1_P28 (SEQ ID NO:1153), wherein said first amino acid sequence and second amino acid sequence are contiguous and in a sequential order.

[0541] According to preferred embodiments of the present invention, there is provided an isolated polypeptide encoding for a tail of T51958_PEA_{—}1_P28 (SEQ ID NO:1153), comprising a polypeptide being at least 70%, optionally at least about 80%, preferably at least about 85%, more preferably at least about 90% and most preferably at least about 95% homologous to the sequence SEHLCPEGQGEVEGNTGLGVMDRGFPGTHLRSSQFWALQAWESVHYWESV (SEQ ID NO:1452) in T51958_PEA_{—}1_P28 (SEQ ID NO:1153).

[0542] According to preferred embodiments of the present invention, there is provided an isolated chimeric polypeptide encoding for T51958_PEA_{—}1_P28 (SEQ ID NO:1153), comprising a first amino acid sequence being at least 90% homologous to MGAARGSPARPRRLPLLSVLLLPLLGGTQTAIVFIKQPSSQDALQGRRALLRCEVEAPGPVHVYWLLDGAP VQDTERRFAQGSSLSFAAVDRLQDSGTFQCVARDDVTGEEARSANASFNIKWIEAGPVVLKHPASEAEIQPQ TQVTLRCHIDGHPRPTYQWFRDGTPLSDGQSNHTVSSKERNLTLRPAGPEHSGLYSCCAHSAFGQACSSQNF TLSIADESFARVVLAPQDVVVARYEEAMFHCQFSAQPPPSLQWLFEDETPITNRSRPPHLRRATVFANGSLLL TQVRPRNAGIYRCIGQGQRGPPIILEATLHLAEIEDMPLFEPRVFTAGSEERVTCLPPKGLPEPSVWWEHAGV RLPTHGRVYQKGHELVLANIAESDAGVYTCHAANLAGQRRQDVNITVA corresponding to amino acids 1-409 of Q8NFA7 (SEQ ID NO:1148), which also corresponds to amino acids 1-409 of T51958_PEA_{—}1_P28 (SEQ ID NO:1153), and a second amino acid sequence being at least 70%, optionally at least 80%, preferably at least 85%, more preferably at least 90% and most preferably at least 95% homologous to a polypeptide having the sequence SEHLCPEGQGEVEGNTGLGVMDRGFPGTHLRSSQFWALQAWESVHYWESV (SEQ ID NO:1452) corresponding to amino acids 410-459 of T51958_PEA_{—}1_P28 (SEQ ID NO:1153), wherein said first amino acid sequence and second amino acid sequence are contiguous and in a sequential order.

[0543] According to preferred embodiments of the present invention, there is provided an isolated polypeptide encoding for a tail of T51958_PEA_{—}1_P28 (SEQ ID NO:1153), comprising a polypeptide being at least 70%, optionally at least about 80%, preferably at least about 85%, more preferably at least about 90% and most preferably at least about 95% homologous to the sequence SEHLCPEGQGEVEGNTGLGVMDRGFPGTHLRSSQFWALQAWESVHYWESV (SEQ ID NO:1452) in T51958_PEA_{—}1_P28 (SEQ ID NO:1153).

[0544] According to preferred embodiments of the present invention, there is provided an isolated chimeric polypeptide encoding for T51958_PEA_{—}1_P28 (SEQ ID NO:1153), comprising a first amino acid sequence being at least 90% homologous to MGAARGSPARPRRLPLLSVLLLPLLGGTQTAIVFIKQPSSQDALQGRRALLRCEVEAPGPVHVYWLLDGAP VQDTERRFAQGSSLSFAAVDRLQDSGTFQCVARDDVTGEEARSANASFNIKWIEAGPVVLKHPASEAEIQPQ TQVTLRCHIDGHPRPTYQWFRDGTPLSDGQSNHTVSSKERNLTLRPAGPEHSGLYSCCAHSAFGQACSSQNF TLSIADESFARVVLAPQDVVVARYEEAMFHCQFSAQPPPSLQWLFEDETPITNRSRPPHLRRATVFANGSLLL TQVRPRNAGIYRCIGQGQRGPPIILEATLHLAEIEDMPLFEPRVFTAGSEERVTCLPPKGLPEPSVWWEHAGV RLPTHGRVYQKGHELVLANIAESDAGVYTCHAANLAGQRRQDVNITVA corresponding to amino acids 1-409 of Q8NFA8 (SEQ ID NO:1146), which also corresponds to amino acids 1-409 of T51958_PEA_{—}1_P28 (SEQ ID NO:1153), and a second amino acid sequence being at least 70%, optionally at least 80%, preferably at least 85%, more preferably at least 90% and most preferably at least 95% homologous to a polypeptide having the sequence SEHLCPEGQGEVEGNTGLGVMDRGFPGTHLRSSQFWALQAWESVHYWESV (SEQ ID NO:1452) corresponding to amino acids 410-459 of T51958_PEA_{—}1_P28 (SEQ ID NO:1153), wherein said first amino acid sequence and second amino acid sequence are contiguous and in a sequential order.

[0545] According to preferred embodiments of the present invention, there is provided an isolated polypeptide encoding for a tail of T51958_PEA_{—}1_P28 (SEQ ID NO:1153), comprising a polypeptide being at least 70%, optionally at least about 80%, preferably at least about 85%, more preferably at least about 90% and most preferably at least about 95% homologous to the sequence SEHLCPEGQGEVEGNTGLGVMDRGFPGTHLRSSQFWALQAWESVHYWESV (SEQ ID NO:1452) in T51958_PEA_{—}1_P28 (SEQ ID NO:1153).

[0546] According to preferred embodiments of the present invention, there is provided an isolated chimeric polypeptide encoding for T51958_PEA_{—}1_P28 (SEQ ID NO:1153), comprising a first amino acid sequence being at least 90% homologous to MGAARGSPARPRRLPLLSVLLLPLLGGTQTAIVFIKQPSSQDALQGRRALLRCEVEAPGPVHVYWLLDGAP VQDTERRFAQGSSLSFAAVDRLQDSGTFQCVARDDVTGEEARSANASFNIKWIEAGPVVLKHPASEAEIQPQ TQVTLRCHIDGHPRPTYQWFRDGTPLSDGQSNHTVSSKERNLTLRPAGPEHSGLYSCCAHSAFGQACSSQNF TLSIADESFARVVLAPQDVVVARYEEAMFHCQFSAQPPPSLQWLFEDETPITNRSRPPHLRRATVFANGSLLL TQVRPRNAGIYRCIGQGQRGPPIILEATLHLAEIEDMPLFEPRVFTAGSEERVTCLPPKGLPEPSVWWEHAGV RLPTHGRVYQKGHELVLANIAESDAGVYTCHAANLAGQRRQDVNITVA corresponding to amino acids 1-409 of AAN04862 (SEQ ID NO:1150), which also corresponds to amino acids 1-409 of T51958_PEA_{—}1_P28 (SEQ ID NO:1153), and a second amino acid sequence being at least 70%, optionally at least 80%, preferably at least 85%, more preferably at least 90% and most preferably at least 95% homologous to a polypeptide having the sequence SEHLCPEGQGEVEGNTGLGVMDRGFPGTHLRSSQFWALQAWESVHYWESV (SEQ ID NO:1452) corresponding to amino acids 410-459 of T51958_PEA_{—}1_P28 (SEQ ID NO:1153), wherein said first amino acid sequence and second amino acid sequence are contiguous and in a sequential order.

[0547] According to preferred embodiments of the present invention, there is provided an isolated polypeptide encoding for a tail of T51958_PEA_{—}1_P28 (SEQ ID NO:1153), comprising a polypeptide being at least 70%, optionally at least about 80%, preferably at least about 85%, more preferably at least about 90% and most preferably at least about 95% homologous to the sequence SEHLCPEGQGEVEGNTGLGVMDRGFPGTHLRSSQFWALQAWESVHYWESV (SEQ ID NO:1452) in T51958_PEA_{—}1_P28 (SEQ ID NO:1153).

[0548] According to preferred embodiments of the present invention, there is provided an isolated chimeric polypeptide encoding for T51958_PEA_{—}1_P30 (SEQ ID NO:1154), comprising a first amino acid sequence being at least 90% homologous to MGAARGSPARPRRLPLLSVLLLPLLGGTQTAIVFIKQPSSQDALQGRRALLRCEVEAPGPVHVYWLLDGAP VQDTERRFAQGSSLSFAAVDRLQDSGTFQCVARDDVTGEEARSANASFNIK corresponding to amino acids 1-122 of PTK7_HUMAN (SEQ ID NO:1141)_V13 (SEQ ID NO:1145), which also corresponds to amino acids 1-122 of T51958_PEA_{—}1_P30 (SEQ ID NO:1154), and a second amino acid sequence being at least 70%, optionally at least 80%, preferably at least 85%, more preferably at least 90% and most preferably at least 95% homologous to a polypeptide having the sequence CESQGGCAQSPCQTLND (SEQ ID NO:1453) corresponding to amino acids 123-139 of T51958_PEA_{—}1_P30 (SEQ ID NO:1154), wherein said first amino acid sequence and second amino acid sequence are contiguous and in a sequential order.

[0549] According to preferred embodiments of the present invention, there is provided an isolated polypeptide encoding for a tail of T51958_PEA_{—}1_P30 (SEQ ID NO:1154), comprising a polypeptide being at least 70%, optionally at least about 80%, preferably at least about 85%, more preferably at least about 90% and most preferably at least about 95% homologous to the sequence CESQGGCAQSPCQTLND (SEQ ID NO:1453) in T51958_PEA_{—}1_P30 (SEQ ID NO:1154).

[0550] According to preferred embodiments of the present invention, there is provided an isolated chimeric polypeptide encoding for T51958_PEA_{—}1_P34 (SEQ ID NO:1155), comprising a first amino acid sequence being at least 90% homologous to MGAARGSPARPRRLPLLSVLLLPLLGGTQTAIVFIKQPSSQDALQGRRALLRCEVEAPGPVHVYWLLDGAP VQDTERRFAQGSSLSFAAVDRLQDSGTFQCVARDDVTGEEARSANASFNIKWIEAGPVVLKHPASEAEIQPQ TQVTLRCHIDGHPR corresponding to amino acids 1-157 of PTK7_HUMAN_V3 (SEQ ID NO:1142), which also corresponds to amino acids 1-157 of T51958_PEA_{—}1_P34 (SEQ ID NO:1155).

[0551] According to preferred embodiments of the present invention, there is provided an isolated chimeric polypeptide encoding for T51958_PEA_{—}1_P35 (SEQ ID NO:1156), comprising a first amino acid sequence being at least 90% homologous to MGAARGSPARPRRLPLLSVLLLPLLGGTQTAIVFIKQPSSQDALQGRRALLRCEVEAPGPVHVYWLLDGAP VQDTERRFAQGSSLSFAAVDRLQDSGTFQCVARDDVTGEEARSANASFNIKWIEAGPVVLKHPASEAEIQPQ TQVTLRCHIDGHPRPTYQWFRDGTPLSDGQSNHTVSSKERNLTLRPAGPEHSGLYSCCAHSAFGQACSSQNF TLSIA corresponding to amino acids 1-220 of PTK7_HUMAN_V11 (SEQ ID NO:1144), which also corresponds to amino acids 1-220 of T51958_PEA_{—}1_P35 (SEQ ID NO:1156), and a second amino acid sequence being at least 70%, optionally at least 80%, preferably at least 85%, more preferably at least 90% and most preferably at least 95% homologous to a polypeptide having the sequence GEPGVGAEGMR (SEQ ID NO:1454) corresponding to amino acids 221-231 of T51958_PEA_{—}1_P35 (SEQ ID NO:1156), wherein said first amino acid sequence and second amino acid sequence are contiguous and in a sequential order.

[0552] According to preferred embodiments of the present invention, there is provided an isolated polypeptide encoding for a tail of T51958_PEA_{—}1_P35 (SEQ ID NO:1156), comprising a polypeptide being at least 70%, optionally at least about 80%, preferably at least about 85%, more preferably at least about 90% and most preferably at least about 95% homologous to the sequence GEPGVGAEGMR (SEQ ID NO:1454) in T51958_PEA_{—}1_P35 (SEQ ID NO:1156).

[0553] According to preferred embodiments of the present invention, there is provided an isolated chimeric polypeptide encoding for T23657_P2 (SEQ ID NO:1064), comprising a first amino acid sequence being at least 90% homologous to MPLHQLGDKPLTFPSPNSAMENGLDHTPPSRRASPGTPLSPGSLRSAAHSPLDTSKQPLCQLWAEKHGARGT HEVRYVSAGQSVACGWWAFAPPCLQVLNTPKGILFFLCAAAFLQGMTVNGFINTVITSLERRYDLHSYQSG LIASSYDIAACLCLTFVSYFGGSGHKPRWLGWGVLLMGTGSLVFALPHFTAGRYEVELDAGVRTCPANPGA VCADSTSGLSRYQLVFMLGQFLHGVGATPLYTLGVTYLDENVKSSCSPVYIAIFYTAAILGPAAGYLIGGAL LNIYTEMGRRTELTTESPLWVGAWWVGFLGSGAAAFFTAVPILGYPRQLPGSQRYAVMRAAEMHQLKDSS RGEASNPDFGKTIRDLPLSIWLLLKNPTFILLCLAGATEATLITGMSTFSPKFLESQFSLSASEAATLFGYLVVP AGGGGTFLGGFFVNKLRLRGSAVIKFCLFCTVVSLLGILVFSLHCPSVPMAGVTASYGGSLLPEGHLNLTAP CNAACSCQPEHYSPVCGSDGLMYFSLCHAGCPAATETNVDGQKVYRDCSCIPQNLSSGFGHATAGKCTSTC QRKPLLLVFIFVVIFFTFLSSIPALTATLRCVRDPQRSFALGIQWIVVRILGGIPGPIAFGWVIDKACLLWQDQC GQQGSCLVYQNSAMSRYILIMGLLYK corresponding to amino acids 1-675 of S21C_HUMAN (SEQ ID NO:1062), which also corresponds to amino acids 1-675 of T23657_P2 (SEQ ID NO:1064), and a second amino acid sequence being at least 70%, optionally at least 80%, preferably at least 85%, more preferably at least 90% and most preferably at least 95% homologous to a polypeptide having the sequence FQLPEVHHSLNVLNRKFQKQTVHNL (SEQ ID NO:1455) corresponding to amino acids 676-700 of T23657_P2 (SEQ ID NO:1064), wherein said first amino acid sequence and second amino acid sequence are contiguous and in a sequential order.

[0554] According to preferred embodiments of the present invention, there is provided an isolated polypeptide encoding for a tail of T23657_P2 (SEQ ID NO:1064), comprising a polypeptide being at least 70%, optionally at least about 80%, preferably at least about 85%, more preferably at least about 90% and most preferably at least about 95% homologous to the sequence FQLPEVHHSLNVLNRKFQKQTVHNL (SEQ ID NO:1455) in T23657_P2 (SEQ ID NO:1064).

[0555] According to preferred embodiments of the present invention, there is provided an isolated chimeric polypeptide encoding for T23657_P3 (SEQ ID NO:1065), comprising a first amino acid sequence being at least 90% homologous to MPLHQLGDKPLTFPSPNSAMENGLDHTPPSRRASPGTPLSPGSLRSAAHSPLDTSKQPLCQLWAEKHGARGT HEVRYVSAGQSVACGWWAFAPPCLQVLNTPKGILFFLCAAAFLQGMTVNGFINTVITSLERRYDLHSYQSG LIASSYDIAACLCLTFVSYFGGSGHKPRWLGWGVLLMGTGSLVFALPHFTAGRYEVELDAGVRTCPANPGA VCADSTSGLSRYQLVFMLGQFLHGVGATPLYTLGVTYLDENVKSSCSPVYIAIFYTAAILGPAAGYLIGGAL LNIYTEMGRRTELTTESPLWVGAWWVGFLGSGAAAFFTAVPILGYPRQLPGSQRYAVMRAAEMHQLKDSS RGEASNPDFGKTIRDLPLSIWLLLKNPTFILLCLAGATEATLITGMSTFSPKFLESQFSLSASEAATLFGYLVVP AGGGGTFLGGFFVNKLRLRGSAVIKFCLFCTVVSLLGILVFSLHCPSVPMAGVTASYGGSLLPEGHLNLTAP CNAACSCQPEHYSPVCGSDGLMYFSLCHAGCPAATETNVDGQKVYRDCSCIPQNLSSGFGHATAGKCTSTC QRKPLLLVFIFVVIFFTFLSSIPALTATLRCVRDPQRSFALGIQWIVVRILGGIPGPIAFGWVIDKACLLWQDQC GQQGSCLVYQNSAMSRYILIMGLLYK corresponding to amino acids 1-675 of S21C_HUMAN (SEQ ID NO:1062), which also corresponds to amino acids 1-675 of T23657_P3 (SEQ ID NO:1065), and a second amino acid sequence being at least 70%, optionally at least 80%, preferably at least 85%, more preferably at least 90% and most preferably at least 95% homologous to a polypeptide having the sequence TIKHKAF (SEQ ID NO:1456) corresponding to amino acids 676-682 of T23657_P3 (SEQ ID NO:1065), wherein said first amino acid sequence and second amino acid sequence are contiguous and in a sequential order.

[0556] According to preferred embodiments of the present invention, there is provided an isolated polypeptide encoding for a tail of T23657_P3 (SEQ ID NO:1065), comprising a polypeptide being at least 70%, optionally at least about 80%, preferably at least about 85%, more preferably at least about 90% and most preferably at least about 95% homologous to the sequence TIKHKAF (SEQ ID NO:1456) in T23657_P3 (SEQ ID NO:1065).

[0557] According to preferred embodiments of the present invention, there is provided an isolated chimeric polypeptide encoding for T23657_P4 (SEQ ID NO:1066), comprising a first amino acid sequence being at least 90% homologous to MPLHQLGDKPLTFPSPNSAMENGLDHTPPSRRASPGTPLSPGSLRSAAHSPLDTSKQPLCQLWAEKHGARGT HEVRYVSAGQSVACGWWAFAPPCLQVLNTPKGILFFLCAAAFLQGMTVNGFINTVITSLERRYDLHSYQSG LIASSYDIAACLCLTFVSYFGGSGHKPRWLGWGVLLMGTGSLVFALPHFTAGRYEVELDAGVRTCPANPGA VCADSTSGLSRYQLVFMLGQFLHGVGATPLYTLGVTYLDENVKSSCSPVYIAIFYTAAILGPAAGYLIGGAL LNIYTEMGRRTELTTESPLWVGAWWVGFLGSGAAAFFTAVPILGYPRQLPGSQRYAVMRAAEMHQLKDSS RGEASNPDFGKTIRDLPLSIWLLLKNPTFILLCLAGATEATLITGMSTFSPKFLESQFSLSASEAATLFGYLVVP AGGGGTFLGGFFVNKLRLRGSAVIKFCLFCTVVSLLGILVFSLHCPSVPMAGVTASYGGSLLPEGHLNLTAP CNAACSCQPEHYSPVCGSDGLMYFSLCHAGCPAATETNVDGQKVYRDCSCIPQNLSSGFGHATAGKCTSTC QRKPLLLVFIFVVIFFTFLSSIPALTATLRCVRDPQRSFALGIQWIVVRIL corresponding to amino acids 1-625 of S21C_HUMAN (SEQ ID NO:1062), which also corresponds to amino acids 1-625 of T23657_P4 (SEQ ID NO:1066), a second amino acid sequence being at least 70%, optionally at least 80%, preferably at least 85%, more preferably at least 90% and most preferably at least 95% homologous to a polypeptide having the sequence GTVQCEEAMVSCTVCSLHKGM corresponding to amino acids 626-646 of T23657_P4 (SEQ ID NO:1066), a third amino acid sequence being at least 90% homologous to GGIPGPIAFGWVIDKACLLWQDQCGQQGSCLVYQNSAMSRYILIMGLLYK corresponding to amino acids 626-675 of S21C_HUMAN (SEQ ID NO:1062), which also corresponds to amino acids 647-696 of T23657_P4 (SEQ ID NO:1066), and a fourth amino acid sequence being at least 70%, optionally at least 80%, preferably at least 85%, more preferably at least 90% and most preferably at least 95% homologous to a polypeptide having the sequence TIKHKAF (SEQ ID NO:1456) corresponding to amino acids 697-703 of T23657_P4 (SEQ ID NO:1066), wherein said first amino acid sequence, second amino acid sequence, third amino acid sequence and fourth amino acid sequence are contiguous and in a sequential order.

[0558] According to preferred embodiments of the present invention, there is provided an isolated polypeptide encoding for an edge portion of T23657_P4 (SEQ ID NO:1066), comprising an amino acid sequence being at least 70%, optionally at least about 80%, preferably at least about 85%, more preferably at least about 90% and most preferably at least about 95% homologous to the sequence encoding for GTVQCEEAMVSCTVCSLHKGM, corresponding to T23657_P4 (SEQ ID NO:1066).

[0559] According to preferred embodiments of the present invention, there is provided an isolated polypeptide encoding for a tail of T23657_P4 (SEQ ID NO:1066), comprising a polypeptide being at least 70%, optionally at least about 80%, preferably at least about 85%, more preferably at least about 90% and most preferably at least about 95% homologous to the sequence TIKHKAF (SEQ ID NO:1456) in T23657_P4 (SEQ ID NO:1066).

[0560] According to preferred embodiments of the present invention, there is provided an isolated chimeric polypeptide encoding for T23657_P5 (SEQ ID NO:1067), comprising a first amino acid sequence being at least 90% homologous to MPLHQLGDKPLTFPSPNSAMENGLDHTPPSRRASPGTPLSPGSLRSAAHSPLDTSKQPLCQLWAEKHGARGT HEVRYVSAGQSVACGWWAFAPPCLQVLNTPKGILFFLCAAAFLQGMTVNGFINTVITSLERRYDLHSYQSG LIASSYDIAACLCLTFVSYFGGSGHKPRWLGWGVLLMGTGSLVFALPHFTAGRYEVELDAGVRTCPANPGA VCADSTSGLSRYQLVFMLGQFLHGVGATPLYTLGVTYLDENVKSSCSPVYIAIFYTAAILGPAAGYLIGGAL LNIYTEMGRRTELTTESPLWVGAWWVGFLGSGAAAFFTAVPILGYPRQLPGSQRYAVMRAAEMHQLKDSS RGEASNPDFGKTIRDLPLSIWLLLKNPTFILLCLAGATEATLITGMSTFSPKFLESQFSLSASEAATLFGYLVVP AGGGGTFLGGFFVNKLRLRGSAVIKFCLFCTVVSLLGILVFSLHCPSVPMAGVTASYGGSLLPEGHLNLTAP CNAACSCQPEHYSPVCGSDGLMYFSLCHAGCPAATETNVDGQKVYRDCSCIPQNLSSGFGHATAGKCTSTC QRKPLLLVFIFVVIFFTFLSSIPALTATLR corresponding to amino acids 1-604 of S21C_HUMAN (SEQ ID NO:1062), which also corresponds to amino acids 1-604 of T23657_P5 (SEQ ID NO:1067).

[0561] According to preferred embodiments of the present invention, there is provided an isolated chimeric polypeptide encoding for T23657_P6 (SEQ ID NO:1068), comprising a first amino acid sequence being at least 90% homologous to MPLHQLGDKPLTFPSPNSAMENGLDHTPPSRRASPGTPLSPGSLRSAAHSPLDTSKQPLCQLWAEKHGARGT HEVRYVSAGQSVACGWWAFAPPCLQVLNTPKGILFFLCAAAFLQGMTVNGFINTVITSLERRYDLHSYQSG LIASSYDIAACLCLTFVSYFGGSGHKPRWLGWGVLLMGTGSLVFALPHFTAGRYEVELDAGVRTCPANPGA VCADSTSGLSRYQLVFMLGQFLHGVGATPLYTLGVTYLDENVKSSCSPVYIAIFYTAAILGPAAGYLIGGAL LNIYTEMGRRTELTTESPLWVGAWWVGFLGSGAAAFFTAVPILGYPRQLPGSQRYAVMRAAEMHQLKDSS RGEASNPDFGKTIRDLPLSIWLLLKNPTFILLCLAGATEATLITGMSTFSPKFLESQFSLSASEAATLFGYLVVP AGGGGTFLGGFFVNKLRLRGSAVIKFCLFCTVVSLLGILVFSLHCPSVPMAGVTASYGGSLLPEGHLNLTAP CNAACSCQPEHYSPVCGSDGLMYFSLCHAGCPAATETNVDGQKV corresponding to amino acids 1-547 of S21C_HUMAN (SEQ ID NO:1062), which also corresponds to amino acids 1-574 of T23657_P6 (SEQ ID NO:1068), and a second amino acid sequence being at least 70%, optionally at least 80%, preferably at least 85%, more preferably at least 90% and most preferably at least 95% homologous to a polypeptide having the sequence SGAAAYRPCPPLDPGKGPPCLPLVIGAIVGLPRCTETVAVSLRIFPLVLAMPLQGNALQLVRESPSFWFSYSL (SEQ ID NO:1458) corresponding to amino acids 548-620 of T23657_P6 (SEQ ID NO:1068), wherein said first amino acid sequence and second amino acid sequence are contiguous and in a sequential order.

[0562] According to preferred embodiments of the present invention, there is provided an isolated polypeptide encoding for a tail of T23657_P6 (SEQ ID NO:1068), comprising a polypeptide being at least 70%, optionally at least about 80%, preferably at least about 85%, more preferably at least about 90% and most preferably at least about 95% homologous to the sequence SGAAAYRPCPPLDPGKGPPCLPLVIGAIVGLPRCTETVAVSLRIFPLVLAMPLQGNALQLVRESPSFWFSYSL (SEQ ID NO:1458) in T23657_P6 (SEQ ID NO:1068).

[0563] According to preferred embodiments of the present invention, there is provided an isolated chimeric polypeptide encoding for T23657_P7 (SEQ ID NO:1069), comprising a first amino acid sequence being at least 90% homologous to MPLHQLGDKPLTFPSPNSAMENGLDHTPPSRRASPGTPLSPGSLRSAAHSPLDTSKQPLCQLWAEKHGARGT HEVRYVSAGQSVACGWWAFAPPCLQVLNTPKGILFFLCAAAFLQGMTVNGFINTVITSLERRYDLHSYQSG LIASSYDIAACLCLTFVSYFGGSGHKPRWLGWGVLLMGTGSLVFALPHFTAGRYEVELDAGVRTCPANPGA VCADSTSGLSRYQLVFMLGQFLHGVGATPLYTLGVTYLDENVKSSCSPVYIAIFYTAAILGPAAGYLIGGAL LNIYTEMGRRTELTTESPLWVGAWWVGFLGSGAAAFFTAVPILGYPRQLPGSQRYAVMRAAEMHQLKDSS RGEASNPDFGKTIRDLPLSIWLLLKNPTFILLCLAGATEATLITGMSTFSPKFLESQFSLSASEAATLFGYLVVP AGGGGTFLGGFFVNKLRLRGSAVIKFCLFCTVVSLLGILVFSLHCPSVPMAGVTASYGGSLLPEGHLNLTAP CNAACSCQPEHYSPVCGSDGLMYFSLCHAGCPAATETNVDGQK corresponding to amino acids 1-546 of S21C_HUMAN (SEQ ID NO:1062), which also corresponds to amino acids 1-546 of T23657_P7 (SEQ ID NO:1069), and a second amino acid sequence being at least 70%, optionally at least 80%, preferably at least 85%, more preferably at least 90% and most preferably at least 95% homologous to a polypeptide having the sequence MCP corresponding to amino acids 547-549 of T23657_P7 (SEQ ID NO:1069), wherein said first amino acid sequence and second amino acid sequence are contiguous and in a sequential order.

[0564] According to preferred embodiments of the present invention, there is provided an isolated chimeric polypeptide encoding for T23657_P8 (SEQ ID NO:1070), comprising a first amino acid sequence being at least 90% homologous to MPLHQLGDKPLTFPSPNSAMENGLDHTPPSRRASPGTPLSPGSLRSAAHSPLDTSKQPLCQLWAEKHGARGT HEVRYVSAGQSVACGWWAFAPPCLQVLNTPKGILFFLCAAAFLQGMTVNGFINTVITSLERRYDLHSYQSG LIASSYDIAACLCLTFVSYFGGSGHKPRWLGWGVLLMGTGSLVFALPHFTAGRYEVELDAGVRTCPANPGA VCADSTSGLSRYQLVFMLGQFLHGVGATPLYTLGVTYLDENVKSSCSPVYIAIFYTAAILGPAAGYLIGGAL LNIYTEMGRRTELTTESPLWVGAWWVGFLGSGAAAFFTAVPILGYPRQLPGSQRYAVMRAAEMHQLKDSS RGEASNPDFGKTIRDLPLSIWLLLKNPTFILLCLAGATEATLITGMSTFSPKFLESQFSLSASEAATLFGYLVVP AGGGGTFLGGFFVNKLRLRGSAVIKFCLFCTVVSLLGILVFSLHCPSVPMAGVTASYGGSLLPEGHLNLTAP CNAACSCQPEHYSPVCGSDGLMYFSLCHAGCPAATETNVDGQK corresponding to amino acids 1-546 of S21C_HUMAN (SEQ ID NO:1062), which also corresponds to amino acids 1-546 of T23657_P8 (SEQ ID NO:1070), and a second amino acid sequence being at least 70%, optionally at least 80%, preferably at least 85%, more preferably at least 90% and most preferably at least 95% homologous to a polypeptide having the sequence QHSCTNGNSTMCP (SEQ ID NO:1459) corresponding to amino acids 547-559 of T23657_P8 (SEQ ID NO:1070), wherein said first amino acid sequence and second amino acid sequence are contiguous and in a sequential order.

[0565] According to preferred embodiments of the present invention, there is provided an isolated polypeptide encoding for a tail of T23657_P8 (SEQ ID NO:1070), comprising a polypeptide being at least 70%, optionally at least about 80%, preferably at least about 85%, more preferably at least about 90% and most preferably at least about 95% homologous to the sequence QHSCTNGNSTMCP (SEQ ID NO:1459) in T23657_P8 (SEQ ID NO:1070).

[0566] According to preferred embodiments of the present invention, there is provided an isolated chimeric polypeptide encoding for T23657_P10 (SEQ ID NO:1072), comprising a first amino acid sequence being at least 90% homologous to MPLHQLGDKPLTFPSPNSAMENGLDHTPPSRRASPGTPLSPGSLRSAAHSPLDTSKQPLCQLWAEKHGARGT HEVRYVSAGQSVACGWWAFAPPCLQVLNTPKGILFFLCAAAFLQGMTVNGFINTVITSLERRYDLHSYQSG LIASSYDIAACLCLTFVSYFGGSGHKPRWLGWGVLLMGTGSLVFALPHFTAGRYEVELDAGVRTCPANPGA VCADSTSGLSRYQLVFMLGQFLHGVGATPLYTLGVTYLDENVKSSCSPVYIAIFYTAAILGPAAGYLIGGAL LNIYTEMGRRTELTTESPLWVGAWWVGFLGSGAAAFFTAVPILGYPRQLPGSQRYAVMRAAEMHQLKDSS RGEASNPDFGKTIRDLPLSIWLLLKNPTFILLCLAGATEATLITGMSTFSPKFLESQFSLSASEAATLFGYLVVP AGGGGTFLGGFFVNKLRLRGSAVIKFCLFCTVVSLLGILVFSLHCPSVPMAGVTASYGGSLLPEGHLNLTAP CNAACSCQPEHYSPVCGSDGLMYFSLCHAGCPAATETNVDGQKVYRDCSCIPQNLSSGFGHATAGKCTSTC QRKPLLLVFIFVVIFFTFLSSIPALTATLRCVRDPQRSFALGIQWIVVRIL corresponding to amino acids 1-625 of S21C_HUMAN (SEQ ID NO:1062), which also corresponds to amino acids 1-625 of T23657_P10 (SEQ ID NO:1072), a second amino acid sequence being at least 70%, optionally at least 80%, preferably at least 85%, more preferably at least 90% and most preferably at least 95% homologous to a polypeptide having the sequence GTVQCEEAMVSCTVCSLHKGM corresponding to amino acids 626-646 of T23657_P10 (SEQ ID NO:1072), and a third amino acid sequence being at least 90% homologous to GGIPGPIAFGWVIDKACLLWQDQCGQQGSCLVYQNSAMSRYILIMGLLYKVLGVLFFAIACFLYKPLSESSD GLETCLPSQSSAPDSATDSQLQSSV corresponding to amino acids 626-722 of S21C_HUMAN (SEQ ID NO:1062), which also corresponds to amino acids 647-743 of T23657_P10 (SEQ ID NO:1072), wherein said first amino acid sequence, second amino acid sequence and third amino acid sequence are contiguous and in a sequential order.

[0567] According to preferred embodiments of the present invention, there is provided an isolated polypeptide encoding for an edge portion of T23657_P10 (SEQ ID NO:1072), comprising an amino acid sequence being at least 70%, optionally at least about 80%, preferably at least about 85%, more preferably at least about 90% and most preferably at least about 95% homologous to the sequence encoding for GTVQCEEAMVSCTVCSLHKGM, corresponding to T23657_P10 (SEQ ID NO:1072).

[0568] According to preferred embodiments of the present invention, there is provided an isolated chimeric polypeptide encoding for T23657_P11 (SEQ ID NO:1073), comprising a first amino acid sequence being at least 90% homologous to MPLHQLGDKPLTFPSPNSAMENGLDHTPPSRRASPGTPLSPGSLRSAAHSPLDTSKQPLCQLWAEKHGARGT HEVRYVSAGQSVACGWWAFAPPCLQVLNTPKGILFFLCAAAFLQGMTVNGFINTVITSLERRYDLHSYQSG LIASSYDIAACLCLTFVSYFGGSGHKPRWLGWGVLLMGTGSLVFALPHFTAGRYEVELDAGVRTCPANPGA VCADSTSGLSRYQLVFMLGQFLHGVGATPLYTLGVTYLDENVKSSCSPVYIAIFYTAAILGPAAGYLIGGAL LNIYTEMGRRTELTTESPLWVGAWWVGFLGSGAAAFFTAVPILGYPRQLPGSQRYAVMRAAEMHQLKDSS RGEASNPDFGKTIRDLPLSIWLLLKNPTFILLCLAGATEATLITGMSTFSPKFLESQFSLSASEAATLF corresponding to amino acids 1-425 of S21C_HUMAN (SEQ ID NO:1062), which also corresponds to amino acids 1-425 of T23657_P11 (SEQ ID NO:1073), and a second amino acid sequence being at least 70%, optionally at least 80%, preferably at least 85%, more preferably at least 90% and most preferably at least 95% homologous to a polypeptide having the sequence ASCPKAT (SEQ ID NO:1460) corresponding to amino acids 426-432 of T23657_P11 (SEQ ID NO:1073), wherein said first amino acid sequence and second amino acid sequence are contiguous and in a sequential order.

[0569] According to preferred embodiments of the present invention, there is provided an isolated polypeptide encoding for a tail of T23657_P11 (SEQ ID NO:1073), comprising a polypeptide being at least 70%, optionally at least about 80%, preferably at least about 85%, more preferably at least about 90% and most preferably at least about 95% homologous to the sequence ASCPKAT (SEQ ID NO:1460) in T23657_P11 (SEQ ID NO:1073).

[0570] According to preferred embodiments of the present invention, there is provided an isolated chimeric polypeptide encoding for T23657_P12 (SEQ ID NO:1074), comprising a first amino acid sequence being at least 90% homologous to MPLHQLGDKPLTFPSPNSAMENGLDHTPPSRRASPGTPLSPGSLRSAAHSPLDTSKQPLCQLWAEKHGARGT HEVRYVSAGQSVACGWWAFAPPCLQVLNTPKGILFFLCAAAFLQGMTVNGFINTVITSLERRYDLHSYQSG LIASSYDIAACLCLTFVSYFGGSGHKPRWLGWGVLLMGTGSLVFALPHFTAGRYEVELDAGVRTCPANPGA VCADSTSGLSRYQLVFMLGQFLHGVGATPLYTLGVTYLDENVKSSCSPVYIAIFYTAAILGPAAGYLIGGAL LNIYTEMGRRTELTTESPLWVGAWWVGFLGSGAAAFFTAVPILGYPRQLPGSQRYAVMRAAEMHQLKDSS RGEASNPDFGKTIRDLPLSIWLLLKNPTFILLCLAGATEATLITGMSTFSPKFLESQFSLSASEAATLFGYLVVP AGGGGTFLGGFFVNKLRLRGSAVIKFCLFCTVVSLLGILVFSLHCPSVPMAGVTASYGGSLLPEGHLNLTAP CNAACSCQPEHYSPVCGSDGLMYFSLCHAGCPAATETNVDGQKVYRDCSCIPQNLSSGFGHATAGKCTSTC QRKPLLLVFIFVVIFFTFLSSIPALTATLRCVRDPQRSFALGIQWUVRILGGIPGPIAFGWVIDKACLLWQDQC GQQGSCLVYQNSAMSRYILIMGLLYK corresponding to amino acids 1-675 of S21C_HUMAN (SEQ ID NO:1062), which also corresponds to amino acids 1-675 of T23657_P12 (SEQ ID NO:1074), and a second amino acid sequence being at least 70%, optionally at least 80%, preferably at least 85%, more preferably at least 90% and most preferably at least 95% homologous to a polypeptide having the sequence EEENEFRRL (SEQ ID NO:1461) corresponding to amino acids 676-684 of T23657_P12 (SEQ ID NO:1074), wherein said first amino acid sequence and second amino acid sequence are contiguous and in a sequential order.

[0571] According to preferred embodiments of the present invention, there is provided an isolated polypeptide encoding for a tail of T23657_P12 (SEQ ID NO:1074), comprising a polypeptide being at least 70%, optionally at least about 80%, preferably at least about 85%, more preferably at least about 90% and most preferably at least about 95% homologous to the sequence EEENEFRRL (SEQ ID NO:1461) in T23657_P12 (SEQ ID NO:1074).

[0572] According to preferred embodiments of the present invention, there is provided an isolated chimeric polypeptide encoding for T23657_P16 (SEQ ID NO:1075), comprising a first amino acid sequence being at least 70%, optionally at least 80%, preferably at least 85%, more preferably at least 90% and most preferably at least 95% homologous to a polypeptide having the sequence MGTSPMADPVPAGRQHGSGLDPTTRLSPLC (SEQ ID NO:1462) corresponding to amino acids 1-30 of T23657_P16 (SEQ ID NO:1075), and a second amino acid sequence being at least 90% homologous to SLLPEGHLNLTAPCNAACSCQPEHYSPVCGSDGLMYFSLCHAGCPAATETNVDGQKVYRDCSCIPQNLSSG FGHATAGKCTSTCQRKPLLLVFIFVVIFFTFLSSIPALTATLRCVRDPQRSFALGIQWIVVRILGGIPGPIAFGW VIDKACLLWQDQCGQQGSCLVYQNSAMSRYILIMGLLYKVLGVLFFAIACFLYKPLSESSDGLETCLPSQSS APDSATDSQLQSSV corresponding to amino acids 491-722 of S21C_HUMAN (SEQ ID NO:1062), which also corresponds to amino acids 31-262 of T23657_P16 (SEQ ID NO:1075), wherein said first amino acid sequence and second amino acid sequence are contiguous and in a sequential order.

[0573] According to preferred embodiments of the present invention, there is provided an isolated polypeptide encoding for a head of T23657_P16 (SEQ ID NO:1075), comprising a polypeptide being at least 70%, optionally at least about 80%, preferably at least about 85%, more preferably at least about 90% and most preferably at least about 95% homologous to the sequence MGTSPMADPVPAGRQHGSGLDPTTRLSPLC (SEQ ID NO:1462) of T23657_P16 (SEQ ID NO:1075).

[0574] According to preferred embodiments of the present invention, there is provided an isolated chimeric polypeptide encoding for T23657_P17 (SEQ ID NO:1076), comprising a first amino acid sequence being at least 90% homologous to MYFSLCHAGCPAATETNVDGQKVYRDCSCIPQNLSSGFGHATAGKCTSTCQRKPLLLVFIFVVIFFTFLSSIP ALTATLRCVRDPQRSFALGIQWIVVRILGGIPGPIAFGWVIDKACLLWQDQCGQQGSCLVYQNSAMSRYILI MGLLYKVLGVLFFAIACFLYKPLSESSDGLETCLPSQSSAPDSATDSQLQSSV corresponding to amino acids 525-722 of S21C_HUMAN (SEQ ID NO:1062), which also corresponds to amino acids 1-198 of T23657_P17 (SEQ ID NO:1076).

[0575] According to preferred embodiments of the present invention, there is provided an isolated chimeric polypeptide encoding for T23657_P21 (SEQ ID NO:1078), comprising a first amino acid sequence being at least 70%, optionally at least 80%, preferably at least 85%, more preferably at least 90% and most preferably at least 95% homologous to a polypeptide having the sequence MWTAR (SEQ ID NO:1463) corresponding to amino acids 1-5 of T23657_P21 (SEQ ID NO:1078), and a second amino acid sequence being at least 90% homologous to RCVRDPQRSFALGIQWIVVRILGGIPGPIAFGWVIDKACLLWQDQCGQQGSCLVYQNSAMSRYILIMGLLYK VLGVLFFAIACFLYKPLSESSDGLETCLPSQSSAPDSATDSQLQSSV corresponding to amino acids 604-722 of S21C HUMAN (SEQ ID NO:1062), which also corresponds to amino acids 6-124 of T23657_P21 (SEQ ID NO:1078), wherein said first amino acid sequence and second amino acid sequence are contiguous and in a sequential order.

[0576] According to preferred embodiments of the present invention, there is provided an isolated polypeptide encoding for a head of T23657_P21 (SEQ ID NO:1078), comprising a polypeptide being at least 70%, optionally at least about 80%, preferably at least about 85%, more preferably at least about 90% and most preferably at least about 95% homologous to the sequence MWTAR (SEQ ID NO:1463) of T23657_P21 (SEQ ID NO:1078).

[0577] According to preferred embodiments of the present invention, there is provided an isolated chimeric polypeptide encoding for T23657_P23 (SEQ ID NO:1080), comprising a first amino acid sequence being at least 90% homologous to MPLHQLGDKPLTFPSPNSAMENGLDHTPPSRRASPGTPLSPGSLRSAAHSPLDTSKQPLCQLWAEKHGARGT HEVRYVSAGQSVACGWWAFAPPCLQVLNTPKGILFFLCAAAFLQGMTVNGFINTVITSLERRYDLHSYQSG LIASSYDIAACLCLTFVSYFGGSGHKPRWLGWGVLLMGTGSLVFALPHFTAGRYEVELDAGVRTCPANPGA VCADSTSGLSRYQLVFMLGQFLHGVGATPLYTLGVTYLDENVKSSCSPVYIAIFYTAAILGPAAGYLIGGAL LNIYTEMGRRTELTTESPLWVGAWWVGFLGSGAAAFFTAVPILGYPRQLPGSQRYAVMRAAEMHQLKDSS RGEASNPDFGKTIRDLPLSIWLLLKNPTFILLCLAGATEATLITGMSTFSPKFLESQFSLSASEAATLFGYLVVP AGGGGTFLGGFFVNKLRLRGSAVIKFCLFCTVVSLLGILVFSLHCPSVPMAGVTASYGGSLLPEGHLNLTAP CNAACSCQPEHYSPVCGSDGLMYFSLCHAGCPAATETNVDGQKV corresponding to amino acids 1-547 of S21C_HUMAN (SEQ ID NO:1062), which also corresponds to amino acids 1-547 of T23657_P23 (SEQ ID NO:1080), and a second amino acid sequence being at least 70%, optionally at least 80%, preferably at least 85%, more preferably at least 90% and most preferably at least 95% homologous to a polypeptide having the sequence SGAAAYRPCPPLDPGKGPPCLPLVIGAIVGLPRCTETVAVSLRIFPLVLAMHCREMHFNLSEKAPPSGFHIRC NFLYIPQQHSCTNGNSTVSWGRVCACPELSLQHPEAELCRS (SEQ ID NO:1464) corresponding to amino acids 548-661 of T23657_P23 (SEQ ID NO:1080), wherein said first amino acid sequence and second amino acid sequence are contiguous and in a sequential order.

[0578] According to preferred embodiments of the present invention, there is provided an isolated polypeptide encoding for a tail of T23657_P23 (SEQ ID NO:1080), comprising a polypeptide being at least 70%, optionally at least about 80%, preferably at least about 85%, more preferably at least about 90% and most preferably at least about 95% homologous to the sequence SGAAAYRPCPPLDPGKGPPCLPLVIGAIVGLPRCTETVAVSLRIFPLVLAMHCREMHFNLSEKAPPSGFHIRC NFLYIPQQHSCTNGNSTVSWGRVCACPELSLQHPEAELCRS (SEQ ID NO:1464) in T23657_P23 (SEQ ID NO:1080).

[0579] According to preferred embodiments of the present invention, there is provided an isolated chimeric polypeptide encoding for R30650_PEA_{—}2_P4 (SEQ ID NO:991), comprising a first amino acid sequence being at least 90% homologous to MYLHIGEEIDGVDMRAEVGLLSRNIIVMGEMEDKCYPYRNHICNFFDFDTFGGHIKFALGFKAAHLEGTELK HMGQQLVGQYPIHFHLAGDVDERGGYDPPTYIRDLSIHHTFSRCVTVHGSNGLLIKDVVGYNSLGHCFFTE DGPEERNTFDHCLGLLVKSGTLLPSDRDSKMCKMITEDSYPGYIPKPRQDCNAVSTFWMANPNNNLINCAA AGSEETGFWFIFHHVPTGPSVGMYSPGYSEHIPLGKFYNNRAHSNYRAGMIIDNGVKTTEASAKDKRPFLSII SARYSPHQDADPLKPREPAIIRHFIAYKNQDHGAWLRGGDVWLDSCRFADNGIGLTLASGGTFPYDDGSKQ EIKNSLFVGESGNVGTEMMDNRIWGPGGLDHSGRTLPIGQNFPIRGIQLYDGPINIQNCTFRKFVALEGRHTS ALAFRLNNAWQSCPHNNVTGIAFEDVPITSRVFFGEPGPWFNQLDMDGDKTSVFHDVDGSVSEYPGSYLTK NDNWLVRHPDCINVPDWRGAICSGCYAQMYIQAYKTSNLRMKIIKNDFPSHPLYLEGALTRSTHYQQYQPV VTLQKGYTIHWDQTAPAELAIWLINFNKGDWIRVGLCYPRGTTFSILSDVHNRLLKQTSKTGVFVRTLQMD KVEQSYPGRSHYYWDEDSGLLFLKLKAQNEREKFAFCSMKGCERIKIKALIPKNAGVSDCTATAYPKFTER AVVDVPMPKKLFGSQLKTKDHFLEVKMESSKQHFFHLWNDFAYIEVDGKKYPSSEDGIQVVVIDGNQGRV VSHTSFRNSILQGIPWQLFNYVATIPDNSIVLMASKGRYVSRGPWTRVLEKLGADRGLKLKEQMAFVGFKG SFRPIWVTLDTEDHKAKIFQVVPIPVVKKKKL corresponding to amino acids 126-1013 of Q9ULM1 (SEQ ID NO:989), which also corresponds to amino acids 1-888 of R30650_PEA_{—}2_P4 (SEQ ID NO:991).

[0580] According to preferred embodiments of the present invention, there is provided an isolated chimeric polypeptide encoding for R30650_PEA_{—}2_P4 (SEQ ID NO:991), comprising a first amino acid sequence being at least 90% homologous to MYLHIGEEIDGVDMRAEVGLLSRNIWMGEMEDKCYPYRNHICNFFDFDTFGGHIKFALGFKAAHLEGTELK HMGQQLVGQYPIHFHLAGDVDERGGYDPPTYIRDLSIHHTFSRCVTVHGSNGLLIKDVVGYNSLGHCFFTE DGPEERNTFDHCLGLLVKSGTLLPSDRDSKMCKMITEDSYPGYIPKPRQDCNAVSTFWMANPNNNLINCAA AGSEETGFWFIFHHVPTGPSVGMYSPGYSEHIPLGKFYNNRAHSNYRAGMIIDNGVKTTEASAKDKRPFLSII SARYSPHQDADPLKPREPAIIRHFIAYKNQDHGAWLRGGDVWLDSCRFADNGIGLTLASGGTFPYDDGSKQ EIKNSLFVGESGNVGTEMMDNRIWGPGGLDHSGRTLPIGQNFPIRGIQLYDGPINIQNCTFRKFVALEGRHTS ALAFRLNNAWQSCPHNNVTGIAFEDVPITSRVFFGEPGPWFNQLDMDGDKTSVFHDVDGSVSEYPGSYLTK ND corresponding to amino acids 474-977 of Q8WUJ3 (SEQ ID NO:987), which also corresponds to amino acids 1-504 of R30650_PEA_{—}2_P4 (SEQ ID NO:991), and a second amino acid sequence being at least 70%, optionally at least 80%, preferably at least 85%, more preferably at least 90% and most preferably at least 95% homologous to a polypeptide having the sequence NWLVRHPDCINVPDWRGAICSGCYAQMYIQAYKTSNLRMKIIKNDFPSHPLYLEGALTRSTHYQQYQPVVT LQKGYTIHWDQTAPAELAIWLINFNKGDWIRVGLCYPRGTTFSILSDVHNRLLKQTSKTGVFVRTLQMDKV EQSYPGRSHYYWDEDSGLLFLKLKAQNEREKFAFCSMKGCERIKIKALIPKNAGVSDCTATAYPKFTERAV VDVPMPKKLFGSQLKTKDHFLEVKMESSKQHFFHLWNDFAYIEVDGKKYPSSEDGIQVVVIDGNQGRVVS HTSFRNSILQGIPWQLFNYVATIPDNSIVLMASKGRYVSRGPWTRVLEKLGADRGLKLKEQMAFVGFKGSF RPIWVTLDTEDHKAKIFQVVPIPVVKKKKL (SEQ ID NO:1465) corresponding to amino acids 505-888 of R30650_PEA_{—}2_P4 (SEQ ID NO:991), wherein said first amino acid sequence and second amino acid sequence are contiguous and in a sequential order.

[0581] According to preferred embodiments of the present invention, there is provided an isolated polypeptide encoding for a tail of R30650_PEA_{—}2_P4 (SEQ ID NO:991), comprising a polypeptide being at least 70%, optionally at least about 80%, preferably at least about 85%, more preferably at least about 90% and most preferably at least about 95% homologous to the sequence NWLVRHPDCINVPDWRGAICSGCYAQMYIQAYKTSNLRMKIIKNDFPSHPLYLEGALTRSTHYQQYQPVVT LQKGYTIHWDQTAPAELAIWLINFNKGDWIRVGLCYPRGTTFSILSDVHNRLLKQTSKTGVFVRTLQMDKV EQSYPGRSHYYWDEDSGLLFLKLKAQNEREKFAFCSMKGCERIKIKALIPKNAGVSDCTATAYPKFTERAV VDVPMPKKLFGSQLKTKDHFLEVKMESSKQHFFHLWNDFAYIEVDGKKYPSSEDGIQVVVIDGNQGRVVS HTSFRNSILQGIPWQLFNYVATIPDNSIVLMASKGRYVSRGPWTRVLEKLGADRGLKLKEQMAFVGFKGSF RPIWVTLDTEDHKAKIFQVVPIPVVKKKKL (SEQ ID NO:1465) in R30650_PEA_{—}2_P4 (SEQ ID NO:991).

[0582] According to preferred embodiments of the present invention, there is provided an isolated chimeric polypeptide encoding for R30650_PEA_{—}2_P4 (SEQ ID NO:991), comprising a first amino acid sequence being at least 70%, optionally at least 80%, preferably at least 85%, more preferably at least 90% and most preferably at least 95% homologous to a polypeptide having the sequence MYLHIGEEIDGVDMRAEVGLLSRNIIVMGEMEDKCYPYRNHICNFFDFDTFGGHIKFALGFKAAHLEGTELK HMGQQLVGQYPIHFHLAGD (SEQ ID NO:1466) corresponding to amino acids 1-91 of R30650_PEA_{—}2_P4 (SEQ ID NO:991), and a second amino acid sequence being at least 90% homologous to VDERGGYDPPTYIRDLSIHHTFSRCVTVHGSNGLLIKDVVGYNSLGHCFFTEDGPEERNTFDHCLGLLVKSG TLLPSDRDSKMCKMITEDSYPGYIPKPRQDCNAVSTFWMANPNNNLINCAAAGSEETGFWFIFHHVPTGPSV GMYSPGYSEHIPLGKFYNNPAHSNYRAGMIIDNGVKTTEASAKDKRPFLSIISARYSPHQDADPLKPREPAII RHFIAYKNQDHGAWLRGGDVWLDSCRFADNGIGLTLASGGTFPYDDGSKQEIKNSLFVGESGNVGTEMMD NRIWGPGGLDHSGRTLPIGQNFPIRGIQLYDGPINIQNCTFRKFVALEGRHTSALAFRLNNAWQSCPHNNVT GIAFEDVPITSRVFFGEPGPWFNQLDMDGDKTSVFHDVDGSVSEYPGSYLTKNDNWLVRHPDCINVPDWRG AICSGCYAQMYIQAYKTSNLRMKIIKNDFPSHPLYLEGALTRSTHYQQYQPVVTLQKGYTIHWDQTAPAEL AIWLINFNKGDWIRVGLCYPRGTTFSILSDVHNRLLKQTSKTGVFVRTLQMDKVEQSYPGRSHYYWDEDSG LLFLKLKAQNEREKFAFCSMKGCERIKIKALIPKNAGVSDCTATAYPKFTERAVVDVPMPKKLFGSQLKTK DHFLEVKMESSKQHFFHLWNDFAYIEVDGKKYPSSEDGIQVVVIDGNQGRVVSHTSFRNSILQGIPWQLFNY VATIPDNSIVLMASKGRYVSRGPWTRVLEKLGADRGLKLKEQMAFVGFKGSFRPIWVTLDTEDHKAKIFQV VPIPVVKKKKL corresponding to amino acids 8-804 of Q9NPN9 (SEQ ID NO:988), which also corresponds to amino acids 92-888 of R30650_PEA_{—}2_P4 (SEQ ID NO:991), wherein said first amino acid sequence and second amino acid sequence are contiguous and in a sequential order.

[0583] According to preferred embodiments of the present invention, there is provided an isolated polypeptide encoding for a head of R30650_PEA_{—}2_P4 (SEQ ID NO:991), comprising a polypeptide being at least 70%, optionally at least about 80%, preferably at least about 85%, more preferably at least about 90% and most preferably at least about 95% homologous to the sequence MYLHIGEEIDGVDMRAEVGLLSRNIIVMGEMEDKCYPYRNHICNFFDFDTFGGHIKFALGFKAAHLEGTELK HMGQQLVGQYPIHFHLAGD (SEQ ID NO:1466) of R30650_PEA_{—}2_P4 (SEQ ID NO:991).

[0584] According to preferred embodiments of the present invention, there is provided an isolated chimeric polypeptide encoding for R30650_PEA_{—}2_P4 (SEQ ID NO:991), comprising a first amino acid sequence being at least 70%, optionally at least 80%, preferably at least 85%, more preferably at least 90% and most preferably at least 95% homologous to a polypeptide having the sequence MYLHIGEEIDGVDMRAEVGLLSRNIIVMGEMEDKCYPYRNHICNFFDFDTFGGHIKFALGFKAAHLEGTELK HMGQQLVGQYPIHFHLAGDVDERGGYDPPTYIRDLSIHHTFSRCVTVHGSNGLLIKDVVGYNSLGHCFFTE DGPEERNTFDHCLGLLVKSGTLLPSDRDSKMCKMITEDSYPGYIPKPRQDCNAVSTFWMANPNNNLINCAA AGSEETGFWFIFHHVPTGPSVGMYSPGYSEHIPLGKFYNNPAHSNYRAGMIIDNGVKTTEASAKDKRPFLSII SARYSPHQDADPLKPREPAIIRHFIAYKNQDHGAWLRGGDVWLDSCRFADNGIGLTLASGGTFPYDDGSKQ EIKNSLFVGESGNVGTEMMDNRIWGPGGLDH corresponding to amino acids 1-389 of R30650_PEA_{—}2_P4 (SEQ ID NO:991), and a second amino acid sequence being at least 90% homologous to SGRTLPIGQNFPIRGIQLYDGPINIQNCTFRKFVALEGRHTSALAFRLNNAWQSCPHNNVTGIAFEDVPITSRV FFGEPGPWFNQLDMDGDKTSVFHDVDGSVSEYPGSYLTKNDNWLVRHPDCINVPDWRGAICSGCYAQMYI QAYKTSNLRMKIIKNDFPSHPLYLEGALTRSTHYQQYQPVVTLQKGYTIHWDQTAPAELAIWLINFNKGDW IRVGLCYPRGTTFSILSDVHNRLLKQTSKTGVFVRTLQMDKVEQSYPGRSHYYWDEDSGLLFLKLKAQNER EKFAFCSMKGCERIKIKALIPKNAGVSDCTATAYPKFTERAVVDVPMPKKLFGSQLKTKDHFLEVKMESSK QHFFHLWNDFAYIEVDGKKYPSSEDGIQVVVIDGNQGRVVSHTSFRNSILQGIPWQLFNYVATIPDNSIVLM ASKGRYVSRGPWTRVLEKLGADRGLKLKEQMAFVGFKGSFRPIWVTLDTEDHKAKIFQVVPIPVVKKKKL corresponding to amino acids 2-500 of Q9H1K5 (SEQ ID NO:990), which also corresponds to amino acids 390-888 of R30650_PEA_{—}2_P4 (SEQ ID NO:991), wherein said first amino acid sequence and second amino acid sequence are contiguous and in a sequential order.

[0585] According to preferred embodiments of the present invention, there is provided an isolated polypeptide encoding for a head of R30650_PEA_{—}2_P4 (SEQ ID NO:991), comprising a polypeptide being at least 70%, optionally at least about 80%, preferably at least about 85%, more preferably at least about 90% and most preferably at least about 95% homologous to the sequence MYLHIGEEIDGVDMRAEVGLLSRNIIVMGEMEDKCYPYRNHICNFFDFDTFGGHIKFALGFKAAHLEGTELK HMGQQLVGQYPIHFHLAGDVDERGGYDPPTYIRDLSIHHTFSRCVTVHGSNGLLIKDVVGYNSLGHCFFTE DGPEERNTFDHCLGLLVKSGTLLPSDRDSKMCKMITEDSYPGYIPKPRQDCNAVSTFWMANPNNNLINCAA AGSEETGFWFIFHHVPTGPSVGMYSPGYSEHIPLGKFYNNRAHSNYRAGMIIDNGVKTTEASAKDKRPFLSII SARYSPHQDADPLKPREPAIIRHFIAYKNQDHGAWLRGGDVWLDSCRFADNGIGLTLASGGTFPYDDGSKQ EIKNSLFVGESGNVGTEMMDNRIWGPGGLDH of R30650_PEA_{—}2_P4 (SEQ ID NO:991).

[0586] According to preferred embodiments of the present invention, there is provided an isolated chimeric polypeptide encoding for R30650_PEA_{—}2_P5 (SEQ ID NO:992), comprising a first amino acid sequence being at least 90% homologous to MDGVNLSTEVVYKKGQDYRFACYDRGRACRSYRVRFLCGKPVRPKLTVTIDTNVNSTILNLEDNVQSWKP GDTLVIASTDYSMYQAEEFQVLPCRSCAPNQVKVAGKPMYLHIGEEIDGVDMRAEVGLLSRNIIVMGEMED KCYPYRNHICNFFDFDTFGGHIKFALGFKAAHLEGTELKHMGQQLVGQYPIHFHLAGDVDERGGYDPPTYI RDLSIHHTFSRCVTVHGSNGLLIKDVVGYNSLGHCFFTEDGPEERNTFDHCLGLLVKSGTLLPSDRDSKMCK MITEDSYPGYIPKPRQDCNAVSTFWMANPNNNLINCAAAGSEETGFWFIFHHVPTGPSVGMYSPGYSEHIPL GKFYNNRAHSNYRAGMIIDNGVKTTEASAKDKRPFLSIISARYSPHQDADPLKPREPAIIRHFIAYKNQDHGA WLRGGDVWLDSCRFADNGIGLTLASGGTFPYDDGSKQEIKNSLFVGESGNVGTEMMDNRIWGPGGLDHSG RTLPIGQNFPIRGIQLYDGPINIQNCTFRKFVALEGRHTSALAFRLNNAWQSCPHNNVTGIAFEDVPITSRVFF GEPGPWFNQLDMDGDKTSVFHDVDGSVSEYPGSYLTKNDNWLVRHPDCINVPDWRGAICSGCYAQMYIQ AYKTSNLRMKIIKNDFPSHPLYLEGALTRSTHYQQYQPVVTLQKGYTIHWDQTAPAELAIWLINFNKGDWI RVGLCYPRGTTFSILSDVHNRLLKQTSKTGVFVRTLQMDKVEQSYPGRSHYYWDEDSGLLFLKLKAQNERE KFAFCSMKGCERIKIKALIPKNAGVSDCTATAYPKFTERAVVDVPMPKKLFGSQLKTKDHFLEVKMESSKQ HFFHLWNDFAYIEVDGKKYPSSEDGIQVVVIDGNQGRVVSHTSFRNSILQGIPWQLFNYVATIPDNSIVLMA SKGRYVSRGPWTRVLEKLGADRGLKLKEQMAFVGFKGSFRPIWVTLDTEDHKAKIFQVVPIPVVKKKKL corresponding to amino acids 18-1013 of Q9ULM1 (SEQ ID NO:989), which also corresponds to amino acids 1-996 of R30650_PEA_{—}2_P5 (SEQ ID NO:992).

[0587] According to preferred embodiments of the present invention, there is provided an isolated chimeric polypeptide encoding for R30650_PEA_{—}2_P5 (SEQ ID NO:992), comprising a first amino acid sequence being at least 90% homologous to MDGVNLSTEVVYKKGQDYRFACYDRGRACRSYRVRFLCGKPVRPKLTVTIDTNVNSTILNLEDNVQSWKP GDTLVIASTDYSMYQAEEFQVLPCRSCAPNQVKVAGKPMYLHIGEEIDGVDMRAEVGLLSRNIIVMGEMED KCYPYRNHICNFFDFDTFGGHIKFALGFKAAHLEGTELKHMGQQLVGQYPIHFHLAGDVDERGGYDPPTYI RDLSIHHTFSRCVTVHGSNGLLIKDVVGYNSLGHCFFTEDGPEERNTFDHCLGLLVKSGTLLPSDRDSKMCK MITEDSYPGYIPKPRQDCNAVSTFWMANPNNNLINCAAAGSEETGFWFIFHHVPTGPSVGMYSPGYSEHIPL GKFYNNRAHSNYRAGMIIDNGVKTTEASAKDKRPFLSIISARYSPHQDADPLKPREPAIIRHFIAYKNQDHGA WLRGGDVWLDSCRFADNGIGLTLASGGTFPYDDGSKQEIKNSLFVGESGNVGTEMMDNRIWGPGGLDHSG RTLPIGQNFPIRGIQLYDGPINIQNCTFRKFVALEGRHTSALAFRLNNAWQSCPHNNVTGIAFEDVPITSRVFF GEPGPWFNQLDMDGDKTSVFHDVDGSVSEYPGSYLTKND corresponding to amino acids 366-977 of Q8WUJ3 (SEQ ID NO:987), which also corresponds to amino acids 1-612 of R30650_PEA_{—}2_P5 (SEQ ID NO:992), and a second amino acid sequence being at least 70%, optionally at least 80%, preferably at least 85%, more preferably at least 90% and most preferably at least 95% homologous to a polypeptide having the sequence NWLVRHPDCINVPDWRGAICSGCYAQMYIQAYKTSNLRMKIIKNDFPSHPLYLEGALTRSTHYQQYQPVVT LQKGYTIHWDQTAPAELAIWLINFNKGDWIRVGLCYPRGTTFSILSDVHNRLLKQTSKTGVFVRTLQMDKV EQSYPGRSHYYWDEDSGLLFLKLKAQNEREKFAFCSMKGCERIKIKALIPKNAGVSDCTATAYPKFTERAV VDVPMPKKLFGSQLKTKDHFLEVKMESSKQHFFHLWNDFAYIEVDGKKYPSSEDGIQVVVIDGNQGRVVS HTSFRNSILQGIPWQLFNYVATIPDNSIVLMASKGRYVSRGPWTRVLEKLGADRGLKLKEQMAFVGFKGSF RPIWVTLDTEDHKAKIFQVVPIPVVKKKKL (SEQ ID NO:1465) corresponding to amino acids 613-996 of R30650_PEA_{—}2_P5 (SEQ ID NO:992), wherein said first amino acid sequence and second amino acid sequence are contiguous and in a sequential order.

[0588] According to preferred embodiments of the present invention, there is provided an isolated polypeptide encoding for a tail of R30650_PEA_{—}2_P5 (SEQ ID NO:992), comprising a polypeptide being at least 70%, optionally at least about 80%, preferably at least about 85%, more preferably at least about 90% and most preferably at least about 95% homologous to the sequence NWLVRHPDCINVPDWRGAICSGCYAQMYIQAYKTSNLRMKIIKNDFPSHPLYLEGALTRSTHYQQYQPVVT LQKGYTIHWDQTAPAELAIWLINFNKGDWIRVGLCYPRGTTFSILSDVHNRLLKQTSKTGVFVRTLQMDKV EQSYPGRSHYYWDEDSGLLFLKLKAQNEREKFAFCSMKGCERIKIKALIPKNAGVSDCTATAYPKFTERAV VDVPMPKKLFGSQLKTKDHFLEVKMESSKQHFFHLWNDFAYIEVDGKKYPSSEDGIQVVVIDGNQGRVVS HTSFRNSILQGIPWQLFNYVATIPDNSIVLMASKGRYVSRGPWTRVLEKLGADRGLKLKEQMAFVGFKGSF RPIWVTLDTEDHKAKIFQVVPIPVVKKKKL (SEQ ID NO:1465) in R30650_PEA_{—}2_P5 (SEQ ID NO:992).

[0589] According to preferred embodiments of the present invention, there is provided an isolated chimeric polypeptide encoding for R30650_PEA_{—}2_P5 (SEQ ID NO:992), comprising a first amino acid sequence being at least 70%, optionally at least 80%, preferably at least 85%, more preferably at least 90% and most preferably at least 95% homologous to a polypeptide having the sequence MDGVNLSTEVVYKKGQDYRFACYDRGRACRSYRVRFLCGKPVRPKLTVTIDTNVNSTILNLEDNVQSWKP GDTLVIASTDYSMYQAEEFQVLPCRSCAPNQVKVAGKPMYLHIGEEIDGVDMRAEVGLLSRNIIVMGEMED KCYPYRNHICNFFDFDTFGGHIKFALGFKAAHLEGTELKHMGQQLVGQYPIHFHLAGD (SEQ ID NO:1468) corresponding to amino acids 1-199 of R30650_PEA_{—}2_P5 (SEQ ID NO:992), and a second amino acid sequence being at least 90% homologous to VDERGGYDPPTYIRDLSIHHTFSRCVTVHGSNGLLIKDVVGYNSLGHCFFTEDGPEERNTFDHCLGLLVKSG TLLPSDRDSKMCKMITEDSYPGYIPKPRQDCNAVSTFWMANPNNNLINCAAAGSEETGFWFIFHHVPTGPSV GMYSPGYSEHIPLGKFYNNRAHSNYRAGMIIDNGVKTTEASAKDKRPFLSIISARYSPHQDADPLKPREPAII RHFIAYKNQDHGAWLRGGDVWLDSCRFADNGIGLTLASGGTFPYDDGSKQEIKNSLFVGESGNVGTEMMD NRIWGPGGLDHSGRTLPIGQNFPIRGIQLYDGPINIQNCTFRKFVALEGRHTSALAFRLNNAWQSCPHNNVT GIAFEDVPITSRVFFGEPGPWFNQLDMDGDKTSVFHDVDGSVSEYPGSYLTKNDNWLVRHPDCINVPDWRG AICSGCYAQMYIQAYKTSNLRMKIIKNDFPSHPLYLEGALTRSTHYQQYQPVVTLQKGYTIHWDQTAPAEL AIWLINFNKGDWIRVGLCYPRGTTFSILSDVHNRLLKQTSKTGVFVRTLQMDKVEQSYPGRSHYYWDEDSG LLFLKLKAQNEREKFAFCSMKGCERIKIKALIPKNAGVSDCTATAYPKFTERAVVDVPMPKKLFGSQLKTK DHFLEVKMESSKQHFFHLWNDFAYIEVDGKKYPSSEDGIQVVVIDGNQGRVVSHTSFRNSILQGIPWQLFNY VATIPDNSIVLMASKGRYVSRGPWTRVLEKLGADRGLKLKEQMAFVGFKGSFRPIWVTLDTEDHKAKIFQV VPIPVVKKKKL corresponding to amino acids 8-804 of Q9NPN9 (SEQ ID NO:988), which also corresponds to amino acids 200-996 of R30650_PEA_{—}2_P5 (SEQ ID NO:992), wherein said first amino acid sequence and second amino acid sequence are contiguous and in a sequential order.

[0590] According to preferred embodiments of the present invention, there is provided an isolated polypeptide encoding for a head of R30650_PEA_{—}2_P5 (SEQ ID NO:992), comprising a polypeptide being at least 70%, optionally at least about 80%, preferably at least about 85%, more preferably at least about 90% and most preferably at least about 95% homologous to the sequence MDGVNLSTEVVYKKGQDYRFACYDRGRACRSYRVRFLCGKPVRPKLTVTIDTNVNSTILNLEDNVQSWKP GDTLVIASTDYSMYQAEEFQVLPCRSCAPNQVKVAGKPMYLHIGEEIDGVDMRAEVGLLSRNIIVMGEMED KCYPYRNHICNFFDFDTFGGHIKFALGFKAAHLEGTELKHMGQQLVGQYPIHFHLAGD (SEQ ID NO:1468) of R30650_PEA_{—}2_P5 (SEQ ID NO:992).

[0591] According to preferred embodiments of the present invention, there is provided an isolated chimeric polypeptide encoding for R30650_PEA_{—}2_P5 (SEQ ID NO:992), comprising a first amino acid sequence being at least 70%, optionally at least 80%, preferably at least 85%, more preferably at least 90% and most preferably at least 95% homologous to a polypeptide having the sequence MDGVNLSTEVVYKKGQDYRFACYDRGPACRSYRVRFLCGKPVRPKLTVTIDTNVNSTILNLEDNVQSWKP GDTLVIASTDYSMYQAEEFQVLPCRSCAPNQVKVAGKPMYLHIGEEIDGVDMRAEVGLLSRNIIVMGEMED KCYPYRNHICNFFDFDTFGGHIKFALGFKAAHLEGTELKHMGQQLVGQYPIHFHLAGDVDERGGYDPPTYI RDLSIHHTFSRCVTVHGSNGLLIKDVVGYNSLGHCFFTEDGPEERNTFDHCLGLLVKSGTLLPSDRDSKMCK MITEDSYPGYIPKPRQDCNAVSTFWMANPNNNLINCAAAGSEETGFWFIFHHVPTGPSVGMYSPGYSEHIPL GKFYNNPAHSNYRAGMIIDNGVKTTEASAKDKRPFLSIISARYSPHQDADPLKPREPAIIRHFIAYKNQDHGA WLRGGDVWLDSCRFADNGIGLTLASGGTFPYDDGSKQEIKNSLFVGESGNVGTEMMDNRIWGPGGLDH corresponding to amino acids 1-497 of R30650_PEA_{—}2_P5 (SEQ ID NO:992), and a second amino acid sequence being at least 90% homologous to SGRTLPIGQNFPIRGIQLYDGPINIQNCTFRKFVALEGRHTSALAFRLNNAWQSCPHNNVTGIAFEDVPITSRV FFGEPGPWFNQLDMDGDKTSVFHDVDGSVSEYPGSYLTKNDNWLVRHPDCINVPDWRGAICSGCYAQMYI QAYKTSNLRMKIIKNDFPSHPLYLEGALTRSTHYQQYQPVVTLQKGYTIHWDQTAPAELAIWLINFNKGDW IRVGLCYPRGTTFSILSDVHNRLLKQTSKTGVFVRTLQMDKVEQSYPGRSHYYWDEDSGLLFLKLKAQNER EKFAFCSMKGCERIKIKALIPKNAGVSDCTATAYPKFTERAVVDVPMPKKLFGSQLKTKDHFLEVKMESSK QHFFHLWNDFAYIEVDGKKYPSSEDGIQVVVIDGNQGRVVSHTSFRNSILQGIPWQLFNYVATIPDNSIVLM ASKGRYVSRGPWTRVLEKLGADRGLKLKEQMAFVGFKGSFRPIWVTLDTEDHKAKIFQVVPIPVVKKKKL corresponding to amino acids 2-500 of Q9H1K5 (SEQ ID NO:990), which also corresponds to amino acids 498-996 of R30650_PEA_{—}2_P5 (SEQ ID NO:992), wherein said first amino acid sequence and second amino acid sequence are contiguous and in a sequential order.

[0592] According to preferred embodiments of the present invention, there is provided an isolated polypeptide encoding for a head of R30650_PEA_{—}2_P5 (SEQ ID NO:992), comprising a polypeptide being at least 70%, optionally at least about 80%, preferably at least about 85%, more preferably at least about 90% and most preferably at least about 95% homologous to the sequence MDGVNLSTEVVYKKGQDYRFACYDRGRACRSYRVRFLCGKPVRPKLTVTIDTNVNSTILNLEDNVQSWKP GDTLVIASTDYSMYQAEEFQVLPCRSCAPNQVKVAGKPMYLHIGEEIDGVDMRAEVGLLSRNIIVMGEMED KCYPYRNHICNFFDFDTFGGHIKFALGFKAAHLEGTELKHMGQQLVGQYPIHFHLAGDVDERGGYDPPTYI RDLSIHHTFSRCVTVHGSNGLLIKDVVGYNSLGHCFFTEDGPEERNTFDHCLGLLVKSGTLLPSDRDSKMCK MITEDSYPGYIPKPRQDCNAVSTFWMANPNNNLINCAAAGSEETGFWFIFHHVPTGPSVGMYSPGYSEHIPL GKFYNNRAHSNYRAGMIIDNGVKTTEASAKDKRPFLSIISARYSPHQDADPLKPREPAIIRHFIAYKNQDHGA WLRGGDVWLDSCRFADNGIGLTLASGGTFPYDDGSKQEIKNSLFVGESGNVGTEMMDNRIWGPGGLDH of R30650_PEA_{—}2_P5 (SEQ ID NO:992).

[0593] According to preferred embodiments of the present invention, there is provided an isolated chimeric polypeptide encoding for R30650_PEA_{—}2_P8 (SEQ ID NO:993), comprising a first amino acid sequence being at least 70%, optionally at least 80%, preferably at least 85%, more preferably at least 90% and most preferably at least 95% homologous to a polypeptide having the sequence MGAAGRQDFLFKAMLTISWLTLTCFPGATSTVAAGCPDQSPELQPWNPGHDQDHHVHIGQGKTLLLTSSAT VYSIHISEGGKLVIKDHDEPIVLRTRHILIDNGGELHAGSALCPFQGNFTIILYGRADEGIQPDPYYGLKYIGV GKGGALELHGQKKLSWTFLNKTLHPGGMAEGGYFFERSWGHRGVIVHVIDPKSGTVIHSDRFDTYRSKKES ERLVQYLNAVPDGRILSVAVNDEGSRNLDDMARKAMTKLGSKHFLHLGFRHPWSFLTVKGNPSSSVEDHIE YHGHRGSAAARVFKLFQTEHGEYFNVSLSSEWVQDVEWTEWFDHDKVSQTKGGEKISDLWK (SEQ ID NO:1469) corresponding to amino acids 1-348 of R30650_PEA_{—}2_P8 (SEQ ID NO:993), a second amino acid sequence being at least 90% homologous to AHPGKICNRPIDIQATTMDGVNLSTEVVYKKGQDYRFACYDRGRACRSYRVRFLCGKPVRPKLTVTIDTNV NSTILNLEDNVQSWKPGDTLVIASTDYSMYQAEEFQVLPCRSCAPNQVKVAGKPMYLHIGEEIDGVDMRAE VGLLSRNIIVMGEMEDKCYPYRNHICNFFDFDTFGGHIKFALGFKAAHLEGTELKHMGQQLVGQYPIHFHL AGDVDERGGYDPPTYIRDLSIHHTFSRCVTVHGSNGLLIKDVVGYNSLGHCFFTEDGPEERNTFDHCLGLLV KSGTLLPSDRDSKMCKMITEDSYPGYIPKPRQDCNAVSTFWMANPNNNLINCAAAGSEETGFWFIFHHVPT GPSVGMYSPGYSEHIPLGKFYNNRAHSNYRAGMIIDNGVKTTEASAKDKRPFLSIISARYSPHQDADPLKPR EPAIIRHFIAYKNQDHGAWLRGGDVWLDSCRFADNGIGLTLASGGTFPYDDGSKQEIKNSLFVGESGNVGT EMMDNRIWGPGGLDHSGRTLPIGQNFPIRGIQLYDGPINIQNCTFRKFVALEGRHTSALAFRLNNAWQSCPH NNVTGIAFEDVPITSRVFFGEPGPWFNQLDMDGDKTSVFHDVDGSVSEYPGSYLTKNDNWLVRHPDCINVP DWRGAICSGCYAQMYIQAYKTSNLRMKIIKNDFPSHPLYLEGALTRSTHYQQYQPVVTLQKGYTIHWDQT APAELAIWLINFNKGDWIRVGLCYPRGTTFSILSDVHNRLLKQTSKTGVFVRTLQMDKVEQSYPGRSHYYW DEDSG corresponding to amino acids 1-788 of Q9ULM1 (SEQ ID NO:989), which also corresponds to amino acids 349-1136 of R30650_PEA_{—}2_P8 (SEQ ID NO:993), and a third amino acid sequence being at least 70%, optionally at least 80%, preferably at least 85%, more preferably at least 90% and most preferably at least 95% homologous to a polypeptide having the sequence KQRTISWR (SEQ ID NO:1470) corresponding to amino acids 1137-1144 of R30650_PEA_{—}2_P8 (SEQ ID NO:993), wherein said first amino acid sequence, second amino acid sequence and third amino acid sequence are contiguous and in a sequential order.

[0594] According to preferred embodiments of the present invention, there is provided an isolated polypeptide encoding for a head of R30650_PEA_{—}2_P8 (SEQ ID NO:993), comprising a polypeptide being at least 70%, optionally at least about 80%, preferably at least about 85%, more preferably at least about 90% and most preferably at least about 95% homologous to the sequence MGAAGRQDFLFKAMLTISWLTLTCFPGATSTVAAGCPDQSPELQPWNPGHDQDHHVHIGQGKTLLLTSSAT VYSIHISEGGKLVIKDHDEPIVLRTRHILIDNGGELHAGSALCPFQGNFTIILYGRADEGIQPDPYYGLKYIGV GKGGALELHGQKKLSWTFLNKTLHPGGMAEGGYFFERSWGHRGVIVHVIDPKSGTVIHSDRFDTYRSKKES ERLVQYLNAVPDGRILSVAVNDEGSRNLDDMARKAMTKLGSKHFLHLGFRHPWSFLTVKGNPSSSVEDHIE YHGHRGSAAARVFKLFQTEHGEYFNVSLSSEWVQDVEWTEWFDHDKVSQTKGGEKISDLWK (SEQ ID NO:1469) of R30650_PEA_{—}2_P8 (SEQ ID NO:993).

[0595] According to preferred embodiments of the present invention, there is provided an isolated polypeptide encoding for a tail of R30650_PEA_{—}2_P8 (SEQ ID NO:993), comprising a polypeptide being at least 70%, optionally at least about 80%, preferably at least about 85%, more preferably at least about 90% and most preferably at least about 95% homologous to the sequence KQRTISWR (SEQ ID NO:1470) in R30650_PEA_{—}2_P8 (SEQ ID NO:993).

[0596] According to preferred embodiments of the present invention, there is provided an isolated chimeric polypeptide encoding for R30650_PEA_{—}2_P8 (SEQ ID NO:993), comprising a first amino acid sequence being at least 90% homologous to MGAAGRQDFLFKAMLTISWLTLTCFPGATSTVAAGCPDQSPELQPWNPGHDQDHHVRHIGQGKTLLLTSSAT VYSIHISEGGKLVIKDHDEPIVLRTRHILIDNGGELHAGSALCPFQGNFTIILYGRADEGIQPDPYYGLKYIGV GKGGALELHGQKKLSWTFLNKTLHPGGMAEGGYFFERSWGHRGVIVHVIDPKSGTVIHSDRFDTYRSKKES ERLVQYLNAVPDGRILSVAVNDEGSRNLDDMARKAMTKLGSKHFLHLGFRIIPWSFLTVKGNPSSSVEDHIE YHGHRGSAAARVFKLFQTEHGEYFNVSLSSEWVQDVEWTEWFDHDKVSQTKGGEKISDLWKAHPGKICN RPIDIQATTMDGVNLSTEVVYKKGQDYRFACYDRGRACRSYRVRFLCGKPVRPKLTVTIDTNVNSTILNLE DNVQSWKPGDTLVIASTDYSMYQAEEFQVLPCRSCAPNQVKVAGKPMYLHIGEEIDGVDMRAEVGLLSRN IIVMGEMEDKCYPYRNHICNFFDFDTFGGHIKFALGFKAAHLEGTELKHMGQQLVGQYPIHFHLAGDVDER GGYDPPTYIRDLSIHHTFSRCVTVHGSNGLLIKDVVGYNSLGHCFFTEDGPEERNTFDHCLGLLVKSGTLLPS DRDSKMCKMITEDSYPGYIPKPRQDCNAVSTFWMANPNNNLINCAAAGSEETGFWFIFHHVPTGPSVGMYS PGYSEHIPLGKFYNNRAHSNYRAGMIIDNGVKTTEASAKDKRPFLSIISARYSPHQDADPLKPREPAIIRHFIA YKNQDHGAWLRGGDVWLDSCRFADNGIGLTLASGGTFPYDDGSKQEIKNSLFVGESGNVGTEMMDNRIW GPGGLDHSGRTLPIGQNFPIRGIQLYDGPINIQNCTFRKFVALEGRHTSALAFRLNNAWQSCPHNNVTGIAFE DVPITSRVFFGEPGPWFNQLDMDGDKTSVFHDVDGSVSEYPGSYLTKND corresponding to amino acids 1-977 of Q8WUJ3 (SEQ ID NO:987), which also corresponds to amino acids 1-977 of R30650_PEA_{—}2_P8 (SEQ ID NO:993), and a second amino acid sequence being at least 70%, optionally at least 80%, preferably at least 85%, more preferably at least 90% and most preferably at least 95% homologous to a polypeptide having the sequence NWLVRHPDCINVPDWRGAICSGCYAQMYIQAYKTSNLRMKIIKNDFPSHPLYLEGALTRSTHYQQYQPVVT LQKGYTIHWDQTAPAELAIWLINFNKGDWIRVGLCYPRGTTFSILSDVHNRLLKQTSKTGVFVRTLQMDKV EQSYPGRSHYYWDEDSGKQRTISWR corresponding to amino acids 978-1144 of R30650_PEA_{—}2_P8 (SEQ ID NO:993), wherein said first amino acid sequence and second amino acid sequence are contiguous and in a sequential order.

[0597] According to preferred embodiments of the present invention, there is provided an isolated polypeptide encoding for a tail of R30650_PEA_{—}2_P8 (SEQ ID NO:993), comprising a polypeptide being at least 70%, optionally at least about 80%, preferably at least about 85%, more preferably at least about 90% and most preferably at least about 95% homologous to the sequence NWLVRHPDCINVPDWRGAICSGCYAQMYIQAYKTSNLRMKIIKNDFPSHPLYLEGALTRSTHYQQYQPVVT LQKGYTIHWDQTAPAELAIWLINFNKGDWIRVGLCYPRGTTFSILSDVHNRLLKQTSKTGVFVRTLQMDKV EQSYPGRSHYYWDEDSGKQRTISWR in R30650_PEA_{—}2_P8 (SEQ ID NO:993).

[0598] According to preferred embodiments of the present invention, there is provided an isolated chimeric polypeptide encoding for R30650_PEA_{—}2_P8 (SEQ ID NO:993), comprising a first amino acid sequence being at least 70%, optionally at least 80%, preferably at least 85%, more preferably at least 90% and most preferably at least 95% homologous to a polypeptide having the sequence MGAAGRQDFLFKAMLTISWLTLTCFPGATSTVAAGCPDQSPELQPWNPGHDQDHHVHIGQGKTLLLTSSAT VYSIHISEGGKLVIKDHDEPIVLRTRHILIDNGGELHAGSALCPFQGNFTIILYGRADEGIQPDPYYGLKYIGV GKGGALELHGQKKLSWTFLNKTLHPGGMAEGGYFFERSWGHRGVIVHVIDPKSGTVIHSDRFDTYRSKKES ERLVQYLNAVPDGRILSVAVNDEGSRNLDDMARKAMTKLGSKHFLHLGFRHPWSFLTVKGNPSSSVEDHIE YHGHRGSAAARVFKLFQTEHGEYFNVSLSSEWVQDVEWTEWFDHDKVSQTKGGEKISDLWKAHPGKICN RPIDIQATTMDGVNLSTEVVYKKGQDYRFACYDRGRACRSYRVRFLCGKPVRPKLTVTIDTNVNSTILNLE DNVQSWKPGDTLVIASTDYSMYQAEEFQVLPCRSCAPNQVKVAGKPMYLHIGEEIDGVDMRAEVGLLSRN IIVMGEMEDKCYPYRNHICNFFDFDTFGGHIKFALGFKAAHLEGTELKHMGQQLVGQYPIHFHLAGD corresponding to amino acids 1-564 of R30650_PEA_{—}2_P8 (SEQ ID NO:993), a second amino acid sequence being at least 90% homologous to VDERGGYDPPTYIRDLSIHHTFSRCVTVHGSNGLLIKDVVGYNSLGHCFFTEDGPEERNTFDHCLGLLVKSG TLLPSDRDSKMCKMITEDSYPGYIPKPRQDCNAVSTFWMANPNNNLINCAAAGSEETGFWFIFHHVPTGPSV GMYSPGYSEHIPLGKFYNNRAHSNYRAGMIIDNGVKTTEASAKDKRPFLSIISARYSPHQDADPLKPREPAI RHFIAYKNQDHGAWLRGGDVWLDSCRFADNGIGLTLASGGTFPYDDGSKQEIKNSLFVGESGNVGTEMMD NRIWGPGGLDHSGRTLPIGQNFPIRGIQLYDGPINIQNCTFRKFVALEGRHTSALAFRLNNAWQSCPHNNVT GIAFEDVPITSRVFFGEPGPWFNQLDMDGDKTSVFHDVDGSVSEYPGSYLTKNDNWLVRHPDCINVPDWRG AICSGCYAQMYIQAYKTSNLRMKIIKNDFPSIHPLYLEGALTRSTHYQQYQPVVTLQKGYTIHWDQTAPAEL AIWLINFNKGDWIRVGLCYPRGTTFSILSDVHNRLLKQTSKTGVFVRTLQMDKVEQSYPGRSHYYWDEDSG corresponding to amino acids 8-579 of Q9NPN9 (SEQ ID NO:988), which also corresponds to amino acids 565-1136 of R30650_PEA_{—}2_P8 (SEQ ID NO:993), and a third amino acid sequence being at least 70%, optionally at least 80%, preferably at least 85%, more preferably at least 90% and most preferably at least 95% homologous to a polypeptide having the sequence KQRTISWR (SEQ ID NO:1470) corresponding to amino acids 1137-1144 of R30650_PEA_{—}2_P8 (SEQ ID NO:993), wherein said first amino acid sequence, second amino acid sequence and third amino acid sequence are contiguous and in a sequential order.

[0599] According to preferred embodiments of the present invention, there is provided an isolated polypeptide encoding for a head of R30650_PEA_{—}2_P8 (SEQ ID NO:993), comprising a polypeptide being at least 70%, optionally at least about 80%, preferably at least about 85%, more preferably at least about 90% and most preferably at least about 95% homologous to the sequence MGAAGRQDFLFKAMLTISWLTLTCFPGATSTVAAGCPDQSPELQPWNPGHDQDHHVHIGQGKTLLLTSSAT VYSIHISEGGKLVIKDHDEPIVLRTRHILIDNGGELHAGSALCPFQGNFTIILYGRADEGIQPDPYYGLKYIGV GKGGALELHGQKKLSWTFLNKTLHPGGMAEGGYFFERSWGHRGVIVHVIDPKSGTVIHSDRFDTYRSKKES ERLVQYLNAVPDGRILSVAVNDEGSRNLDDMARKAMTKLGSKHFLHLGFRHPWSFLTVKGNPSSSVEDHIE YHGHRGSAAARVFKLFQTEHGEYFNVSLSSEWVQDVEWTEWFDHDKVSQTKGGEKISDLWKAHPGKICN RPIDIQATTMDGVNLSTEVVYKKGQDYRFACYDRGRACRSYRVRFLCGKPVRPKLTVTIDTNVNSTILNLE DNVQSWKPGDTLVIASTDYSMYQAEEFQVLPCRSCAPNQVKVAGKPMYLHIGEEIDGVDMRAEVGLLSRN IIVMGEMEDKCYPYRNHICNFFDFDTFGGHIKFALGFKAAHLEGTELKHMGQQLVGQYPIHFHLAGD of R30650_PEA_{—}2_P8 (SEQ ID NO:993).

[0600] According to preferred embodiments of the present invention, there is provided an isolated polypeptide encoding for a tail of R30650_PEA_{—}2_P8 (SEQ ID NO:993), comprising a polypeptide being at least 70%, optionally at least about 80%, preferably at least about 85%, more preferably at least about 90% and most preferably at least about 95% homologous to the sequence KQRTISWR (SEQ ID NO:1470) in R30650_PEA_{—}2_P8 (SEQ ID NO:993).

[0601] According to preferred embodiments of the present invention, there is provided an isolated chimeric polypeptide encoding for R30650_PEA_{—}2_P8 (SEQ ID NO:993), comprising a first amino acid sequence being at least 70%, optionally at least 80%, preferably at least 85%, more preferably at least 90% and most preferably at least 95% homologous to a polypeptide having the sequence MGAAGRQDFLFKAMLTISWLTLTCFPGATSTVAAGCPDQSPELQPWNPGHDQDHHVHIGQGKTLLLTSSAT VYSIHISEGGKLVIKDHDEPIVLRTRHILIDNGGELHAGSALCPFQGNFTIILYGRADEGIQPDPYYGLKYIGV GKGGALELHGQKKLSWTFLNKTLHPGGMAEGGYFFERSWGHRGVIVHVIDPKSGTVIHSDRFDTYRSKKES ERLVQYLNAVPDGRILSVAVNDEGSRNLDDMARKAMTKLGSKHFLHLGFRHPWSFLTVKGNPSSSVEDHIE YHGHRGSAAARVFKLFQTEHGEYFNVSLSSEWVQDVEWTEWFDHDKVSQTKGGEKISDLWKAHPGKICN RPIDIQATTMDGVNLSTEVVYKKGQDYRFACYDRGRACRSYRVRFLCGKPVRPKLTVTIDTNVNSTILNLE DNVQSWKPGDTLVIASTDYSMYQAEEFQVLPCRSCAPNQVKVAGKPMYLHIGEEIDGVDMRAEVGLLSRN IIVMGEMEDKCYPYRNHICNFFDFDTFGGHIKFALGFKAAHLEGTELKHMGQQLVGQYPIHFHLAGDVDER GGYDPPTYIRDLSIHHTFSRCVTVHGSNGLLIKDVVGYNSLGHCFFTEDGPEERNTFDHCLGLLVKSGTLLPS DRDSKMCKMITEDSYPGYIPKPRQDCNAVSTFWMANPNNNLINCAAAGSEETGFWFIFHHVPTGPSVGMYS PGYSEHIPLGKFYNNRAHSNYRAGMIIDNGVKTTEASAKDKRPFLSIISARYSPHQDADPLKPREPAIIRHFIA YKNQDHGAWLRGGDVWLDSCRFADNGIGLTLASGGTFPYDDGSKQEIKNSLFVGESGNVGTEMMDNRIW GPGGLDH corresponding to amino acids 1-862 of R30650_PEA_{—}2_P8 (SEQ ID NO:993), a second amino acid sequence being at least 90% homologous to SGRTLPIGQNFPIRGIQLYDGPINIQNCTFRKFVALEGRHTSALAFRLNNAWQSCPHNNVTGIAFEDVPITSRV FFGEPGPWFNQLDMDGDKTSVFHDVDGSVSEYPGSYLTKNDNWLVRHPDCINVPDWRGAICSGCYAQMYI QAYKTSNLRMKIIKNDFPSHPLYLEGALTRSTHYQQYQPVVTLQKGYTIHWDQTAPAELAIWLINFNKGDW IRVGLCYPRGTTFSILSDVHNRLLKQTSKTGVFVRTLQMDKVEQSYPGRSHYYWDEDSG corresponding to amino acids 2-275 of Q9H1K5 (SEQ ID NO:990), which also corresponds to amino acids 863-1136 of R30650_PEA_{—}2_P8 (SEQ ID NO:993), and a third amino acid sequence being at least 70%, optionally at least 80%, preferably at least 85%, more preferably at least 90% and most preferably at least 95% homologous to a polypeptide having the sequence KQRTISWR (SEQ ID NO:1470) corresponding to amino acids 1137-1144 of R30650_PEA_{—}2_P8 (SEQ ID NO:993), wherein said first amino acid sequence, second amino acid sequence and third amino acid sequence are contiguous and in a sequential order.

[0602] According to preferred embodiments of the present invention, there is provided an isolated polypeptide encoding for a head of R30650_PEA_{—}2_P8 (SEQ ID NO:993), comprising a polypeptide being at least 70%, optionally at least about 80%, preferably at least about 85%, more preferably at least about 90% and most preferably at least about 95% homologous to the sequence MGAAGRQDFLFKAMLTISWLTLTCFPGATSTVAAGCPDQSPELQPWNPGHDQDHHVHIGQGKTLLLTSSAT VYSIHISEGGKLVIKDHDEPIVLRTRHILIDNGGELHAGSALCPFQGNFTIILYGRADEGIQPDPYYGLKYIGV GKGGALELHGQKKLSWTFLNKTLHPGGMAEGGYFFERSWGHRGVIVHVIDPKSGTVIHSDRFDTYRSKKES ERLVQYLNAVPDGRILSVAVNDEGSRNLDDMARKAMTKLGSKHFLHLGFRHPWSFLTVKGNPSSSVEDHIE YHGHRGSAAARVFKLFQTEHGEYFNVSLSSEWVQDVEWTEWFDHDKVSQTKGGEKISDLWKAHPGKICN RPIDIQATTMDGVNLSTEVVYKKGQDYRFACYDRGRACRSYRVRFLCGKPVRPKLTVTIDTNVNSTILNLE DNVQSWKPGDTLVIASTDYSMYQAEEFQVLPCRSCAPNQVKVAGKPMYLHIGEEIDGVDMRAEVGLLSRN IIVMGEMEDKCYPYRNHICNFFDFDTFGGHIKFALGFKAAHLEGTELKHMGQQLVGQYPIHFHLAGDVDER GGYDPPTYIRDLSIHHTFSRCVTVHGSNGLLIKDVVGYNSLGHCFFTEDGPEERNTFDHCLGLLVKSGTLLPS DRDSKMCKMITEDSYPGYIPKPRQDCNAVSTFWMANPNNNLINCAAAGSEETGFWFIFHHVPTGPSVGMYS PGYSEHIPLGKFYNNRAHSNYRAGMIIDNGVKTTEASAKDKRPFLSIISARYSPHQDADPLKPREPAIIRHFIA YKNQDHGAWLRGGDVWLDSCRFADNGIGLTLASGGTFPYDDGSKQEIKNSLFVGESGNVGTEMMDNRIW GPGGLDH of R30650_PEA_{—}2_P8 (SEQ ID NO:993).

[0603] According to preferred embodiments of the present invention, there is provided an isolated polypeptide encoding for a tail of R30650_PEA_{—}2_P8 (SEQ ID NO:993), comprising a polypeptide being at least 70%, optionally at least about 80%, preferably at least about 85%, more preferably at least about 90% and most preferably at least about 95% homologous to the sequence KQRTISWR (SEQ ID NO:1470) in R30650_PEA_{—}2_P8 (SEQ ID NO:993).

[0604] According to preferred embodiments of the present invention, there is provided an isolated chimeric polypeptide encoding for R30650_PEA_{—}2_P15 (SEQ ID NO:996), comprising a first amino acid sequence being at least 70%, optionally at least 80%, preferably at least 85%, more preferably at least 90% and most preferably at least 95% homologous to a polypeptide having the sequence MGAAGRQDFLFKAMLTISWLTLTCFPGATSTVAAGCPDQSPELQPWNPGHDQDHHVHIGQGKTLLLTS SAT VYSIHISEGGKLVIKDHDEPIVLRTRHILIDNGGELHAGSALCPFQGNFTIILYGRADEGIQPDPYYGLKYIGV GKGGALELHGQKKLSWTFLNKTLHPGGMAEGGYFFERSWGHRGVIVHVIDPKSGTVIHSDRFDTYRSKKES ERLVQYLNAVPDGRILSVAVNDEGSRNLDDMARKAMTKLGSKHFLHLGFRHPWSFLTVKGNPSSSVEDHIE YHGHRGSAAARVFKLFQTEHGEYFNVSLSSEWVQDVEWTEWFDHDKVSQTKGGEKISDLWK (SEQ ID NO:1469) corresponding to amino acids 1-348 of R30650_PEA_{—}2_P15 (SEQ ID NO:996), and a second amino acid sequence being at least 90% homologous to AHPGKICNRPIDIQATTMDGVNLSTEVVYKKGQDYRFACYDRGRACRSYRVRFLCGKPVRPKLTVTIDTNV NSTILNLEDNVQSWKPGDTLVIASTDYSMYQAEEFQVLPCRSCAPNQVKVAGKPMYLHIGEEIDGVDMRAE VGLLSRNIIVMGEMEDKCYPYRNHICNFFDFDTFGGHIKFALGFKAAHLEGTELKHMGQQLVGQYPIHFHL AGDVDERGGYDPPTYIRDLSIHHTFSRCVTVHGSNGLLIKDVVGYNSLGHCFFTEDGPEERNTFDHCLGLLV KSGTLLPSDRDSKMCKMITEDSYPGYIPKPRQDCNAVSTFWMANPNNNLINCAAAGSEETGFWFIFHHVPT GPSVGMYSPGYSEHIPLGKFYNNRAHSNYRAGMIIDNGVKTTEASAKDKRPFLSIISARYSPHQDADPLKPR EPAIIRHFIAYKNQDHGAWLRGGDVWLDSCRFADNGIGLTLASGGTFPYDDGSKQEIKNSLFVGESGNVGT EMMDNRIWGPGGLDHSGRTLPIGQNFPIRGIQLYDGPINIQNCTFRKFVALEGRHTSALAFRLNNAWQSCPH NNVTGIAFEDVPITSRVFFGEPGPWFNQLDMDGDKTSVFHDVDGSVSEYPGSYLTKNDNWLVRHPDCINVP DWRGAICSGCYAQMYIQAYKTSNLRMKIIKNDFPSHPLYLEGALTRSTHYQQYQPVVTLQKGYTIHWDQT APAELAIWLINFNKGDWIRVGLCYPRGTTFSILSDVHNRLLKQTSKTGVFVRTLQMDKVEQSYPGRSHYYW DEDSG corresponding to amino acids 1-788 of Q9ULM1 (SEQ ID NO:989), which also corresponds to amino acids 349-1136 of R30650_PEA_{—}2_P15 (SEQ ID NO:996), wherein said first amino acid sequence and second amino acid sequence are contiguous and in a sequential order.

[0605] According to preferred embodiments of the present invention, there is provided an isolated polypeptide encoding for a head of R30650_PEA_{—}2_P15 (SEQ ID NO:996), comprising a polypeptide being at least 70%, optionally at least about 80%, preferably at least about 85%, more preferably at least about 90% and most preferably at least about 95% homologous to the sequence MGAAGRQDFLFKAMLTISWLTLTCFPGATSTVAAGCPDQSPELQPWNPGHDQDHHVHIGQGKTLLLTS SAT VYSIHISEGGKLVIKDHDEPIVLRTRHILIDNGGELHAGSALCPFQGNFTIILYGRADEGIQPDPYYGLKYIGV GKGGALELHGQKKLSWTFLNKTLHPGGMAEGGYFFERSWGHRGVIVHVIDPKSGTVIHSDRFDTYRSKKES ERLVQYLNAVPDGRILSVAVNDEGSRNLDDMARKAMTKLGSKHFLHLGFRPWSFLTVKGNPSSSVEDHIE YHGHRGSAAARVFKLFQTEHGEYFNVSLSSEWVQDVEWTEWFDHDKVSQTKGGEKISDLWK (SEQ ID NO:1469) of R30650_PEA_{—}2_P15 (SEQ ID NO:996).

[0606] According to preferred embodiments of the present invention, there is provided an isolated chimeric polypeptide encoding for R30650_PEA_{—}2_P15 (SEQ ID NO:996), comprising a first amino acid sequence being at least 90% homologous to MGAAGRQDFLFKAMLTISWLTLTCFPGATSTVAAGCPDQSPELQPWNPGHDQDHHVHIGQGKTLLLTSSAT VYSIHISEGGKLVIKDHDEPIVLRTRHILIDNGGELHAGSALCPFQGNFTIILYGRADEGIQPDPYYGLKYIGV GKGGALELHGQKKLSWTFLNKTLHPGGMAEGGYFFERSWGHRGVIVHVIDPKSGTVIHSDRFDTYRSKKES ERLVQYLNAVPDGRILSVAVNDEGSRNLDDMARKAMTKLGSKHFLHLGFRHPWSFLTVKGNPSSSVEDHIE YHGHRGSAAARVFKLFQTEHGEYFNVSLSSEWVQDVEWTEWFDHDKVSQTKGGEKISDLWKAHPGKICN RPIDIQATTMDGVNLSTEVVYKKGQDYRFACYDRGPACRSYRVRFLCGKPVRPKLTVTIDTNVNSTILNLE DNVQSWKPGDTLVIASTDYSMYQAEEFQVLPCRSCAPNQVKVAGKPMYLHIGEEIDGVDMRAEVGLLSRN IIVMGEMEDKCYPYRNHICNFFDFDTFGGHIKFALGFKAAHLEGTELKHMGQQLVGQYPIHFHLAGDVDER GGYDPPTYIRDLSIHHTFSRCVTVHGSNGLLIKDVVGYNSLGHCFFTEDGPEERNTFDHCLGLLVKSGTLLPS DRDSKMCKMITEDSYPGYIPKPRQDCNAVSTFWMANPNNNLINCAAAGSEETGFWFIFHHVPTGPSVGMYS PGYSEHIPLGKFYNNRAHSNYRAGMIIDNGVKTTEASAKDKRPFLSIISARYSPHQDADPLKPREPAIIRHFIA YKNQDHGAWLRGGDVWLDSCRFADNGIGLTLASGGTFPYDDGSKQEIKNSLFVGESGNVGTEMMDNRIW GPGGLDHSGRTLPIGQNFPIRGIQLYDGPINIQNCTFRKFVALEGRHTSALAFRLNNAWQSCPHNNVTGIAFE DVPITSRVFFGEPGPWFNQLDMDGDKTSVFHDVDGSVSEYPGSYLTKND corresponding to amino acids 1-977 of Q8WUJ3 (SEQ ID NO:987), which also corresponds to amino acids 1-977 of R30650_PEA_{—}2_P15 (SEQ ID NO:996), and a second amino acid sequence being at least 70%, optionally at least 80%, preferably at least 85%, more preferably at least 90% and most preferably at least 95% homologous to a polypeptide having the sequence NWLVRHPDCINVPDWRGAICSGCYAQMYIQAYKTSNLRMKIIKNDFPSHPLYLEGALTRSTHYQQYQPVVT LQKGYTIHWDQTAPAELAIWLINFNKGDWIRVGLCYPRGTTFSILSDVHNRLLKQTSKTGVFVRTLQMDKV EQSYPGRSHYYWDEDSG (SEQ ID NO:1472) corresponding to amino acids 978-1136 of R30650_PEA_{—}2_P15 (SEQ ID NO:996), wherein said first amino acid sequence and second amino acid sequence are contiguous and in a sequential order.

[0607] According to preferred embodiments of the present invention, there is provided an isolated polypeptide encoding for a tail of R30650_PEA_{—}2_P15 (SEQ ID NO:996), comprising a polypeptide being at least 70%, optionally at least about 80%, preferably at least about 85%, more preferably at least about 90% and most preferably at least about 95% homologous to the sequence NWLVRHPDCINVPDWRGAICSGCYAQMYIQAYKTSNLRMKIIKNDFPSHPLYLEGALTRSTHYQQYQPVVT LQKGYTIHWDQTAPAELAIWLINFNKGDWIRVGLCYPRGTTFSILSDVHNRLLKQTSKTGVFVRTLQMDKV EQSYPGRSHYYWDEDSG (SEQ ID NO:1472) in R30650_PEA_{—}2_P15 (SEQ ID NO:996).

[0608] According to preferred embodiments of the present invention, there is provided an isolated chimeric polypeptide encoding for R30650_PEA_{—}2_P15 (SEQ ID NO:996), comprising a first amino acid sequence being at least 70%, optionally at least 80%, preferably at least 85%, more preferably at least 90% and most preferably at least 95% homologous to a polypeptide having the sequence MGAAGRQDFLFKAMLTISWLTLTCFPGATSTVAAGCPDQSPELQPWNPGHDQDHHVHIGQGKTLLLTSSAT VYSIHISEGGKLVIKDHDEPIVLRTRHILIDNGGELHAGSALCPFQGNFTIILYGRADEGIQPDPYYGLKYIGV GKGGALELHGQKKLSWTFLNKTLHPGGMAEGGYFFERSWGHRGVIVHVIDPKSGTVIHSDRFDTYRSKKES ERLVQYLNAVPDGRILSVAVNDEGSRNLDDMARKAMTKLGSKHFLHLGFRHPWSFLTVKGNPSSSVEDHIE YHGHRGSAAARVFKLFQTEHGEYFNVSLSSEWVQDVEWTEWFDHDKVSQTKGGEKISDLWKAHPGKICN RPIDIQATTMDGVNLSTEVVYKKGQDYRFACYDRGRACRSYRVRFLCGKPVRPKLTVTIDTNVNSTILNLE DNVQSWKPGDTLVIASTDYSMYQAEEFQVLPCRSCAPNQVKVAGKPMYLHIGEEIDGVDMRAEVGLLSRN IIVMGEMEDKCYPYRNHICNFFDFDTFGGHIKFALGFKAAHLEGTELKHMGQQLVGQYPIHFHLAGD corresponding to amino acids 1-564 of R30650_PEA_{—}2_P15 (SEQ ID NO:996), and a second amino acid sequence being at least 90% homologous to VDERGGYDPPTYIRDLSIHHTFSRCVTVHGSNGLLIKDVVGYNSLGHCFFTEDGPEERNTFDHCLGLLVKSG TLLPSDRDSKMCKMITEDSYPGYIPKPRQDCNAVSTFWMANPNNNLINCAAAGSEETGFWFIFHHVPTGPSV GMYSPGYSEHIPLGKFYNNRAHSNYRAGMIIDNGVKTTEASAKDKRPFLSIISARYSPHQDADPLKPREPAII RHFIAYKNQDHGAWLRGGDVWLDSCRFADNGIGLTLASGGTFPYDDGSKQEIKNSLFVGESGNVGTEMMD NRIWGPGGLDHSGRTLPIGQNFPIRGIQLYDGPINIQNCTFRKFVALEGRHTSALAFRLNNAWQSCPHNNVT GIAFEDVPITSRVFFGEPGPWFNQLDMDGDKTSVFHDVDGSVSEYPGSYLTKNDNWLVRHPDCINVPDWRG AICSGCYAQMYIQAYKTSNLRMKIIKNDFPSHPLYLEGALTRSTHYQQYQPVVTLQKGYTIHWDQTAPAEL AIWLINFNKGDWIRVGLCYPRGTTFSILSDVHNRLLKQTSKTGVFVRTLQMDKVEQSYPGRSHYYWDEDSG corresponding to amino acids 8-579 of Q9NPN9 (SEQ ID NO:988), which also corresponds to amino acids 565-1136 of R30650_PEA_{—}2_P15 (SEQ ID NO:996), wherein said first amino acid sequence and second amino acid sequence are contiguous and in a sequential order.

[0609] According to preferred embodiments of the present invention, there is provided an isolated polypeptide encoding for a head of R30650_PEA_{—}2_P15 (SEQ ID NO:996), comprising a polypeptide being at least 70%, optionally at least about 80%, preferably at least about 85%, more preferably at least about 90% and most preferably at least about 95% homologous to the sequence MGAAGRQDFLFKAMLTISWLTLTCFPGATSTVAAGCPDQSPELQPWNPGHDQDHHVHIGQGKTLLLTSSAT VYSIHISEGGKLVIKDHDEPIVLRTRHILIDNGGELHAGSALCPFQGNFTIILYGRADEGIQPDPYYGLKYIGV GKGGALELHGQKKLSWTFLNKTLHPGGMAEGGYFFERSWGHRGVIVHVIDPKSGTVIHSDRFDTYRSKKES ERLVQYLNAVPDGRILSVAVNDEGSRNLDDMARKAMTKLGSKHFLHLGFRHPWSFLTVKGNPSSSVEDHIE YHGHRGSAAARVFKLFQTEHGEYFNVSLSSEWVQDVEWTEWFDHDKVSQTKGGEKISDLWKAHPGKICN RPIDIQATTMDGVNLSTEVVYKKGQDYRFACYDRGRACRSYRVRFLCGKPVRPKLTVTIDTNVNSTILNLE DNVQSWKPGDTLVIASTDYSMYQAEEFQVLPCRSCAPNQVKVAGKPMYLHIGEEIDGVDMRAEVGLLSRN IIVMGEMEDKCYPYRNHICNFFDFDTFGGHIKFALGFKAAHLEGTELKHMGQQLVGQYPIHFHLAGD of R30650_PEA_{—}2_P15 (SEQ ID NO:996).

[0610] According to preferred embodiments of the present invention, there is provided an isolated chimeric polypeptide encoding for R30650_PEA_{—}2_P15 (SEQ ID NO:996), comprising a first amino acid sequence being at least 70%, optionally at least 80%, preferably at least 85%, more preferably at least 90% and most preferably at least 95% homologous to a polypeptide having the sequence MGAAGRQDFLFKAMLTISWLTLTCFPGATSTVAAGCPDQSPELQPWNPGHDQDHHVHIGQGKTLLLTS SAT VYSIHISEGGKLVIKDHDEPIVLRTRHILIDNGGELHAGSALCPFQGNFTIILYGRADEGIQPDPYYGLKYIGV GKGGALELHGQKKLSWTFLNKTLHPGGMAEGGYFFERSWGHRGVIVHVIDPKSGTVIHSDRFDTYRSKKES ERLVQYLNAVPDGRILSVAVNDEGSRNLDDMARKAMTKLGSKHFLHLGFRHPWSFLTVKGNPSSSVEDHIE YHGHRGSAAARVFKLFQTEHGEYFNVSLSSEWVQDVEWTEWFDHDKVSQTKGGEKISDLWKAHPGKICN RPIDIQATTMDGVNLSTEVVYKKGQDYRFACYDRGRACRSYRVRFLCGKPVRPKLTVTIDTNVNSTILNLE DNVQSWKPGDTLVIASTDYSMYQAEEFQVLPCRSCAPNQVKVAGKPMYLHIGEEIDGVDMRAEVGLLSRN IIVMGEMEDKCYPYRNHICNFFDFDTFGGHIKFALGFKAAHLEGTELKHMGQQLVGQYPIHFHLAGDVDER GGYDPPTYIRDLSIHHTFSRCVTVHGSNGLLIKDVVGYNSLGHCFFTEDGPEERNTFDHCLGLLVKSGTLLPS DRDSKMCKMITEDSYPGYIPKPRQDCNAVSTFWMANPNNNLINCAAAGSEETGFWFIFHHVPTGPSVGMYS PGYSEHIPLGKFYNNRAHSNYRAGMIIDNGVKTTEASAKDKRPFLSIISARYSPHQDADPLKPREPAIIRHFIA YKNQDHGAWLRGGDVWLDSCRFADNGIGLTLASGGTFPYDDGSKQEIKNSLFVGESGNVGTEMMDNRIW GPGGLDH corresponding to amino acids 1-862 of R30650_PEA_{—}2_P15 (SEQ ID NO:996), and a second amino acid sequence being at least 90% homologous to SGRTLPIGQNFPIRGIQLYDGPINIQNCTFRKFVALEGRHTSALAFRLNNAWQSCPHNNVTGIAFEDVPITSRV FFGEPGPWFNQLDMDGDKTSVFHDVDGSVSEYPGSYLTKNDNWLVRHPDCINVPDWRGAICSGCYAQMYI QAYKTSNLRMKIIKNDFPSHPLYLEGALTRSTHYQQYQPVVTLQKGYTIHWDQTAPAELAIWLINFNKGDW IRVGLCYPRGTTFSILSDVHNRLLKQTSKTGVFVRTLQMDKVEQSYPGRSHYYWDEDSG corresponding to amino acids 2-275 of Q9H1K5 (SEQ ID NO:990), which also corresponds to amino acids 863-1136 of R30650_PEA_{—}2_P15 (SEQ ID NO:996), wherein said first amino acid sequence and second amino acid sequence are contiguous and in a sequential order.

[0611] According to preferred embodiments of the present invention, there is provided an isolated polypeptide encoding for a head of R30650_PEA_{—}2_P15 (SEQ ID NO:996), comprising a polypeptide being at least 70%, optionally at least about 80%, preferably at least about 85%, more preferably at least about 90% and most preferably at least about 95% homologous to the sequence MGAAGRQDFLFKAMLTISWLTLTCFPGATSTVAAGCPDQSPELQPWNPGHDQDHHVHIGQGKTLLLTSSAT VYSIHISEGGKLVIKDHDEPIVLRTRHILIDNGGELHAGSALCPFQGNFTIILYGRADEGIQPDPYYGLKYIGV GKGGALELHGQKKLSWTFLNKTLHPGGMAEGGYFFERSWGHRGVIVHVIDPKSGTVIHSDRFDTYRSKKES ERLVQYLNAVPDGRILSVAVNDEGSRNLDDMARKAMTKLGSKHFLHLGFRHPWSFLTVKGNPSSSVEDHIE YHGHRGSAAARVFKLFQTEHGEYFNVSLSSEWVQDVEWTEWFDHDKVSQTKGGEKISDLWKAHPGKICN RPIDIQATTMDGVNLSTEVVYKKGQDYRFACYDRGRACRSYRVRFLCGKPVRPKLTVTIDTNVNSTILNLE DNVQSWKPGDTLVIASTDYSMYQAEEFQVLPCRSCAPNQVKVAGKPMYLHIGEEIDGVDMRAEVGLLSRN IIVMGEMEDKCYPYRNHICNFFDFDTFGGHIKFALGFKAAHLEGTELKHMGQQLVGQYPIHFHLAGDVDER GGYDPPTYIRDLSIHHTFSRCVTVHGSNGLLIKDVVGYNSLGHCFFTEDGPEERNTFDHCLGLLVKSGTLLPS DRDSKMCKMITEDSYPGYIPKPRQDCNAVSTFWMANPNNNLINCAAAGSEETGFWFIFHHVPTGPSVGMYS PGYSEHIPLGKFYNNRAHSNYRAGMIIDNGVKTTEASAKDKRPFLSIISARYSPHQDADPLKPREPAIIRHFIA YKNQDHGAWLRGGDVWLDSCRFADNGIGLTLASGGTFPYDDGSKQEIKNSLFVGESGNVGTEMMDNRIW GPGGLDH of R30650_PEA_{—}2_P15 (SEQ ID NO:996).

[0612] According to preferred embodiments of the present invention, there is provided an isolated chimeric polypeptide encoding for R30650_PEA_{—}2_P17 (SEQ ID NO:997), comprising a first amino acid sequence being at least 90% homologous to MGAAGRQDFLFKAMLTISWLTLTCFPGATSTVAAGCPDQSPELQPWNPGHDQDHHVHIGQGKTLLLTSSAT VYSIHISEGGKLVIKDHDEPIVLRTRHILIDNGGELHAGSALCPFQGNFTIILYGRADEGIQPDPYYGLKYIGV GKGGALELHGQKKLSWTFLNKTLHPGGMAEGGYFFERSWGHRGVIVHVIDPKSGTVIHSDRFDTYRSKKES ERLVQYLNAVPDGRILSVAVNDEGSRNLDDMARKAMTKLGSKHFLHLGFRHPWSFLTVKGNPSSSVEDHIE YHGHRGSAAARVFKLFQTEHGEYFNVSLSSEWVQ corresponding to amino acids 1-321 of Q8WUJ3 (SEQ ID NO:987), which also corresponds to amino acids 1-321 of R30650_PEA_{—}2_P17 (SEQ ID NO:997), and a second amino acid sequence being at least 70%, optionally at least 80%, preferably at least 85%, more preferably at least 90% and most preferably at least 95% homologous to a polypeptide having the sequence GEEFQTIW (SEQ ID NO:1473) corresponding to amino acids 322-329 of R30650_PEA_{—}2_P17 (SEQ ID NO:997), wherein said first amino acid sequence and second amino acid sequence are contiguous and in a sequential order.

[0613] According to preferred embodiments of the present invention, there is provided an isolated polypeptide encoding for a tail of R30650_PEA_{—}2_P17 (SEQ ID NO:997), comprising a polypeptide being at least 70%, optionally at least about 80%, preferably at least about 85%, more preferably at least about 90% and most preferably at least about 95% homologous to the sequence GEEFQTIW (SEQ ID NO:1473) in R30650_PEA_{—}2_P17 (SEQ ID NO:997).

[0614] According to preferred embodiments of the present invention, there is provided an isolated chimeric polypeptide encoding for M78035_P4 (SEQ ID NO:924), comprising a first amino acid sequence being at least 90% homologous to MPGLMRMRERYSASKPLKGARIAGCLHMTVETAVLIETLVTLGAEVQWSSCNIFSTQDHAAAAIAKAGIPV YAWKGETDEEYLWCIEQTLYFKDGPLNMILDDGGDLTNLIHTKYPQLLPGIRGISEETTTGVHNLYKMMAN GILKVPAINVNDSVTKSKFDNLYGCRESLIDGIKRATDVMIAGKVAVVAGYGDVGKGCAQALRGFGARVII TEIDPINALQAAMEGYEVTTMDEACQEGNIFVTTTGCIDIILGRHFEQMKDDAIVCNIGHFDVEIDVKWLNE NAVEKVNIKPQVDRYRLKNGRRIILLAEGRLVNLGCAMGHPSFVMSNSFTNQVMAQIELWTHPDKYPVGV HFLPKKLDEAVAEAHLGKLNVKLTKLTEKQAQYLGMSCDGPFKPDHYRY corresponding to amino acids 29-432 of SAHH_HUMAN (SEQ ID NO:922), which also corresponds to amino acids 1-404 of M78035_P4 (SEQ ID NO:924).

[0615] According to preferred embodiments of the present invention, there is provided an isolated chimeric polypeptide encoding for M78035_P6 (SEQ ID NO:925), comprising a first amino acid sequence being at least 90% homologous to MILDDGGDLTNLIHTKYPQLLPGIRGISEETTTGVHNLYKMMANGILKVPAINVNDSVTKSKFDNLYGCRES LIDGIKRATDVMIAGKVAVVAGYGDVGKGCAQALRGFGARVIITEIDPINALQAAMEGYEVTTMDEACQE GNIFVTTTGCIDIILGRHFEQMKDDAIVCNIGHFDVEIDVKWLNENAVEKVNIKPQVDRYRLKNGRRIILLAE GRLVNLGCAMGHPSFVMSNSFTNQVMAQIELWTHPDKYPVGVHFLPKKLDEAVAEAHLGKLNVKLTKLT EKQAQYLGMSCDGPFKPDHYRY corresponding to amino acids 127-432 of SAHH_HUMAN (SEQ ID NO:922), which also corresponds to amino acids 1-306 of M78035_P6 (SEQ ID NO:925).

[0616] According to preferred embodiments of the present invention, there is provided an isolated chimeric polypeptide encoding for M78035_P8 (SEQ ID NO:926), comprising a first amino acid sequence being at least 70%, optionally at least 80%, preferably at least 85%, more preferably at least 90% and most preferably at least 95% homologous to a polypeptide having the sequence MSDKLPYKV (SEQ ID NO:1474) corresponding to amino acids 1-9 of M78035_P8 (SEQ ID NO:926), and a second amino acid sequence being at least 90% homologous to VYAWKGETDEEYLWCIEQTLYFKDGPLNMILDDGGDLTNLIHTKYPQLLPGIRGISEETTTGVHNLYKMMA NGILKVPAINVNDSVTKSKFDNLYGCRESLIDGIKRATDVMIAGKVAVVAGYGDVGKGCAQALRGFGARVI ITEIDPINALQAAMEGYEVTTMDEACQEGNIFVTTTGCIDIILGRHFEQMKDDAIVCNIGHFDVEIDVKWLNE NAVEKVNIKPQVDRYRLKNGRRIILLAEGRLVNLGCAMGHPSFVMSNSFTNQVMAQIELWTHPDKYPVGV HFLPKKLDEAVAEAHLGKLNVKLTKLTEKQAQYLGMSCDGPFKPDHYRY corresponding to amino acids 99-432 of SAHH_HUMAN (SEQ ID NO:922), which also corresponds to amino acids 10-343 of M78035_P8 (SEQ ID NO:926), wherein said first amino acid sequence and second amino acid sequence are contiguous and in a sequential order.

[0617] According to preferred embodiments of the present invention, there is provided an isolated polypeptide encoding for a head of M78035_P8 (SEQ ID NO:926), comprising a polypeptide being at least 70%, optionally at least about 80%, preferably at least about 85%, more preferably at least about 90% and most preferably at least about 95% homologous to the sequence MSDKLPYKV (SEQ ID NO:1474) of M78035_P8 (SEQ ID NO:926).

[0618] According to preferred embodiments of the present invention, there is provided an isolated chimeric polypeptide encoding for HUMCEA_PEA_{—}1_P4 (SEQ ID NO:864), comprising a first amino acid sequence being at least 90% homologous to MESPSAPPHRWCIPWQRLLLTASLLTFWNPPTTAKLTIESTPFNVAEGKEVLLLVHNLPQHLFGYSWYKGER VDGNRQIIGYVIGTQQATPGPAYSGREIIYPNASLLIQNIIQNDTGFYTLHVIKSDLVNEEATGQFRVYPELPK PSISSNNSKPVEDKDAVAFTCEPETQDATYLWWVNNQSLPVSPRLQLSNGNRTLTLFNVTRNDTASYKCET QNPVSARRSDSVILNVL corresponding to amino acids 1-234 of CEA5_HUMAN (SEQ ID NO:863), which also corresponds to amino acids 1-234 of HUMCEA_PEA_{—}1_P4 (SEQ ID NO:864), and a second amino acid sequence being at least 70%, optionally at least 80%, preferably at least 85%, more preferably at least 90% and most preferably at least 95% homologous to a polypeptide having the sequence CEYICSSLAQAASPNPQGQRQDFSVPLRFKYTDPQPWTSRLSVTFCPRKTWADQVLTKNRRGGAASVLGGS GSTPYDGRNR (SEQ ID NO:1475) corresponding to amino acids 235-315 of HUMCEA_PEA_{—}1_P4 (SEQ ID NO:864), wherein said first amino acid sequence and second amino acid sequence are contiguous and in a sequential order.

[0619] According to preferred embodiments of the present invention, there is provided an isolated polypeptide encoding for a tail of HUMCEA_PEA_{—}1_P4 (SEQ ID NO:864), comprising a polypeptide being at least 70%, optionally at least about 80%, preferably at least about 85%, more preferably at least about 90% and most preferably at least about 95% homologous to the sequence CEYICSSLAQAASPNPQGQRQDFSVPLRFKYTDPQPWTSRLSVTFCPRKTWADQVLTKNRRGGAASVLGGS GSTPYDGRNR (SEQ ID NO:1475) in HUMCEA_PEA_{—}1_P4 (SEQ ID NO:864).

[0620] According to preferred embodiments of the present invention, there is provided an isolated chimeric polypeptide encoding for HUMCEA_PEA_{—}1_P5 (SEQ ID NO:865), comprising a first amino acid sequence being at least 90% homologous to MESPSAPPHRWCIPWQRLLLTASLLTFWNPPTTAKLTIESTPFNVAEGKEVLLLVHNLPQHLFGYSWYKGER VDGNRQIIGYVIGTQQATPGPAYSGREIIYPNASLLIQNIIQNDTGFYTLHVIKSDLVNEEATGQFRVYPELPK PSISSNNSKPVEDKDAVAFTCEPETQDATYLWWVNNQSLPVSPRLQLSNGNRTLTLFNVTRNDTASYKCET QNPVSARRSDSVILNVLYGPDAPTISPLNTSYRSGENLNLSCHAASNPPAQYSWFVNGTFQQSTQELFIPNIT VNNSGSYTCQAHNSDTGLNRTTVTTITVYAEPPKPFITSNNSNPVEDEDAVALTCEPEIQNTTYLWWVNNQS LPVSPRLQLSNDNRTLTLLSVTRNDVGPYECGIQNELSVDHSDPVILNVLYGPDDPTISPSYTYYRPGVNLSL SCHAASNPPAQYSWLIDGNIQQHTQELFISNITEKNSGLYTCQANNSASGHSRTTVKTITVSAELPKPSISSNN SKPVEDKDAVAFTCEPEAQNTTYLWWVNGQSLPVSPRLQLSNGNRTLTLFNVTRNDARAYVCGIQNSVSA NRSDPVTLDVLYGPDTPIISPPDSSYLSGANLNLSCHSASNPSPQYSWRINGIPQQHTQVLFIAKITPNNNGTY ACFVSNLATGRNNSIVKSITVS corresponding to amino acids 1-675 of CEA5_HUMAN (SEQ ID NO:863), which also corresponds to amino acids 1-675 of HUMCEA_PEA_{—}1_P5 (SEQ ID NO:865), and a second amino acid sequence being at least 70%, optionally at least 80%, preferably at least 85%, more preferably at least 90% and most preferably at least 95% homologous to a polypeptide having the sequence GKWLPGASASYSGVESIWFSPKSQEDIFFPSLCSMGTRKSQILS (SEQ ID NO:1476) corresponding to amino acids 676-719 of HUMCEA_PEA_{—}1_P5 (SEQ ID NO:865), wherein said first amino acid sequence and second amino acid sequence are contiguous and in a sequential order.

[0621] According to preferred embodiments of the present invention, there is provided an isolated polypeptide encoding for a tail of HUMCEA_PEA_{—}1_P5 (SEQ ID NO:865), comprising a polypeptide being at least 70%, optionally at least about 80%, preferably at least about 85%, more preferably at least about 90% and most preferably at least about 95% homologous to the sequence GKWLPGASASYSGVESIWFSPKSQEDIFFPSLCSMGTRKSQILS (SEQ ID NO:1476) in HUMCEA_PEA_{—}1_P5 (SEQ ID NO:865).

[0622] According to preferred embodiments of the present invention, there is provided an isolated chimeric polypeptide encoding for HUMCEA_PEA_{—}1_P7 (SEQ ID NO:866), comprising a first amino acid sequence being at least 90% homologous to MESPSAPPHRWCIPWQRLLLTASLLTFWNPPTTAKLTIESTPFNVAEGKEVLLLVHNLPQHLFGYSWYKGER VDGNRQIIGYVIGTQQATPGPAYSGREIIYPNASLLIQNIIQNDTGFYTLHVIKSDLVNEEATGQFRVYPELPK PSISSNNSKPVEDKDAVAFTCEPETQDATYLWWVNNQSLPVSPRLQLSNGNRTLTLFNVTRNDTASYKCET QNPVSARRSDSVILNVLYGPDAPTISPLNTSYRSGENLNLSCHAASNPPAQYSWFVNGTFQQSTQELFIPNIT VNNSGSYTCQAHNSDTGLNRTTVTTITVYAEPPKPFITSNNSNPVEDEDAVALTCEPEIQNTTYLWWVNNQS LPVSPRLQLSNDNRTLTLLSVTRNDVGPYECGIQNELSVDHSDPVILNVLYGPDDPTISPSYTYYRPGVNLSL SCHAASNPPAQYSWLIDGNIQQHTQELFISNITEKNSGLYTCQANNSASGHSRTTVKTITVSAELPKPSISSNN SKPVEDKDAVAFTCEPEAQNTTYLWWVNGQSLPVSPRLQLSNGNRTLTLFNVTRNDARAYVCGIQNSVSA NRSDPVTLDVLYGPDTPIISPPDSSYLSGANLNLSCHSASNPSPQYSWRINGIPQQHTQVLFIAKITPNNNGTY ACFVSNLATGRNNSIVKSITV corresponding to amino acids 1-674 of CEA5_HUMAN (SEQ ID NO:863), which also corresponds to amino acids 1-674 of HUMCEA_PEA_{—}1_P7 (SEQ ID NO:866), and a second amino acid sequence being at least 90% homologous to SAGATVGIMIGVLVGVALI corresponding to amino acids 684-702 of CEA5_HUMAN (SEQ ID NO:863), which also corresponds to amino acids 675-693 of HUMCEA_PEA_{—}1_P7 (SEQ ID NO:866), wherein said first amino acid sequence and second amino acid sequence are contiguous and in a sequential order.

[0623] According to preferred embodiments of the present invention, there is provided an isolated chimeric polypeptide encoding for an edge portion of HUMCEA_PEA_{—}1_P7 (SEQ ID NO:866), comprising a polypeptide having a length “n”, wherein n is at least about 10 amino acids in length, optionally at least about 20 amino acids in length, preferably at least about 30 amino acids in length, more preferably at least about 40 amino acids in length and most preferably at least about 50 amino acids in length, wherein at least two amino acids comprise VS, having a structure as follows: a sequence starting from any of amino acid numbers 674−x to 674; and ending at any of amino acid numbers 675+((n−2)−x), in which x varies from 0 to n−2.

[0624] According to preferred embodiments of the present invention, there is provided an isolated chimeric polypeptide encoding for HUMCEA_PEA_{—}1_P10 (SEQ ID NO:867), comprising a first amino acid sequence being at least 90% homologous to MESPSAPPHRWCIPWQRLLLTASLLTFWNPPTTAKLTIESTPFNVAEGKEVLLLVHNLPQHLFGYSWYKGER VDGNRQIIGYVIGTQQATPGPAYSGREIIYPNASLLIQNIIQNDTGFYTLHVIKSDLVNEEATGQFRVYPELPK PSISSNNSKPVEDKDAVAFTCEPETQDATYLWWVNNQSLPVSPRLQLSNGNRTLTLFNVTRNDTASYKCET QNPVSARRSDS corresponding to amino acids 1-228 of CEA5_HUMAN (SEQ ID NO:863), which also corresponds to amino acids 1-228 of HUMCEA_PEA_{—}1_P10 (SEQ ID NO:867), and a second amino acid sequence being at least 90% homologous to VILNVLYGPDDPTISPSYTYYRPGVNLSLSCHAASNPPAQYSWLIDGNIQQHTQELFISNITEKNSGLYTCQA NNSASGHSRTTVKTITVSAELPKPSISSNNSKPVEDKDAVAFTCEPEAQNTTYLWWVNGQSLPVSPRLQLSN GNRTLTLFNVTRNDARAYVCGIQNSVSANRSDPVTLDVLYGPDTPIISPPDSSYLSGANLNLSCHSASNPSPQ YSWRINGIPQQHTQVLFIAKITPNNNGTYACFVSNLATGRNNSIVKSITVSASGTSPGLSAGATVGIMIGVLV GVALI corresponding to amino acids 1-228 of CEA5_HUMAN (SEQ ID NO:863), which also corresponds to amino acids 229-524 of HUMCEA_PEA_{—}1_P10 (SEQ ID NO:867), wherein said first amino acid sequence and second amino acid sequence are contiguous and in a sequential order.

[0625] According to preferred embodiments of the present invention, there is provided an isolated chimeric polypeptide encoding for an edge portion of HUMCEA_PEA_{—}1_P10 (SEQ ID NO:867), comprising a polypeptide having a length “n”, wherein n is at least about 10 amino acids in length, optionally at least about 20 amino acids in length, preferably at least about 30 amino acids in length, more preferably at least about 40 amino acids in length and most preferably at least about 50 amino acids in length, wherein at least two amino acids comprise SV, having a structure as follows: a sequence starting from any of amino acid numbers 228−x to 228; and ending at any of amino acid numbers 229+((n−2)−x), in which x varies from 0 to n−2.

[0626] According to preferred embodiments of the present invention, there is provided an isolated chimeric polypeptide encoding for HUMCEA_PEA_{—}1_P19 (SEQ ID NO:869), comprising a first amino acid sequence being at least 90% homologous to MESPSAPPHRWCIPWQRLLLTASLLTFWNPPTTAKLTIESTPFNVAEGKEVLLLVHNLPQHLFGYSWYKGER VDGNRQIIGYVIGTQQATPGPAYSGREIIYPNASLLIQNIIQNDTGFYTLHVIKSDLVNEEATGQFRVYPELPK PSISSNNSKPVEDKDAVAFTCEPETQDATYLWWVNNQSLPVSPRLQLSNGNRTLTLFNVTRNDTASYKCET QNPVSARRSDSVILN corresponding to amino acids 1-232 of CEA5_HUMAN (SEQ ID NO:863), which also corresponds to amino acids 1-232 of HUMCEA_PEA_{—}1_P19 (SEQ ID NO:869), and a second amino acid sequence being at least 90% homologous to VLYGPDTPIISPPDSSYLSGANLNLSCHSASNPSPQYSWRINGIPQQHTQVLFIAKITPNNNGTYACFVSNLAT GRNNSIVKSITVSASGTSPGLSAGATVGIMIGVLVGVALI corresponding to amino acids 589-702 of CEA5_HUMAN (SEQ ID NO:863), which also corresponds to amino acids 233-346 of HUMCEA_PEA_{—}1_P19 (SEQ ID NO:869), wherein said first amino acid sequence and second amino acid sequence are contiguous and in a sequential order.

[0627] According to preferred embodiments of the present invention, there is provided an isolated chimeric polypeptide encoding for an edge portion of HUMCEA_PEA_{—}1_P19 (SEQ ID NO:869), comprising a polypeptide having a length “n”, wherein n is at least about 10 amino acids in length, optionally at least about 20 amino acids in length, preferably at least about 30 amino acids in length, more preferably at least about 40 amino acids in length and most preferably at least about 50 amino acids in length, wherein at least two amino acids comprise NV, having a structure as follows: a sequence starting from any of amino acid numbers 232−x to 232; and ending at any of amino acid numbers 233+((n−2)−x), in which x varies from 0 to n−2.

[0628] According to preferred embodiments of the present invention, there is provided an isolated chimeric polypeptide encoding for HUMCEA_PEA_{—}1_P20 (SEQ ID NO:870), comprising a first amino acid sequence being at least 90% homologous to MESPSAPPHRWCIPWQRLLLTASLLTFWNPPTTAKLTIESTPFNVAEGKEVLLLVHNLPQHLFGYSWYKGER VDGNRQIIGYVIGTQQATPGPAYSGREIIYPNASLLIQNIIQNDTGFYTLHVIKSDLVNEEATGQFRVYP corresponding to amino acids 1-142 of CEA5_HUMAN (SEQ ID NO:863), which also corresponds to amino acids 1-142 of HUMCEA_PEA_{—}1_P20 (SEQ ID NO:870), and a second amino acid sequence being at least 90% homologous to ELPKPSISSNNSKPVEDKDAVAFTCEPEAQNTTYLWWVNGQSLPVSPRLQLSNGNRTLTLFNVTRNDARAY VCGIQNSVSANRSDPVTLDVLYGPDTPIISPPDSSYLSGANLNLSCHSASNPSPQYSWRINGIPQQHTQVLFIA KITPNNNGTYACFVSNLATGRNNSIVKSITVSASGTSPGLSAGATVGIMIGVLVGVALI corresponding to amino acids 499-702 of CEA5_HUMAN (SEQ ID NO:863), which also corresponds to amino acids 143-346 of HUMCEA_PEA_{—}1_P20 (SEQ ID NO:870), wherein said first amino acid sequence and second amino acid sequence are contiguous and in a sequential order.

[0629] According to preferred embodiments of the present invention, there is provided an isolated chimeric polypeptide encoding for an edge portion of HUMCEA_PEA_{—}1_P20 (SEQ ID NO:870), comprising a polypeptide having a length “n”, wherein n is at least about 10 amino acids in length, optionally at least about 20 amino acids in length, preferably at least about 30 amino acids in length, more preferably at least about 40 amino acids in length and most preferably at least about 50 amino acids in length, wherein at least two amino acids comprise PE, having a structure as follows: a sequence starting from any of amino acid numbers 142−x to 142; and ending at any of amino acid numbers 143+((n−2)−x), in which x varies from 0 to n−2.

[0630] According to preferred embodiments of the present invention, there is provided an isolated chimeric polypeptide encoding for HUMCACH1A_PEA_{—}1_P7 (SEQ ID NO:796), comprising a first amino acid sequence being at least 90% homologous to MPTSETESVNTENVSGEGENRGCCGSL corresponding to amino acids 466-492 of CCAD_HUMAN_V3 (SEQ ID NO:791), which also corresponds to amino acids 1-27 of HUMCACH1A_PEA_{—}1_P7 (SEQ ID NO:796), a second amino acid sequence being at least 70%, optionally at least 80%, preferably at least 85%, more preferably at least 90% and most preferably at least 95% homologous to a polypeptide having the sequence WCWWRRRGAAKAGPSGCRRWG corresponding to amino acids 28-48 of HUMCACH1A_PEA_{—}1_P7 (SEQ ID NO:796), and a third amino acid sequence being at least 90% homologous to QAISKSKLSRRWRRWNRFNRRRCRAAVKSVTFYWLVIVLVFLNTLTISSEHYNQPDWLTQIQDIANKVLLA LFTCEMLVKMYSLGLQAYFVSLFNRFDCFVVCGGITETILVELEIMSPLGISVFRCVRLLRIFKVTRHWTSLS NLVASLLNSMKSIASLLLLLFLFIIIFSLLGMQLFGGKFNFDETQTKRSTFDNFPQALLTVFQILTGEDWNAVM YDGIMAYGGPSSSGMIVCIYFIILFICGNYILLNVFLAIAVDNLADAESLNTAQKEEAEEKERKKIARKESLEN KKNNKPEVNQIANSDNKVTIDDYREEDEDKDPYPPCDVPVGEEEEEEEEDEPEVPAGPRPRRISELNMKEKI APIPEGSAFFILSKTNPIRVGCHKLINHHIFTNLILVFIMLSSAALAAEDPIRSHSFRNTILGYFDYAFTAIFTVEI LLKMTTFGAFLHKGAFCRNYFNLLDMLVVGVSLVSFGIQSSAISVVKILRVLRVLRPLRAINRAKGLKHVVQ CVFVAIRTIGNIMIVTTLLQFMFACIGVQLFKGKFYRCTDEAKSNPEECRGLFILYKDGDVDSPVVRERIWQN SDFNFDNVLSAMMALFTVSTFEGWPALLYKAIDSNGENIGPIYNHRVEISIFFIIYIIIVAFFMMNIFVGFVIVTF QEQGEKEYKNCELDKNQRQCVEYALKARPLRRYIPKNPYQYKFWYVVNSSPFEYMMFVLIMLNTLCLAM QHYEQSKMFNDAMDILNMVFTGVFTVEMVLKVIAFKPKGYFSDAWNTFDSLIVIGSIIDVALSEADPTESEN VPVPTATPGNSEESNRISITFFRLFRVMRLVKLLSRGEGIRTLLWTFIKSFQALPYVALLIAMLFFIYAVIGMQ MFGKVAMRDNNQINRNNNFQTFPQAVLLLFRCATGEAWQEIMLACLPGKLCDPESDYNPGEEYTCGSNFAI VYFISFYMLCAFLIINLFVAVIMDNFDYLTRDWSILGPHHLDEFKRIWSEYDPEAKGRIKHLDVVTLLRRIQPP LGFGKLCPHRVACKRLVAMNMPLNSDGTVMFNATLFALVRTALKIKTEGNLEQANEELRAVIKKIWKKTS MKLLDQVVPPAGDDEVTVGKFYATFLIQDYFRKFKKRKEQGLVGKYPAKNTTIALQAGLRTLHDIGPEIRR AISCDLQDDEPEETKREEEDDVFKRNGALLGNHVNHVNSDRRDSLQQTNTTHRPLHVQRPSIPPASDTEKPL FPPAGNSVCHNHHNHNSIGKQVPTSTNANLNNANMSKAAHGKRPSIGNLEHVSENGHHSSHKHDREPQRR SSVKRTRYYETYIRSDSGDEQLPTICREDPEIHGYFRDPHCLGEQEYFSSEECYEDDSSPTWSRQNYGYYSRY PGRNIDSERPRGYHHPQGFLEDDDSPVCYDSRRSPRRRLLPPTPASHRRSSFNFECLRRQSSQEEVPSSPIFPH RTALPLHLMQQQIMAVAGLDSSKAQKYSPSHSTRSWATPPATPPYRDWTPCYTPLIQVEQSEALDQVNGSL PSLHRSSWYTDEPDISYRTFTPASLTVPSSFRNKNSDKQRSADSLVEAVLISEGLGRYARDPKFVSATKHETA DACDLTIDEMESAASTLLNGNVRPRANGDVGPLSHRQDYELQDFGPGYSDEEPDPGRDEEDLADEMICITTL corresponding to amino acids 494-2161 of CCAD_HUMAN_V3 (SEQ ID NO:791), which also corresponds to amino acids 49-1716 of HUMCACH1A_PEA_{—}1_P7 (SEQ ID NO:796), wherein said first amino acid sequence, second amino acid sequence and third amino acid sequence are contiguous and in a sequential order.

[0631] According to preferred embodiments of the present invention, there is provided an isolated polypeptide encoding for an edge portion of HUMCACH1A_PEA_{—}1_P7 (SEQ ID NO:796), comprising an amino acid sequence being at least 70%, optionally at least about 80%, preferably at least about 85%, more preferably at least about 90% and most preferably at least about 95% homologous to the sequence encoding for WCWWRRRGAAKAGPSGCRRWG, corresponding to HUMCACH1A_PEA_{—}1_P7 (SEQ ID NO:796).

[0632] According to preferred embodiments of the present invention, there is provided a bridge portion of HUMCACH1A_PEA_{—}1_P7 (SEQ ID NO:796), comprising a polypeptide having a length “n”, wherein n is at least about 10 amino acids in length, optionally at least about 20 amino acids in length, preferably at least about 30 amino acids in length, more preferably at least about 40 amino acids in length and most preferably at least about 50 amino acids in length, wherein at least two amino acids comprise L, having a structure as follows (numbering according to HUMCACH1A_PEA_{—}1_P7 (SEQ ID NO:796)): a sequence starting from any of amino acid numbers 492−x to 492; and ending at any of amino acid numbers 28+((n−2)−x), in which x varies from 0 to n−2.

[0633] According to preferred embodiments of the present invention, there is provided an isolated chimeric polypeptide encoding for HUMCACH1A_PEA_{—}1_P13 (SEQ ID NO:802), comprising a first amino acid sequence being at least 70%, optionally at least 80%, preferably at least 85%, more preferably at least 90% and most preferably at least 95% homologous to a polypeptide having the sequence MLRPRCLLRRTAHPPHSAPAPAPARSKCLGSWSNVLIRESSVWSLRL (SEQ ID NO:1477) corresponding to amino acids 1-47 of HUMCACH1A_PEA_{—}1_P13 (SEQ ID NO:802), and a second amino acid sequence being at least 90% homologous to DDEVTVGKFYATFLIQDYFRKFKKRKEQGLVGKYPAKNTTIALQAGLRTLHDIGPEIRRAISCDLQDDEPEE TKREEEDDVFKRNGALLGNHVNHVNSDRRDSLQQTNTTHRPLHVQRPSIPPASDTEKPLFPPAGNSVCHNH HNHNSIGKQVPTSTNANLNNANMSKAAHGKRPSIGNLEHVSENGHHSSHKHDREPQRRSSVKRTRYYETYI RSDSGDEQLPTICREDPEIHGYFRDPHCLGEQEYFSSEECYEDDSSPTWSRQNYGYYSRYPGRNIDSERPRGY HHPQGFLEDDDSPVCYDSRRSPRRRLLPPTPASHRRSSFNFECLRRQSSQEEVPSSPIFPHRTALPLHLMQQQI MAVAGLDSSKAQKYSPSHSTRSWATPPATPPYRDWTPCYTPLIQVEQSEALDQVNGSLPSLHRSSWYTDEP DISYRTFTPASLTVPSSFRNKNSDKQRSADSLVEAVLISEGLGRYARDPKFVSATKHEIADACDLTIDEMESA ASTLLNGNVRPRANGDVGPLSHRQDYELQDFGPGYSDEEPDPGRDEEDLADEMICITTL corresponding to amino acids 1598-2161 of CCAD_HUMAN (SEQ ID NO:790), which also corresponds to amino acids 48-611 of HUMCACH1A_PEA_{—}1_P13 (SEQ ID NO:802), wherein said first amino acid sequence and second amino acid sequence are contiguous and in a sequential order.

[0634] According to preferred embodiments of the present invention, there is provided an isolated polypeptide encoding for a head of HUMCACH1A_PEA_{—}1_P13 (SEQ ID NO:802), comprising a polypeptide being at least 70%, optionally at least about 80%, preferably at least about 85%, more preferably at least about 90% and most preferably at least about 95% homologous to the sequence MLRPRCLLRRTAHPPHSAPAPAPARSKCLGSWSNVLIRESSVWSLRL (SEQ ID NO:1477) of HUMCACH1A_PEA_{—}1_P13 (SEQ ID NO:802).

[0635] According to preferred embodiments of the present invention, there is provided an isolated chimeric polypeptide encoding for HUMCACH1A_PEA_{—}1_P14 (SEQ ID NO:803), comprising a first amino acid sequence being at least 90% homologous to MSKAAHGKRPSIGNLEHVSENGHHSSHKHDREPQRRSSVKRTRYYETYIRSDSGDEQLPTICREDPEIHGYF RDPHCLGEQEYFSSEECYEDDSSPTWSRQNYGYYSRYPGRNIDSERPRGYHHPQGFLEDDDSPVCYDSRRSP RRRLLPPTPASHRRSSFNFECLRRQSSQEEVPSSPIFPHRTALPLHLMQQQIMAVAGLDSSKAQKYSPSHSTRS WATPPATPPYRDWTPCYTPLIQVEQSEALDQVNGSLPSLHRSSWYTDEPDISYRTFTPASLTVPSSFRNKNSD KQRSADSLVEAVLISEGLGRYARDPKFVSATKHEIADACDLTIDEMESAASTLLNGNVRPRANGDVGPLSH RQDYELQDFGPGYSDEEPDPGRDEEDLADEMICITTL corresponding to amino acids 1763-2161 of CCAD_HUMAN (SEQ ID NO:790), which also corresponds to amino acids 1-399 of HUMCACH1A_PEA_{—}1_P14 (SEQ ID NO:803).

[0636] According to preferred embodiments of the present invention, there is provided an isolated chimeric polypeptide encoding for HUMCACH1A_PEA_{—}1_P17 (SEQ ID NO:805), comprising a first amino acid sequence being at least 90% homologous to MMMMMMMKKMQHQRQQQADHANEANYARGTRLPLSGEGPTSQPNSSKQTVLSWQAAIDAARQAKAA QTMSTSAPPPVGSLSQRKRQQYAKSKKQGNSSNSRPARALFCLSLNNPIRRACISIVEWKPFDIFILLAIFANC VALAIYIPFPEDDSNSTNHNLEKVEYAFLIIFTVETFLKIIAYGLLLHPNAYVRNGWNLLDFVIVIVGLFSVILE QLTKETEGGNHSSGKSGGFDVKALRAFRVLRPLRLVSGVPSLQVVLNSIIKAMVPLLHIALLVLFVIIIYAIIG LELFIGKMHKTCFFADSDIVAEEDPAPCAFSGNGRQCTANGTECRSGWVGPNGGITNFDNFAFAMLTVFQCI TMEGWTDVLYWMNDAMGFELPWVYFVSLVIFGSFFVLNLVLGVLSG corresponding to amino acids 1-407 of CCAD_HUMAN (SEQ ID NO:790), which also corresponds to amino acids 1-407 of HUMCACH1A_PEA_{—}1_P17 (SEQ ID NO:805), and a second amino acid sequence being at least 70%, optionally at least 80%, preferably at least 85%, more preferably at least 90% and most preferably at least 95% homologous to a polypeptide having the sequence HGGSRL (SEQ ID NO:1478) corresponding to amino acids 408-413 of HUMCACH1A_PEA_{—}1_P17 (SEQ ID NO:805), wherein said first amino acid sequence and second amino acid sequence are contiguous and in a sequential order.

[0637] According to preferred embodiments of the present invention, there is provided an isolated polypeptide encoding for a tail of HUMCACH1A_PEA_{—}1_P17 (SEQ ID NO:805), comprising a polypeptide being at least 70%, optionally at least about 80%, preferably at least about 85%, more preferably at least about 90% and most preferably at least about 95% homologous to the sequence HGGSRL (SEQ ID NO:1478) in HUMCACH1A_PEA_{—}1_P17 (SEQ ID NO:805).

[0638] According to preferred embodiments of the present invention, there is provided an isolated chimeric polypeptide encoding for AA583399_PEA_{—}1_P2 (SEQ ID NO:684), comprising a first amino acid sequence being at least 90% homologous to MFTRQAGHFVEGSKAGRSRGRLCLSQALRVAVRGAFVSLWFAAGAGDRERNKGDKGAQTGAGLSQEAED VDVSRARRVTDAPQGTLCGTGNRNSGSQSARVVGVAHLGEAFRVGVEQAISSCPEEVHGRHGLSMEIMWA RMDVALRSPGRGLLAGAGALCMTLAESSCPDYERGRRACLTLHRHPTPHCSTWGLPLRVAGSWLTVVTVE ALGGWRMGVRRTGQVGPTMHPPPVSGASPLLLHHLLLLLLIIILTC corresponding to amino acids 59-313 of MYEO_HUMAN_V1 (SEQ ID NO:680), which also corresponds to amino acids 1-255 of AA583399_PEA_{—}1_P2 (SEQ ID NO:684).

[0639] According to preferred embodiments of the present invention, there is provided an isolated chimeric polypeptide encoding for AA583399_PEA_{—}1_P4 (SEQ ID NO:685), comprising a first amino acid sequence being at least 70%, optionally at least 80%, preferably at least 85%, more preferably at least 90% and most preferably at least 95% homologous to a polypeptide having the sequence MSDLFIGFLVCSLSPLGTGTRCSCSPG (SEQ ID NO:1479) corresponding to amino acids 1-27 of AA583399_PEA_{—}1_P4 (SEQ ID NO:685), and a second amino acid sequence being at least 90% homologous to RNSGSQSARVVGVAHLGEAFRVGVEQAISSCPEEVHGRHGLSMEIMWARMDVALRSPGRGLLAGAGALC MTLAESSCPDYERGRRACLTLHRHPTPHCSTWGLPLRVAGSWLTVVTVEALGGWRMGVRRTGQVGPTMH PPPVSGASPLLLHHLLLLLLIIILTC corresponding to amino acids 150-313 of MYEO_HUMAN_V1 (SEQ ID NO:680), which also corresponds to amino acids 28-191 of AA583399_PEA_{—}1_P4 (SEQ ID NO:685), wherein said first amino acid sequence and second amino acid sequence are contiguous and in a sequential order.

[0640] According to preferred embodiments of the present invention, there is provided an isolated polypeptide encoding for a head of AA583399_PEA_{—}1_P4 (SEQ ID NO:685), comprising a polypeptide being at least 70%, optionally at least about 80%, preferably at least about 85%, more preferably at least about 90% and most preferably at least about 95% homologous to the sequence MSDLFIGFLVCSLSPLGTGTRCSCSPG (SEQ ID NO:1479) of AA583399_PEA_{—}1_P4 (SEQ ID NO:685).

[0641] According to preferred embodiments of the present invention, there is provided an isolated chimeric polypeptide encoding for AA583399_PEA_{—}1_P5 (SEQ ID NO:686), comprising a first amino acid sequence being at least 90% homologous to MEIMWARMDVALRSPGRGLLAGAGALCMTLAESSCPDYERGRRACLTLHRHPTPHCSTWGLPLRVAGSW LTVVTVEALGGWRMGVRRTGQVGPTMHPPPVSGASPLLLHHLLLLLLIIILTC corresponding to amino acids 192-313 of MYEO_HUMAN_V2 (SEQ ID NO:681), which also corresponds to amino acids 1-122 of AA583399_PEA_{—}1_P5 (SEQ ID NO:686).

[0642] According to preferred embodiments of the present invention, there is provided an isolated chimeric polypeptide encoding for AA583399_PEA_{—}1_P10 (SEQ ID NO:689), comprising a first amino acid sequence being at least 90% homologous to MFTRQAGHFVEGSKAGRSRGRLCLSQALRVAVRGAFVSLWFAAGAGDRERNKGDKGAQTGAGLSQEAED VDVSRARRVTDAPQGTLCGTGNRNSGSQSARAVGVAHLGEAFRVGVEQAISSCPEEVHGRHGLSMEIMWA QMDVALRSPGRGLLAGAGALCMTLAESSCPDYERGRRACLTLHRHPTPHCSTWGLPLRVAGSWLTVVTVE ALGRWRMGVRRTGQVGPTMHPPPVSGASPLLLHHLLLLLLIIILTC corresponding to amino acids 59-313 of MYEO_HUMAN_V3 (SEQ ID NO:682), which also corresponds to amino acids 1-255 of AA583399_PEA_{—}1_P10 (SEQ ID NO:689).

[0643] According to preferred embodiments of the present invention, there is provided an antibody capable of specifically binding to an epitope of an amino acid sequence as described herein.

[0644] Optionally the amino acid sequence corresponds to a bridge, edge portion, tail, head or insertion as described herein.

[0645] Optionally the antibody is capable of differentiating between a splice variant having said epitope and a corresponding known protein.

[0646] According to preferred embodiments of the present invention, there is provided a kit for detecting colon cancer, comprising a kit detecting overexpression of a splice variant as described herein.

[0647] Optionally the kit comprises a NAT-based technology.

[0648] Optionally said the kit further comprises at least one primer pair capable of selectively hybridizing to a nucleic acid sequence as described herein. Optionally the kit further comprises at least one oligonucleotide capable of selectively hybridizing to a nucleic acid sequence as described herein. The kit optionally comprises an antibody as described herein. The kit optionally further comprises at least one reagent for performing an ELISA or a Western blot.

[0649] There is optionally provided a method for detecting colon cancer, comprising detecting overexpression of a splice variant as described herein. Detecting overexpression is optionally performed with a NAT-based technology.

[0650] Optionally s detecting overexpression is performed with an immunoassay, optionally wherein said immunoassay comprises an antibody as described herein. A biomarker capable of detecting colon cancer, comprising any of the above nucleic acid sequences or a fragment thereof, or any of the above amino acid sequences or a fragment thereof. A method for screening for colon cancer, comprising detecting colon cancer cells with a biomarker or an antibody or a method or assay as described herein. A method for diagnosing colon cancer, comprising detecting colon cancer cells with a biomarker or an antibody or a method or assay as described herein. A method for monitoring disease progression and/or treatment efficacy and/or relapse of colon cancer, comprising detecting colon cancer cells with a biomarker or an antibody or a method or assay as described herein. A method of selecting a therapy for colon cancer, comprising detecting colon cancer cells with a biomarker or an antibody or a method or assay as described herein and selecting a therapy according to said detection.

[0651] According to preferred embodiments of the present invention, preferably any of the above nucleic acid and/or amino acid sequences further comprises any sequence having at least about 70%, preferably at least about 80%, more preferably at least about 90%, most preferably at least about 95% homology thereto.

[0652] Unless otherwise noted, all experimental data relates to variants of the present invention, named according to the segment being tested (as expression was tested through RT-PCR as described).

[0653] All nucleic acid sequences and/or amino acid sequences shown herein as embodiments of the present invention relate to their isolated form, as isolated polynucleotides (including for all transcripts), oligonucleotides (including for all segments, amplicons and primers), peptides (including for all tails, bridges, insertions or heads, optionally including other antibody epitopes as described herein) and/or polypeptides (including for all proteins). It should be noted that oligonucleotide and polynucleotide, or peptide and polypeptide, may optionally be used interchangeably.

[0654] Unless defined otherwise, all technical and scientific terms used herein have the meaning commonly understood by a person skilled in the art to which this invention belongs. The following references provide one of skill with a general definition of many of the terms used in this invention: Singleton et al., Dictionary of Microbiology and Molecular Biology (2nd ed. 1994); The Cambridge Dictionary of Science and Technology (Walker ed., 1988); The Glossary of Genetics, 5th Ed., R. Rieger et al. (eds.), Springer Verlag (1991); and Hale & Marham, The Harper Collins Dictionary of Biology (1991). All of these are hereby incorporated by reference as if fully set forth herein. As used herein, the following terms have the meanings ascribed to them unless specified otherwise.

### BRIEF DESCRIPTION OF DRAWINGS

[0655] FIG. 1. is schematic summary of cancer biomarkers selection engine and the wet validation stages.

[0656] FIG. 2. Schematic illustration, depicting grouping of transcripts of a given cluster based on presence or absence of unique sequence regions.

[0657] FIG. 3 is schematic summary of quantitative real-time PCR analysis.

[0658] FIG. 4 is schematic presentation of the oligonucleotide based microarray fabrication.

[0659] FIG. 5 is schematic summary of the oligonucleotide based microarray experimental flow.

[0660] FIG. 6 is a histogram showing Cancer and cell-line vs. normal tissue expression for Cluster M85491.

[0661] FIG. 7 is a histogram showing expression of the Ephrin type-B receptor 2 precursor (EC 2.7.1.112) (Tyrosine-protein kinase receptor EPH-3) M85491 transcripts which are detectable by amplicon as depicted in sequence name M85491seg24 (SEQ ID NO:1276) in normal and cancerous colon tissues.

[0662] FIG. 8 is a histogram showing the expression of M85491 transcripts which are detectable by amplicon as depicted in sequence name M85491seg24 (SEQ ID NO:1276) in different normal issues.

[0663] FIG. 9 is histogram, showing Cancer and cell-line vs. normal tissue expression for Cluster T10888, demonstrating overexpression in colorectal cancer, a mixture of malignant tumors from different tissues, pancreas carcinoma and gastric carcinoma.

[0664] FIG. 10 is a histogram showing expression of the CEA6_HUMAN Carcinoembryonic antigen-related cell adhesion molecule 6 (T10888) transcripts which are detectable by amplicon as depicted in sequence name T10888 junc11-17 (SEQ ID NO: 1279), in normal and cancerous colon tissues.

[0665] FIG. 11 is a the histogram showing the expression of T10888 transcripts, which are detectable by amplicon as depicted in sequence name T10888junc11-17 (SEQ ID NO: 1282), in different normal tissues.

[0666] FIG. 12 is a histogram showing Cancer and cell-line vs. normal tissue expression for Cluster H14624.

[0667] FIG. 13 is a histogram, showing Cancer and cell-line vs. normal tissue expression for Cluster H53626, demonstrating overexpression in the epithelial malignant tumors, a mixture of malignant tumors from different tissues and myosarcoma.

[0668] FIG. 14 is a histogram showing expression of the above-indicated Homo sapiens fibroblast growth factor receptor-like 1 (FGFRL1) H53626 transcripts, which are detectable by amplicon as depicted in sequence name H53626 junc24-27F1R3 (SEQ ID NO: 1285), in normal and cancerous colon tissues.

[0669] FIG. 15 is the expression of Homo sapiens fibroblast growth factor receptor-like 1 (FGFRL1) H53626 transcripts, which are detectable by amplicon as depicted in sequence name H53626seg25 (SEQ ID NO: 1288), in normal and cancerous colon tissues.

[0670] FIG. 16 is a a histogram, showing Cancer and cell-line vs. normal tissue expression for Cluster HSENA78, demonstrating overexpression in the epithelial malignant tumors and lung malignant tumors.

[0671] FIG. 17 is a histogram, showing Cancer and cell-line vs. normal tissue expression for the Cluster HUMODCA, demonstrating overexpression in the brain malignant tumors, colorectal cancer, epithelial malignant tumors and a mixture of malignant tumors from different tissues.

[0672] FIG. 18 is a histogram, showing Cancer and cell-line vs. normal tissue expression for the cluster R00299, demonstratin overexpression in the lung malignant tumors.

[0673] FIG. 19 is the histograms showing Cancer and cell-line vs. normal tissue expression for the cluster Z44808, demonstrating overexpression in the colorectal cancer, lung cancer and pancreas carcinoma.

[0674] FIG. 20 is the histograms showing Cancer and cell-line vs. normal tissue expression for the cluster Z25299, demonstrating overexpression in the brain malignant tumors, a mixture of malignant tumors from different tissues and ovarian carcinoma.

[0675] FIG. 21 is a histogram showing expression of Z25299 transcripts, which are detectable by amplicon as depicted in sequence name Z25299seg20 (SEQ ID NO: 1294), in normal and cancerous colon tissues.

[0676] FIG. 22 is a histogram showing the expression of Secretory leukocyte protease inhibitor Acid-stable proteinase inhibitor with strong affinities for trypsin, chymotrypsin, elastase, and cathepsin G. May prevent elastase-mediated damage to oral and possibly other mucosal tissues Z25299 transcripts which are detectable by amplicon as depicted in sequence name Z25299seg20 (SEQ ID NO: 1294) in different normal tissues.

[0677] FIG. 23 is the histograms showing Cancer and cell-line vs. normal tissue expression for the cluster HUMANK, demonstrating overexpression in epithelial malignant tumors.

[0678] FIG. 24 is the histograms showing Cancer and cell-line vs. normal tissue expression for the cluster HUMCA1XIA, demonstrating overexpression in the bone malignant tumors, epithelial malignant tumors, a mixture of malignant tumors from different tissues and lung malignant tumors.

[0679] FIG. 25 is the histograms showing Cancer and cell-line vs. normal tissue expression for the cluster HSS100PCB, demonstrating overexpression in the mixture of malignant tumors from different tissues.

[0680] FIG. 26 is the histograms showing Cancer and cell-line vs. normal tissue expression for the cluster D11853, demonstrating overexpression in the brain malignant tumors, colorectal cancer and a mixture of malignant tumors from different tissues.

[0681] FIG. 27 is the histograms showing Cancer and cell-line vs. normal tissue expression for the cluster R11723, demonstrating overexpression in the epithelial malignant tumors, a mixture of malignant tumors from different tissues and kidney malignant tumors

[0682] FIG. 28 is the histogram showing expression of the R11723 transcripts, which are detectable by amplicon as depicted in sequence name R11723 seg13 (SEQ ID NO: 1297) in normal and cancerous colon tissues.

[0683] FIG. 29 is the histogram showing expression of the R11723 transcripts, which are detectable by amplicon as depicted in sequence name R11723 junc11-18 (SEQ ID NO: 1300) in normal and cancerous colon tissues.

[0684] FIG. 30 is the histogram showing the expression of R11723 transcripts, detectable by amplicon depicted in sequence name R11723seg13 (SEQ ID NO: 1297) in different normal tissues.

[0685] FIG. 31 is the histogram showing the expression of R11723 transcripts, detectable by amplicon in sequence name R11723 junc11-18 (SEQ ID NO: 1300) in different normal tissues.

[0686] FIG. 32 is a histogram showing over expression of the SMO2_HUMAN SPARC related modular calcium-binding protein 2 precursor (Secreted modular calcium-binding protein 2) (SMOC-2) (Smooth muscle-associated protein 2) Z44808 transcripts which are detectable by amplicon as depicted in sequence name Z44808junc8-11 (SEQ ID NO: 1291) in cancerous colon samples relative to the normal samples

[0687] FIG. 33 is the histograms showing Cancer and cell-line vs. normal tissue expression for the cluster M77903, demonstrating overexpression in ovarian carcinoma and uterine malignancies.

[0688] FIG. 34 is the histogram showing expression of the SSR-alpha M77903 transcripts, which are detectable by amplicon, as depicted in sequence name M77903seg18 (SEQ ID NO: 1303) in normal and cancerous colon tissues.

[0689] FIG. 35 is the histogram showing low over expression for amplicon M77903 junc20-34-35 (SEQ ID NO: 1309) in the experiment carried out with colon.

[0690] FIG. 36 is the histogram showing low over expression for amplicon M77903 junc20-28 (SEQ ID NO: 1306) in the experiment carried out with colon

[0691] FIGS. 37-38 are histograms showing differential expression of 6 sequences: (M85491seg24 (SEQ ID NO: 1276), M77903 seg18 (SEQ ID NO: 1303), M77903junc20-28 (SEQ ID NO: 1306), Z44808 junc8-11 (SEQ ID NO: 1291), Z25299 seg 20 (SEQ ID NO: 1294) and HSKITCR seg3 (SEQ ID NO: 1309) in normal and cancerous colon tissues, in different combinations.

[0692] FIG. 39 is a histogram showing the expression of SMO2_HUMAN SPARC related modular calcium-binding protein 2 precursor (Secreted modular calcium-binding protein 2) (SMOC-2) (Smooth muscle-associated protein 2) Z44808 transcripts which are detectable by amplicon as depicted in sequence name Z44808 junc8-11 (SEQ ID NO: 1291) in different normal tissues.

[0693] FIG. 40 is the histogram showing Cancer and cell-line vs. normal tissue expression for the cluster AA583399, demonstrating overexpression in brain malignant tumors, epithelial malignant tumors, a mixture of malignant tumors from different tissues and gastric carcinoma.

[0694] FIG. 41 is the histogram showing expression of the AA583399 transcripts, which are detectable by amplicon as depicted in sequence name AA583399seg30-32 (SEQ ID NO: 1321), in normal and cancerous colon tissues.

[0695] FIG. 42 is the histogram showing expression of the AA583399 transcripts which are detectable by amplicon as depicted in sequence name AA583399seg17 (SEQ ID NO: 1324) in normal and cancerous colon tissues.

[0696] FIG. 43 is the histogram showing expression of the AA583399 transcripts which are detectable by amplicon as depicted in sequence name AA583399seg1 (SEQ ID NO: 1327) in normal and cancerous colon tissues.

[0697] FIG. 44 is the histogram showing Cancer and cell-line vs. normal tissue expression for the cluster AI684092, demonstrating overexpression in brain malignant tumors, epithelial malignant tumors and a mixture of malignant tumors from different tissues.

[0698] FIG. 45 is the histogram showing expression of the AA5315457 transcripts which are detectable by amplicon as depicted in sequence name AA5315457seg8 (SEQ ID NO: 1330) in normal and cancerous colon tissues.

[0699] FIG. 46 is the histogram showing Cancer and cell-line vs. normal tissue expression for the cluster HUMCACH1A, demonstrating overexpression in a mixture of malignant tumors from different tissues.

[0700] FIG. 47 is the histogram showing expression of the Voltage-dependent L-type calcium channel alpha-1D subunit Calcium channel, L type, alpha-1 polypeptide, isoform 2 Transcripts, which are detectable by seg 113, 35, 109, 125, in normal and cancerous colon tissues.

[0701] FIG. 48 is the histogram showing expression of the HUMCACH1A Transcripts, which are detectable by amplicon as depicted in sequence name HUMCACH1Aseg101 (SEQ ID NO: 1337), in normal and cancerous colon tissues.

[0702] FIG. 49 is the histogram showing Cancer and cell-line vs. normal tissue expression for the cluster HUMCEA, demonstrating overexpression in epithelial malignant tumors, a mixture of malignant tumors from different tissues and pancreas carcinoma.

[0703] FIG. 50 is the histogram showing expression of the HUMCEA transcripts which are detectable by seg12 and seg9, in normal and cancerous colon tissues.

[0704] FIG. 51 is the histogram showing expression of the Carcinoembryonic antigen-related cell adhesion molecule 5 CEACAM5 HUMCEA transcripts which are detectable by amplicon as depicted in sequence name HUMCEA seg31 (SEQ ID NO: 1342) in normal and cancerous colon tissues.

[0705] FIG. 52 is the histogram showing expression of the Carcinoembryonic antigen-related cell adhesion molecule 5 CEACAM5 HUMCEA transcripts which are detectable by amplicon as depicted in sequence name HUMCEA seg33 (SEQ ID NO: 1345) in normal and cancerous colon tissues.

[0706] FIG. 53 is the histogram showing expression of the Carcinoembryonic antigen-related cell adhesion molecule 5 CEACAM5 HUMCEA transcripts which are detectable by amplicon as depicted in sequence name HUMCEA seg35 (SEQ ID NO: 1348) in normal and cancerous colon tissues.

[0707] FIG. 54 is the histogram showing Cancer and cell-line vs. normal tissue expression for the cluster M78035, demonstrating overexpression in brain malignant tumors, colorectal cancer, epithelial malignant tumors, a mixture of malignant tumors from different tissues, malignant tumors involving the lymph nodes and pancreas carcinoma.

[0708] FIG. 55 is the histogram showing expression of the S-adenosylhomocysteine hydrolase (AHCY) M78035 transcripts, which are detectable by amplicon as depicted in sequence name M78035seg42 (SEQ ID NO: 1351), in normal and cancerous colon tissues

[0709] FIG. 56 is the histogram showing Cancer and cell-line vs. normal tissue expression for the cluster R30650, demonstrating overexpression in epithelial malignant tumors and a mixture of malignant tumors from different tissues.

[0710] FIG. 57 is the histogram showing expression of the R30650 transcripts which are detectable by amplicon as depicted in sequence name R30650 seg76 (SEQ ID NO: 1354) in normal and cancerous colon tissues.

[0711] FIG. 58 is the histogram showing Cancer and cell-line vs. normal tissue expression for the cluster T23657, demonstrating overexpression in epithelial malignant tumors.

[0712] FIG. 59 is the histogram showing expression of solute carrier organic anion transporter family, member 4A1 (SLCO4A1) T23657 transcripts, which are detectable by amplicon as depicted in sequence name T23657 seg17-18 (SEQ ID NO: 1357), in normal and cancerous colon tissues.

[0713] FIG. 60 is the histogram showing expression of solute carrier organic anion transporter family, member 4A1 (SLCO4A1) T23657 transcripts, which are detectable by amplicon as depicted in sequence name T23657 seg22 (SEQ ID NO: 1360), in normal and cancerous colon tissues.

[0714] FIG. 61 is the histogram showing expression of solute carrier organic anion transporter family, member 4A1 (SLCO4A1) T23657 transcripts, which are detectable by amplicon as depicted in sequence name T23657 seg29-32 (SEQ ID NO: 1363), in normal and cancerous colon tissues.

[0715] FIG. 62 is the histogram showing expression of solute carrier organic anion transporter family, member 4A1 (SLCO4A1) T23657 transcripts, which are detectable by amplicon as depicted in sequence name T23657 seg41 (SEQ ID NO: 1366), in normal and cancerous colon tissues.

[0716] FIG. 63 is the histogram showing Cancer and cell-line vs. normal tissue expression for the cluster T51958, demonstrating overexpression in epithelial malignant tumors and a mixture of malignant tumors from different tissues.

[0717] FIG. 64 is the histogram showing expression of PTK7 protein tyrosine kinase 7 (PTK7) T51958 transcripts which are detectable by amplicon as depicted in sequence name T51958seg38 (SEQ ID NO: 1369) in normal and cancerous colon tissues.

[0718] FIG. 65 is the histogram showing expression of PTK7 protein tyrosine kinase 7 (PTK7) T51958 transcripts which are detectable by amplicon as depicted in sequence name T51958seg7 (SEQ ID NO: 1372) in normal and cancerous colon tissues.

[0719] FIG. 66 is the histogram showing Cancer and cell-line vs. normal tissue expression for the cluster Z17877, demonstrating overexpression in brain malignant tumors and malignant tumors involving the bone marrow.

[0720] FIG. 67 is the histogram showing expression of c-myc-P64 mRNA, initiating from promoter P0 Z17877 transcripts, which are detectable by amplicon as depicted in sequence name Z17877seg8 (SEQ ID NO: 1375), in normal and cancerous colon tissues.

[0721] FIG. 68 is the histogram showing combined expression of 19 sequences (T23657seg 29 (SEQ ID NO: 1363), T23657seg 22 (SEQ ID NO: 1360), T23657seg 41 (SEQ ID NO: 1366), T23657seg17-18 (SEQ ID NO: 1357), AA315457seg8, R30650seg76 (SEQ ID NO: 1354), HUM-CEASeg 33 (SEQ ID NO: 1345), CEA-Seg35 (SEQ ID NO: 1348), CEA-Seg31 (SEQ ID NO: 1342), AA583399seg1 (SEQ ID NO: 1327), AA583399seg17 (SEQ ID NO: 1324), AA58339-seg30-32 (SEQ ID NO: 1321), HUMCACH1Aseg101 (SEQ ID NO: 1337), HSHCGI seg20 (SEQ ID NO: 1378), HSHCGI seg35 (SEQ ID NO: 1381), M78035seg 42 (SEQ ID NO: 1351), T51958seg7 (SEQ ID NO: 1372), T51958 seg3 (SEQ ID NO: 1369) and, Z17877 seg8 (SEQ ID NO: 1375)) in normal and cancerous colon tissues.

[0722] FIG. 69 is the histogram showing expression of TRIM31 tripartite motif HSHCGI transcripts which are detectable by amplicon as depicted in sequence name HSHCGI seg20 (SEQ ID NO: 1378) in normal and cancerous colon tissues.

[0723] FIG. 70 is the histogram showing expression of TRIM31 tripartite motif HSHCGI transcripts which are detectable by amplicon as depicted in sequence name HSHCGI seg35 (SEQ ID NO: 1381) in normal and cancerous colon tissues.

[0724] FIG. 71 is a histogram showing the expression of fibroblast growth factor receptor-like 1 (FGFRL1) transcripts detectable by or according to H53626 seg25 (SEQ ID NO: 1288) amplicon(s) and H53626 seg25F (SEQ ID NO: 1286) and H53626 seg25R (SEQ ID NO: 1287) in different normal tissues.

[0725] FIG. 72 is a histogram showing the expression of fibroblast growth factor receptor-like 1 (FGFRL1) transcripts detectable by or according to H53626 seg25 (SEQ ID NO: 1285) amplicon(s) and H53626 seg25F (SEQ ID NO: 1283) and H53626 junc24-27F1R3 (SEQ ID NO: 1284) in different normal tissues.

[0726] FIG. 73 is a histogram showing over expression of the Matrix metalloproteinase 11 (stromelysin 3) (MMP11) transcripts, which are detectable by amplicon as depicted in sequence name HSSTROL3 junc21-27 (SEQ ID NO: 1312), in cancerous colon samples relative to the normal samples.

[0727] FIG. 74 is a histogram showing over expression of the Matrix metalloproteinase 11 (stromelysin 3) (MMP11) transcripts, which are detectable by amplicon as depicted in sequence name HSSTROL3 seg25 (SEQ ID NO: 1315), in cancerous colon samples relative to the normal samples.

[0728] FIG. 75 is the histogram showing Cancer and cell-line vs. normal tissue expression for the cluster HSSTROL3, demonstrating overexpression in transitional cell carcinoma, epithelial malignant tumors, a mixture of malignant tumors from different tissues and pancreas carcinoma.

[0729] FIG. 76 is a histogram showing the expression of Stromelysin-3 HSSTROL3 transcripts, which are detectable by amplicon as depicted in sequence name HSSTROL3 seg24, in different normal tissues.

[0730] FIG. 77 is a histogram showing over expression of the Homo sapiens collagen, type XI, alpha 1 (COL11A1) transcripts detectable by seg55—HUMCA1XIA_seg55 amplicon in cancerous Colon samples relative to the normal samples.

[0731] FIG. 78 is a histogram showing expression of the Homo sapiens collagen, type XI, alpha 1 (COL11A1) transcripts detectable by seg55—HUMCA1XIA_seg55 amplicon in various normal tissues.

[0732] FIG. 79 is a histogram showing over expression of the Homo sapiens collagen, type XI, alpha 1 (COL11A1) transcripts detectable by HUMCA1XIA_seg54-55F2R2 in normal and cancerous Colon tissues.

[0733] FIG. 80 is a histogram showing expression of the Homo sapiens collagen, type XI, alpha 1 (COL11A1) transcripts detectable by HUMCA1XIA_seg54-55F2R2 in various normal tissues.

### DESCRIPTION OF PREFERRED EMBODIMENTS

[0734] The present invention is of novel markers for colon cancer that are both sensitive and accurate. Biomolecular sequences (amino acid and/or nucleic acid sequences) uncovered using the methodology of the present invention and described herein can be efficiently utilized as tissue or pathological markers and/or as drugs or drug targets for treating or preventing a disease.

[0735] These markers are specifically released to the bloodstream under conditions of colon cancer and/or other colon pathology, and/or are otherwise expressed at a much higher level and/or specifically expressed in colon cancer tissue or cells. The measurement of these markers, alone or in combination, in patient samples provides information that the diagnostician can correlate with a probable diagnosis of colon cancer and/or pathology.

[0736] The present invention therefore also relates to diagnostic assays for colon cancer and/or colon pathology, and methods of use of such markers for detection of colon cancer and/or colon pathology, optionally and preferably in a sample taken from a subject (patient), which is more preferably some type of blood sample.

[0737] In another embodiment, the present invention relates to bridges, tails, heads and/or insertions, and/or analogs, homologs and derivatives of such peptides. Such bridges, tails, heads and/or insertions are described in greater detail below with regard to the Examples.

[0738] As used herein a “tail” refers to a peptide sequence at the end of an amino acid sequence that is unique to a splice variant according to the present invention. Therefore, a splice variant having such a tail may optionally be considered as a chimera, in that at least a first portion of the splice variant is typically highly homologous (often 100% identical) to a portion of the corresponding known protein, while at least a second portion of the variant comprises the tail.

[0739] As used herein a “head” refers to a peptide sequence at the beginning of an amino acid sequence that is unique to a splice variant according to the present invention. Therefore, a splice variant having such a head may optionally be considered as a chimera, in that at least a first portion of the splice variant comprises the head, while at least a second portion is typically highly homologous (often 100% identical) to a portion of the corresponding known protein.

[0740] As used herein “an edge portion” refers to a connection between two portions of a splice variant according to the present invention that were not joined in the wild type or known protein. An edge may optionally arise due to a join between the above “known protein” portion of a variant and the tail, for example, and/or may occur if an internal portion of the wild type sequence is no longer present, such that two portions of the sequence are now contiguous in the splice variant that were not contiguous in the known protein. A “bridge” may optionally be an edge portion as described above, but may also include a join between a bead and a “known protein” portion of a variant, or a join between a tail and a “known protein” portion of a variant, or a join between an insertion and a “known protein” portion of a variant.

[0741] Optionally and preferably, a bridge between a tail or a head or a unique insertion, and a “known protein” portion of a variant, comprises at least about 10 amino acids, more preferably at least about 20 amino acids, most preferably at least about 30 amino acids, and even more preferably at least about 40 amino acids, in which at least one amino acid is from the tail/head/insertion and at least one amino acid is from the “known protein” portion of a variant. Also optionally, the bridge may comprise any number of amino acids from about 10 to about 40 amino acids (for example, 10, 11, 12, 13 . . . 37, 38, 39, 40 amino acids in length, or any number in between).

[0742] It should be noted that a bridge cannot be extended beyond the length of the sequence in either direction, and it should be assumed that every bridge description is to be read in such manner that the bridge length does not extend beyond the sequence itself.

[0743] Furthermore, bridges are described with regard to a sliding window in certain contexts below. For example, certain descriptions of the bridges feature the following format: a bridge between two edges (in which a portion of the known protein is not present in the variant) may optionally be described as follows: a bridge portion of CONTIG-NAME_P1 (representing the name of the protein), comprising a polypeptide having a length “n”, wherein n is at least about 10 amino acids in length, optionally at least about 20 amino acids in length, preferably at least about 30 amino acids in length, more preferably at least about 40 amino acids in length and most preferably at least about 50 amino acids in length, wherein at least two amino acids comprise XX (2 amino acids in the center of the bridge, one from each end of the edge), having a structure as follows (numbering according to the sequence of CONTIG-NAME_P1): a sequence starting from any of amino acid numbers 49−x to 49 (for example); and ending at any of amino acid numbers 50+((n−2)−x) (for example), in which x varies from 0 to n−2. In this example, it should also be read as including bridges in which n is any number of amino acids between 10-50 amino acids in length. Furthermore, the bridge polypeptide cannot extend beyond the sequence, so it should be read such that 49−x (for example) is not less than 1, nor 50+((n−2)−x) (for example) greater than the total sequence length.

[0744] In another embodiment, this invention provides antibodies specifically recognizing the splice variants and polypeptide fragments thereof of this invention. Preferably such antibodies differentially recognize splice variants of the present invention but do not recognize a corresponding known protein (such known proteins are discussed with regard to their splice variants in the Examples below).

[0745] In another embodiment, this invention provides an isolated nucleic acid molecule encoding for a splice variant according to the present invention, having a nucleotide sequence as set forth in any one of the sequences listed herein, or a sequence complementary thereto. In another embodiment, this invention provides an isolated nucleic acid molecule, having a nucleotide sequence as set forth in any one of the sequences listed herein, or a sequence complementary thereto. In another embodiment, this invention provides an oligonucleotide of at least about 12 nucleotides, specifically hybridizable with the nucleic acid molecules of this invention. In another embodiment, this invention provides vectors, cells, liposomes and compositions comprising the isolated nucleic acids of this invention.

[0746] In another embodiment, this invention provides a method for detecting a splice variant according to the present invention in a biological sample, comprising: contacting a biological sample with an antibody specifically recognizing a splice variant according to the present invention under conditions whereby the antibody specifically interacts with the splice variant in the biological sample but do not recognize known corresponding proteins (wherein the known protein is discussed with regard to its splice variant(s) in the Examples below), and detecting said interaction; wherein the presence of an interaction correlates with the presence of a splice variant in the biological sample.

[0747] In another embodiment, this invention provides a method for detecting a splice variant nucleic acid sequences in a biological sample, comprising: hybridizing the isolated nucleic acid molecules or oligonucleotide fragments of at least about a minimum length to a nucleic acid material of a biological sample and detecting a hybridization complex; wherein the presence of a hybridization complex correlates with the presence of a splice variant nucleic acid sequence in the biological sample.

[0748] According to the present invention, the splice variants described herein are non-limiting examples of markers for diagnosing colon cancer and/or colon pathology. Each splice variant marker of the present invention can be used alone or in combination, for various uses, including but not limited to, prognosis, prediction, screening, early diagnosis, determination of progression, therapy selection and treatment monitoring of colon cancer and/or colon pathology.

[0749] According to optional but preferred embodiments of the present invention, any marker according to the present invention may optionally be used alone or combination. Such a combination may optionally comprise a plurality of markers described herein, optionally including any subcombination of markers, and/or a combination featuring at least one other marker, for example a known marker. Furthermore, such a combination may optionally and preferably be used as described above with regard to determining a ratio between a quantitative or semi-quantitative measurement of any marker described herein to any other marker described herein, and/or any other known marker, and/or any other marker. With regard to such a ratio between any marker described herein (or a combination thereof) and a known marker, more preferably the known marker comprises the “known protein” as described in greater detail below with regard to each cluster or gene.

[0750] According to other preferred embodiments of the present invention, a splice variant protein or a fragment thereof, or a splice variant nucleic acid sequence or a fragment thereof, may be featured as a biomarker for detecting colon cancer and/or colon pathology, such that a biomarker may optionally comprise any of the above.

[0751] According to still other preferred embodiments, the present invention optionally and preferably encompasses any amino acid sequence or fragment thereof encoded by a nucleic acid sequence corresponding to a splice variant protein as described herein. Any oligopeptide or peptide relating to such an amino acid sequence or fragment thereof may optionally also (additionally or alternatively) be used as a biomarker, including but not limited to the unique amino acid sequences of these proteins that are depicted as tails, heads, insertions, edges or bridges. The present invention also optionally encompasses antibodies capable of recognizing, and/or being elicited by, such oligopeptides or peptides.

[0752] The present invention also optionally and preferably encompasses any nucleic acid sequence or fragment thereof, or amino acid sequence or fragment thereof, corresponding to a splice variant of the present invention as described above, optionally for any application.

[0753] Non-limiting examples of methods or assays are described below.

[0754] The present invention also relates to kits based upon such diagnostic methods or assays.

### Nucleic Acid Sequences and Oligonucleotides

[0755] Various embodiments of the present invention encompass nucleic acid sequences described hereinabove; fragments thereof, sequences hybridizable therewith, sequences homologous thereto, sequences encoding similar polypeptides with different codon usage, altered sequences characterized by mutations, such as deletion, insertion or substitution of one or more nucleotides, either naturally occurring or artificially induced, either randomly or in a targeted fashion.

[0756] The present invention encompasses nucleic acid sequences described herein; fragments thereof, sequences hybridizable therewith, sequences homologous thereto [e.g., at least 50%, at least 55%, at least 60%, at least 65%, at least 70%, at least 75%, at least 80%, at least 85%, at least 95% or more say 100% identical to the nucleic acid sequences set forth below], sequences encoding similar polypeptides with different codon usage, altered sequences characterized by mutations, such as deletion, insertion or substitution of one or more nucleotides, either naturally occurring or man induced, either randomly or in a targeted fashion. The present invention also encompasses homologous nucleic acid sequences (i.e., which form a part of a polynucleotide sequence of the present invention) which include sequence regions unique to the polynucleotides of the present invention.

[0757] In cases where the polynucleotide sequences of the present invention encode previously unidentified polypeptides, the present invention also encompasses novel polypeptides or portions thereof, which are encoded by the isolated polynucleotide and respective nucleic acid fragments thereof described hereinabove.

[0758] A “nucleic acid fragment” or an “oligonucleotide” or a “polynucleotide” are used herein interchangeably to refer to a polymer of nucleic acids. A polynucleotide sequence of the present invention refers to a single or double stranded nucleic acid sequences which is isolated and provided in the form of an RNA sequence, a complementary polynucleotide sequence (cDNA), a genomic polynucleotide sequence and/or a composite polynucleotide sequences (e.g., a combination of the above).

[0759] As used herein the phrase “complementary polynucleotide sequence” refers to a sequence, which results from reverse transcription of messenger RNA using a reverse transcriptase or any other RNA dependent DNA polymerase. Such a sequence can be subsequently amplified in vivo or in vitro using a DNA dependent DNA polymerase.

[0760] As used herein the phrase “genomic polynucleotide sequence” refers to a sequence derived (isolated) from a chromosome and thus it represents a contiguous portion of a chromosome.

[0761] As used herein the phrase “composite polynucleotide sequence” refers to a sequence, which is composed of genomic and cDNA sequences. A composite sequence can include some exonal sequences required to encode the polypeptide of the present invention, as well as some intronic sequences interposing therebetween. The intronic sequences can be of any source, including of other genes, and typically will include conserved splicing signal sequences. Such intronic sequences may further include cis acting expression regulatory elements.

[0762] Preferred embodiments of the present invention encompass oligonucleotide probes.

[0763] An example of an oligonucleotide probe which can be utilized by the present invention is a single stranded polynucleotide which includes a sequence complementary to the unique sequence region of any variant according to the present invention, including but not limited to a nucleotide sequence coding for an amino sequence of a bridge, tail, head and/or insertion according to the present invention, and/or the equivalent portions of any nucleotide sequence given herein (including but not limited to a nucleotide sequence of a node, segment or amplicon described herein).

[0764] Alternatively, an oligonucleotide probe of the present invention can be designed to hybridize with a nucleic acid sequence encompassed by any of the above nucleic acid sequences, particularly the portions specified above, including but not limited to a nucleotide sequence coding for an amino sequence of a bridge, tail, head and/or insertion according to the present invention, and/or the equivalent portions of any nucleotide sequence given herein (including but not limited to a nucleotide sequence of a node, segment or amplicon described herein).

[0765] Oligonucleotides designed according to the teachings of the present invention can be generated according to any oligonucleotide synthesis method known in the art such as enzymatic synthesis or solid phase synthesis. Equipment and reagents for executing solid-phase synthesis are commercially available from, for example, Applied Biosystems. Any other means for such synthesis may also be employed; the actual synthesis of the oligonucleotides is well within the capabilities of one skilled in the art and can be accomplished via established methodologies as detailed in, for example, “Molecular Cloning: A laboratory Manual” Sambrook et al., (1989); “Current Protocols in Molecular Biology” Volumes I-III Ausubel, R. M., ed. (1994); Ausubel et al., “Current Protocols in Molecular Biology”, John Wiley and Sons, Baltimore, Md. (1989); Perbal, “A Practical Guide to Molecular Cloning”, John Wiley & Sons, New York (1988) and “Oligonucleotide Synthesis” Gait, M. J., ed. (1984) utilizing solid phase chemistry, e.g. cyanoethyl phosphoramidite followed by deprotection, desalting and purification by for example, an automated trityl-on method or HPLC.

[0766] Oligonucleotides used according to this aspect of the present invention are those having a length selected from a range of about 10 to about 200 bases preferably about 15 to about 150 bases, more preferably about 20 to about 100 bases, most preferably about 20 to about 50 bases. Preferably, the oligonucleotide of the present invention features at least 17, at least 18, at least 19, at least 20, at least 22, at least 25, at least 30 or at least 40, bases specifically hybridizable with the biomarkers of the present invention.

[0767] The oligonucleotides of the present invention may comprise heterocylic nucleosides consisting of purines and the pyrimidines bases, bonded in a 3′ to 5′ phosphodiester linkage.

[0768] Preferably used oligonucleotides are those modified at one or more of the backbone, internucleoside linkages or bases, as is broadly described hereinunder.

[0769] Specific examples of preferred oligonucleotides useful according to this aspect of the present invention include oligonucleotides containing modified backbones or non-natural internucleoside linkages. Oligonucleotides having modified backbones include those that retain a phosphorus atom in the backbone, as disclosed in U.S. Pat. Nos. 4,469,863; 4,476,301; 5,023,243; 5,177,196; 5,188,897; 5,264,423; 5,276,019; 5,278,302; 5,286,717; 5,321,131; 5,399,676; 5,405,939; 5,453,496; 5,455,233; 5,466,677; 5,476,925; 5,519,126; 5,536,821; 5,541,306; 5,550,111; 5,563,253; 5,571,799; 5,587,361; and 5,625,050.

[0770] Preferred modified oligonucleotide backbones include, for example, phosphorothioates, chiral phosphorothioates, phosphorodithioates, phosphotriesters, aminoalkyl phosphotriesters, methyl and other alkyl phosphonates including 3′-alkylene phosphonates and chiral phosphonates, phosphinates, phosphoramidates including 3′-amino phosphoramidate and aminoalkylphosphoramidates, thionophosphoramidates, thionoalkylphosphonates, thionoalkylphosphotriesters, and boranophosphates having normal 3′-5′ linkages, 2′-5′ linked analogs of these, and those having inverted polarity wherein the adjacent pairs of nucleoside units are linked 3′-5′ to 5′-3′ or 2′-5′ to 5′-2′. Various salts, mixed salts and free acid forms can also be used.

[0771] Alternatively, modified oligonucleotide backbones that do not include a phosphorus atom therein have backbones that are formed by short chain alkyl or cycloalkyl internucleoside linkages, mixed heteroatom and alkyl or cycloalkyl internucleoside linkages, or one or more short chain heteroatomic or heterocyclic internucleoside linkages. These include those having morpholino linkages (formed in part from the sugar portion of a nucleoside); siloxane backbones; sulfide, sulfoxide and sulfone backbones; formacetyl and thioformacetyl backbones; methylene formacetyl and thioformacetyl backbones; alkene containing backbones; sulfamate backbones; methyleneimino and methylenehydrazino backbones; sulfonate and sulfonamide backbones; amide backbones; and others having mixed N, O, S and CH₂ component parts, as disclosed in U.S. Pat. Nos. 5,034,506; 5,166,315; 5,185,444; 5,214,134; 5,216,141; 5,235,033; 5,264,562; 5,264,564; 5,405,938; 5,434,257; 5,466,677; 5,470,967; 5,489,677; 5,541,307; 5,561,225; 5,596,086; 5,602,240; 5,610,289; 5,602,240; 5,608,046; 5,610,289; 5,618,704; 5,623,070; 5,663,312; 5,633,360; 5,677,437; and 5,677,439.

[0772] Other oligonucleotides which can be used according to the present invention, are those modified in both sugar and the internucleoside linkage, i.e., the backbone, of the nucleotide units are replaced with novel groups. The base units are maintained for complementation with the appropriate polynucleotide target. An example for such an oligonucleotide mimetic, includes peptide nucleic acid (PNA). United States patents that teach the preparation of PNA compounds include, but are not limited to, U.S. Pat. Nos. 5,539,082; 5,714,331; and 5,719,262, each of which is herein incorporated by reference. Other backbone modifications, which can be used in the present invention are disclosed in U.S. Pat. No. 6,303,374.

[0773] Oligonucleotides of the present invention may also include base modifications or substitutions. As used herein, “unmodified” or “natural” bases include the purine bases adenine (A) and guanine (G), and the pyrimidine bases thymine (T), cytosine (C) and uracil (U). Modified bases include but are not limited to other synthetic and natural bases such as 5-methylcytosine (5-me-C), 5-hydroxymethyl cytosine, xanthine, hypoxanthine, 2-aminoadenine, 6-methyl and other alkyl derivatives of adenine and guanine, 2-propyl and other alkyl derivatives of adenine and guanine, 2-thiouracil, 2-thiothymine and 2-thiocytosine, 5-halouracil and cytosine, 5-propynyl uracil and cytosine, 6-azo uracil, cytosine and thymine, 5-uracil (pseudouracil), 4-thiouracil, 8-halo, 8-amino, 8-thiol, 8-thioalkyl, 8-hydroxyl and other 8-substituted adenines and guanines, 5-halo particularly 5-bromo, 5-trifluoromethyl and other 5-substituted uracils and cytosines, 7-methylguanine and 7-methyladenine, 8-azaguanine and 8-azaadenine, 7-deazaguanine and 7-deazaadenine and 3-deazaguanine and 3-deazaadenine. Further bases particularly useful for increasing the binding affinity of the oligomeric compounds of the invention include 5-substituted pyrimidines, 6-azapyrimidines and N-2, N-6 and O-6 substituted purines, including 2-aminopropyladenine, 5-propynyluracil and 5-propynylcytosine. 5-methylcytosine substitutions have been shown to increase nucleic acid duplex stability by 0.6-1.2° C. and are presently preferred base substitutions, even more particularly when combined with 2′-O-methoxyethyl sugar modifications.

[0774] Another modification of the oligonucleotides of the invention involves chemically linking to the oligonucleotide one or more moieties or conjugates, which enhance the activity, cellular distribution or cellular uptake of the oligonucleotide. Such moieties include but are not limited to lipid moieties such as a cholesterol moiety, cholic acid, a thioether, e.g., hexyl-5-tritylthiol, a thiocholesterol, an aliphatic chain, e.g., dodecandiol or undecyl residues, a phospholipid, e.g., di-hexadecyl-rac-glycerol or triethylammonium 1,2-di-O-hexadecyl-rac-glycero-3-H-phosphonate, a polyamine or a polyethylene glycol chain, or adamantane acetic acid, a palmityl moiety, or an octadecylamine or hexylamino-carbonyl-oxycholesterol moiety, as disclosed in U.S. Pat. No. 6,303,374.

[0775] It is not necessary for all positions in a given oligonucleotide molecule to be uniformly modified, and in fact more than one of the aforementioned modifications may be incorporated in a single compound or even at a single nucleoside within an oligonucleotide.

[0776] It will be appreciated that oligonucleotides of the present invention may include further modifications for more efficient use as diagnostic agents and/or to increase bioavailability, therapeutic efficacy and reduce cytotoxicity.

[0777] To enable cellular expression of the polynucleotides of the present invention, a nucleic acid construct according to the present invention may be used, which includes at least a coding region of one of the above nucleic acid sequences, and further includes at least one cis acting regulatory element. As used herein, the phrase “cis acting regulatory element” refers to a polynucleotide sequence, preferably a promoter, which binds a trans acting regulator and regulates the transcription of a coding sequence located downstream thereto.

[0778] Any suitable promoter sequence can be used by the nucleic acid construct of the present invention.

[0779] Preferably, the promoter utilized by the nucleic acid construct of the present invention is active in the specific cell population transformed. Examples of cell type-specific and/or tissue-specific promoters include promoters such as albumin that is liver specific, lymphoid specific promoters [Calame et al., (1988) Adv. Immunol. 43:235-275]; in particular promoters of T-cell receptors [Winoto et al., (1989) EMBO J. 8:729-733] and immunoglobulins; [Banerji et al. (1983) Cell 33729-740], neuron-specific promoters such as the neurofilament promoter [Byrne et al. (1989) Proc. Natl. Acad. Sci. USA 86:5473-5477], pancreas-specific promoters (Edlunch et al. (1985) Science 230:912-916] or mammary gland-specific promoters such as the milk whey promoter (U.S. Pat. No. 4,873,316 and European Application Publication No. 264,166). The nucleic acid construct of the present invention can further include an enhancer, which can be adjacent or distant to the promoter sequence and can function in up regulating the transcription therefrom.

[0780] The nucleic acid construct of the present invention preferably further includes an appropriate selectable marker and/or an origin of replication. Preferably, the nucleic acid construct utilized is a shuttle vector, which can propagate both in E. coli (wherein the construct comprises an appropriate selectable marker and origin of replication) and be compatible for propagation in cells, or integration in a gene and a tissue of choice. The construct according to the present invention can be, for example, a plasmid, a bacmid, a phagemid, a cosmid, a phage, a virus or an artificial chromosome.

[0781] Examples of suitable constructs include, but are not limited to, pcDNA3, pcDNA3.1 (+/−), pGL3, PzeoSV2 (+/−), pDisplay, pEF/myc/cyto, pCMV/myc/cyto each of which is commercially available from Invitrogen Co. (www.invitrogen.com). Examples of retroviral vector and packaging systems are those sold by Clontech, San Diego, Calif., including Retro-X vectors pLNCX and pLXSN, which permit cloning into multiple cloning sites and the trasgene is transcribed from CMV promoter. Vectors derived from Mo-MuLV are also included such as pBabe, where the transgene will be transcribed from the 5′LTR promoter.

[0782] Currently preferred in vivo nucleic acid transfer techniques include transfection with viral or non-viral constructs, such as adenovirus, lentivirus, Herpes simplex I virus, or adeno-associated virus (AAV) and lipid-based systems. Useful lipids for lipid-mediated transfer of the gene are, for example, DOTMA, DOPE, and DC-Chol [Tonkinson et al., Cancer Investigation, 14(1): 54-65 (1996)]. The most preferred constructs for use in gene therapy are viruses, most preferably adenoviruses, AAV, lentiviruses, or retroviruses. A viral construct such as a retroviral construct includes at least one transcriptional promoter/enhancer or locus-defining element(s), or other elements that control gene expression by other means such as alternate splicing, nuclear RNA export, or post-translational modification of messenger. Such vector constructs also include a packaging signal, long terminal repeats (LTRs) or portions thereof, and positive and negative strand primer binding sites appropriate to the virus used, unless it is already present in the viral construct. In addition, such a construct typically includes a signal sequence for secretion of the peptide from a host cell in which it is placed. Preferably the signal sequence for this purpose is a mammalian signal sequence or the signal sequence of the polypeptide variants of the present invention. Optionally, the construct may also include a signal that directs polyadenylation, as well as one or more restriction sites and a translation termination sequence. By way of example, such constructs will typically include a 5′ LTR, a tRNA binding site, a packaging signal, an origin of second-strand DNA synthesis, and a 3′ LTR or a portion thereof. Other vectors can be used that are non-viral, such as cationic lipids, polylysine, and dendrimers.

### Hybridization Assays

[0783] Detection of a nucleic acid of interest in a biological sample may optionally be effected by hybridization-based assays using an oligonucleotide probe (non-limiting examples of probes according to the present invention were previously described).

[0784] Traditional hybridization assays include PCR, RT-PCR, Real-time PCR, RNase protection, in-situ hybridization, primer extension, Southern blots (DNA detection), dot or slot blots (DNA, RNA), and Northern blots (RNA detection) (NAT type assays are described in greater detail below). More recently, PNAs have been described (Nielsen et al. 1999, Current Opin. Biotechnol. 10:71-75). Other detection methods include kits containing probes on a dipstick setup and the like.

[0785] Hybridization based assays which allow the detection of a variant of interest (i.e., DNA or RNA) in a biological sample rely on the use of oligonucleotides which can be 10, 15, 20, or 30 to 100 nucleotides long preferably from 10 to 50, more preferably from 40 to 50 nucleotides long.

[0786] Thus, the isolated polynucleotides (oligonucleotides) of the present invention are preferably hybridizable with any of the herein described nucleic acid sequences under moderate to stringent hybridization conditions.

[0787] Moderate to stringent hybridization conditions are characterized by a hybridization solution such as containing 10% dextrane sulfate, 1 M NaCl, 1% SDS and 5×10⁶ cpm ³²P labeled probe, at 65° C., with a final wash solution of 0.2×SSC and 0.1% SDS and final wash at 65° C. and whereas moderate hybridization is effected using a hybridization solution containing 10% dextrane sulfate, 1 M NaCl, 1% SDS and 5×10⁶ cpm ³²P labeled probe, at 65° C., with a final wash solution of 1×SSC and 0.1% SDS and final wash at 50° C.

[0788] More generally, hybridization of short nucleic acids (below 200 bp in length, e.g. 17-40 bp in length) can be effected using the following exemplary hybridization protocols which can be modified according to the desired stringency; (i) hybridization solution of 6×SSC and 1% SDS or 3 M TMACI, 0.01 M sodium phosphate (pH 6.8), 1 mM EDTA (pH 7.6), 0.5% SDS, 100 μg/ml denatured salmon sperm DNA and 0.1% nonfat dried milk, hybridization temperature of 1-1.5° C. below the Tₘ, final wash solution of 3 M TMACI, 0.01 M sodium phosphate (pH 6.8), 1 mM EDTA (pH 7.6), 0.5% SDS at 1-1.5° C. below the Tₘ; (ii) hybridization solution of 6×SSC and 0.1% SDS or 3 M TMACI, 0.01 M sodium phosphate (pH 6.8), 1 mM EDTA (pH 7.6), 0.5% SDS, 100 μg/ml denatured salmon sperm DNA and 0.1% nonfat dried milk, hybridization temperature of 2-2.5° C. below the Tₘ, final wash solution of 3 M TMACI, 0.01 M sodium phosphate (pH 6.8), 1 mM EDTA (pH 7.6), 0.5% SDS at 1-1.5° C. below the Tₘ, final wash solution of 6×SSC, and final wash at 22° C.; (iii) hybridization solution of 6×SSC and 1% SDS or 3 M TMACI, 0.01 M sodium phosphate (pH 6.8), 1 mM EDTA (pH 7.6), 0.5% SDS, 100 μg/ml denatured salmon sperm DNA and 0.1% nonfat dried milk, hybridization temperature.

[0789] The detection of hybrid duplexes can be carried out by a number of methods. Typically, hybridization duplexes are separated from unhybridized nucleic acids and the labels bound to the duplexes are then detected. Such labels refer to radioactive, fluorescent, biological or enzymatic tags or labels of standard use in the art. A label can be conjugated to either the oligonucleotide probes or the nucleic acids derived from the biological sample.

[0790] Probes can be labeled according to numerous well known methods. Non-limiting examples of radioactive labels include 3H, 14C, 32P, and 35S, Non-limiting examples of detectable markers include ligands, fluorophores, chemiluminescent agents, enzymes, and antibodies. Other detectable markers for use with probes, which can enable an increase in sensitivity of the method of the invention, include biotin and radio-nucleotides. It will become evident to the person of ordinary skill that the choice of a particular label dictates the manner in which it is bound to the probe.

[0791] For example, oligonucleotides of the present invention can be labeled subsequent to synthesis, by incorporating biotinylated dNTPs or rNTP, or some similar means (e.g., photo-cross-linking a psoralen derivative of biotin to RNAs), followed by addition of labeled streptavidin (e.g., phycoerythrin-conjugated streptavidin) or the equivalent. Alternatively, when fluorescently-labeled oligonucleotide probes are used, fluorescein, lissamine, phycoerythrin, rhodamine (Perkin Elmer Cetus), Cy2, Cy3, Cy3.5, Cy5, Cy5.5, Cy7, FluorX (Amersham) and others [e.g., Kricka et al. (1992), Academic Press San Diego, Calif] can be attached to the oligonucleotides.

[0792] Those skilled in the art will appreciate that wash steps may be employed to wash away excess target DNA or probe as well as unbound conjugate. Further, standard heterogeneous assay formats are suitable for detecting the hybrids using the labels present on the oligonucleotide primers and probes.

[0793] It will be appreciated that a variety of controls may be usefully employed to improve accuracy of hybridization assays. For instance, samples may be hybridized to an irrelevant probe and treated with RNAse A prior to hybridization, to assess false hybridization.

[0794] Although the present invention is not specifically dependent on the use of a label for the detection of a particular nucleic acid sequence, such a label might be beneficial, by increasing the sensitivity of the detection. Furthermore, it enables automation. Probes can be labeled according to numerous well known methods.

[0795] As commonly known, radioactive nucleotides can be incorporated into probes of the invention by several methods. Non-limiting examples of radioactive labels include ³H, ¹⁴C, 32P, and 35S.

[0796] Those skilled in the art will appreciate that wash steps may be employed to wash away excess target DNA or probe as well as unbound conjugate. Further, standard heterogeneous assay formats are suitable for detecting the hybrids using the labels present on the oligonucleotide primers and probes.

[0797] It will be appreciated that a variety of controls may be usefully employed to improve accuracy of hybridization assays.

[0798] Probes of the invention can be utilized with naturally occurring sugar-phosphate backbones as well as modified backbones including phosphorothioates, dithionates, alkyl phosphonates and a-nucleotides and the like. Probes of the invention can be constructed of either ribonucleic acid (RNA) or deoxyribonucleic acid (DNA), and preferably of DNA.

### NAT Assays

[0799] Detection of a nucleic acid of interest in a biological sample may also optionally be effected by NAT-based assays, which involve nucleic acid amplification technology, such as PCR for example (or variations thereof such as real-time PCR for example).

[0800] As used herein, a “primer” defines an oligonucleotide which is capable of annealing to (hybridizing with) a target sequence, thereby creating a double stranded region which can serve as an initiation point for DNA synthesis under suitable conditions.

[0801] Amplification of a selected, or target, nucleic acid sequence may be carried out by a number of suitable methods. See generally Kwoh et al., 1990, Am. Biotechnol. Lab. 8:14 Numerous amplification techniques have been described and can be readily adapted to suit particular needs of a person of ordinary skill. Non-limiting examples of amplification techniques include polymerase chain reaction (PCR), ligase chain reaction (LCR), strand displacement amplification (SDA), transcription-based amplification, the q3 replicase system and NASBA (Kwoh et al., 1989, Proc. Natl. Acad. Sci. USA 86, 1173-1177; Lizardi et al., 1988, BioTechnology 6:1197-1202; Malek et al., 1994, Methods Mol. Biol., 28:253-260; and Sambrook et al., 1989, supra).

[0802] The terminology “amplification pair” (or “primer pair”) refers herein to a pair of oligonucleotides (oligos) of the present invention, which are selected to be used together in amplifying a selected nucleic acid sequence by one of a number of types of amplification processes, preferably a polymerase chain reaction. Other types of amplification processes include ligase chain reaction, strand displacement amplification, or nucleic acid sequence-based amplification, as explained in greater detail below. As commonly known in the art, the oligos are designed to bind to a complementary sequence under selected conditions.

[0803] In one particular embodiment, amplification of a nucleic acid sample from a patient is amplified under conditions which favor the amplification of the most abundant differentially expressed nucleic acid. In one preferred embodiment, RT-PCR is carried out on an mRNA sample from a patient under conditions which favor the amplification of the most abundant mRNA. In another preferred embodiment, the amplification of the differentially expressed nucleic acids is carried out simultaneously. It will be realized by a person skilled in the art that such methods could be adapted for the detection of differentially expressed proteins instead of differentially expressed nucleic acid sequences.

[0804] The nucleic acid (i.e. DNA or RNA) for practicing the present invention may be obtained according to well known methods.

[0805] Oligonucleotide primers of the present invention may be of any suitable length, depending on the particular assay format and the particular needs and targeted genomes employed. Optionally, the oligonucleotide primers are at least 12 nucleotides in length, preferably between 15 and 24 molecules, and they may be adapted to be especially suited to a chosen nucleic acid amplification system. As commonly known in the art, the oligonucleotide primers can be designed by taking into consideration the melting point of hybridization thereof with its targeted sequence (Sambrook et al., 1989, Molecular Cloning—A Laboratory Manual, 2nd Edition, CSH Laboratories; Ausubel et al., 1989, in Current Protocols in Molecular Biology, John Wiley & Sons Inc., N.Y.).

[0806] It will be appreciated that antisense oligonucleotides may be employed to quantify expression of a splice isoform of interest. Such detection is effected at the pre-mRNA level. Essentially the ability to quantitate transcription from a splice site of interest can be effected based on splice site accessibility. Oligonucleotides may compete with splicing factors for the splice site sequences. Thus, low activity of the antisense oligonucleotide is indicative of splicing activity.

[0807] The polymerase chain reaction and other nucleic acid amplification reactions are well known in the art (various non-limiting examples of these reactions are described in greater detail below). The pair of oligonucleotides according to this aspect of the present invention are preferably selected to have compatible melting temperatures (Tm), e.g., melting temperatures which differ by less than that 7° C., preferably less than 5° C., more preferably less than 4° C., most preferably less than 3° C., ideally between 3° C. and 0° C.

[0808] Polymerase Chain Reaction (PCR): The polymerase chain reaction (PCR), as described in U.S. Pat. Nos. 4,683,195 and 4,683,202 to Mullis and Mullis et al., is a method of increasing the concentration of a segment of target sequence in a mixture of genomic DNA without cloning or purification. This technology provides one approach to the problems of low target sequence concentration. PCR can be used to directly increase the concentration of the target to an easily detectable level. This process for amplifying the target sequence involves the introduction of a molar excess of two oligonucleotide primers which are complementary to their respective strands of the double-stranded target sequence to the DNA mixture containing the desired target sequence. The mixture is denatured and then allowed to hybridize. Following hybridization, the primers are extended with polymerase so as to form complementary strands. The steps of denaturation, hybridization (annealing), and polymerase extension (elongation) can be repeated as often as needed, in order to obtain relatively high concentrations of a segment of the desired target sequence.

[0809] The length of the segment of the desired target sequence is determined by the relative positions of the primers with respect to each other, and, therefore, this length is a controllable parameter. Because the desired segments of the target sequence become the dominant sequences (in terms of concentration) in the mixture, they are said to be “PCR-amplified.”

[0810] Ligase Chain Reaction (LCR or LAR): The ligase chain reaction [LCR; sometimes referred to as “Ligase Amplification Reaction” (LAR)] has developed into a well-recognized alternative method of amplifying nucleic acids. In LCR, four oligonucleotides, two adjacent oligonucleotides which uniquely hybridize to one strand of target DNA, and a complementary set of adjacent oligonucleotides, which hybridize to the opposite strand are mixed and DNA ligase is added to the mixture. Provided that there is complete complementarity at the junction, ligase will covalently link each set of hybridized molecules. Importantly, in LCR, two probes are ligated together only when they base-pair with sequences in the target sample, without gaps or mismatches. Repeated cycles of denaturation, and ligation amplify a short segment of DNA. LCR has also been used in combination with PCR to achieve enhanced detection of single-base changes: see for example Segev, PCT Publication No. WO9001069 A1 (1990). However, because the four oligonucleotides used in this assay can pair to form two short ligatable fragments, there is the potential for the generation of target-independent background signal. The use of LCR for mutant screening is limited to the examination of specific nucleic acid positions.

[0811] Self-Sustained Synthetic Reaction (3SR/NASBA): The self-sustained sequence replication reaction (3SR) is a transcription-based in vitro amplification system that can exponentially amplify RNA sequences at a uniform temperature. The amplified RNA can then be utilized for mutation detection. In this method, an oligonucleotide primer is used to add a phage RNA polymerase promoter to the 5′ end of the sequence of interest. In a cocktail of enzymes and substrates that includes a second primer, reverse transcriptase, RNase H, RNA polymerase and ribo- and deoxyribonucleoside triphosphates, the target sequence undergoes repeated rounds of transcription, cDNA synthesis and second-strand synthesis to amplify the area of interest. The use of 3SR to detect mutations is kinetically limited to screening small segments of DNA (e.g., 200-300 base pairs).

[0812] Q-Beta (Qβ) Replicase: In this method, a probe which recognizes the sequence of interest is attached to the replicatable RNA template for Qβ replicase. A previously identified major problem with false positives resulting from the replication of unhybridized probes has been addressed through use of a sequence-specific ligation step. However, available thermostable DNA ligases are not effective on this RNA substrate, so the ligation must be performed by T4 DNA ligase at low temperatures (37 degrees C.). This prevents the use of high temperature as a means of achieving specificity as in the LCR, the ligation event can be used to detect a mutation at the junction site, but not elsewhere.

[0813] A successful diagnostic method must be very specific. A straight-forward method of controlling the specificity of nucleic acid hybridization is by controlling the temperature of the reaction. While the 3SR/NASBA, and Qβ systems are all able to generate a large quantity of signal, one or more of the enzymes involved in each cannot be used at high temperature (i.e., >55 degrees C.). Therefore the reaction temperatures cannot be raised to prevent non-specific hybridization of the probes. If probes are shortened in order to make them melt more easily at low temperatures, the likelihood of having more than one perfect match in a complex genome increases. For these reasons, PCR and LCR currently dominate the research field in detection technologies.

[0814] The basis of the amplification procedure in the PCR and LCR is the fact that the products of one cycle become usable templates in all subsequent cycles, consequently doubling the population with each cycle. The final yield of any such doubling system can be expressed as: (I+X)ⁿ=y, where “X” is the mean efficiency (percent copied in each cycle), “n” is the number of cycles, and “y” is the overall efficiency, or yield of the reaction. If every copy of a target DNA is utilized as a template in every cycle of a polymerase chain reaction, then the mean efficiency is 100%. If 20 cycles of PCR are performed, then the yield will be 220, or 1,048,576 copies of the starting material. If the reaction conditions reduce the mean efficiency to 85%, then the yield in those 20 cycles will be only 1.85²⁰, or 220,513 copies of the starting material. In other words, a PCR running at 85% efficiency will yield only 21% as much final product, compared to a reaction running at 100% efficiency. A reaction that is reduced to 50% mean efficiency will yield less than 1% of the possible product.

[0815] In practice, routine polymerase chain reactions rarely achieve the theoretical maximum yield, and PCRs are usually run for more than 20 cycles to compensate for the lower yield. At 50% mean efficiency, it would take 34 cycles to achieve the million-fold amplification theoretically possible in 20, and at lower efficiencies, the number of cycles required becomes prohibitive. In addition, any background products that amplify with a better mean efficiency than the intended target will become the dominant products.

[0816] Also, many variables can influence the mean efficiency of PCR, including target DNA length and secondary structure, primer length and design, primer and dNTP concentrations, and buffer composition, to name but a few. Contamination of the reaction with exogenous DNA (e.g., DNA spilled onto lab surfaces) or cross-contamination is also a major consideration. Reaction conditions must be carefully optimized for each different primer pair and target sequence, and the process can take days, even for an experienced investigator. The laboriousness of this process, including numerous technical considerations and other factors, presents a significant drawback to using PCR in the clinical setting. Indeed, PCR has yet to penetrate the clinical market in a significant way. The same concerns arise with LCR, as LCR must also be optimized to use different oligonucleotide sequences for each target sequence. In addition, both methods require expensive equipment, capable of precise temperature cycling.

[0817] Many applications of nucleic acid detection technologies, such as in studies of allelic variation, involve not only detection of a specific sequence in a complex background, but also the discrimination between sequences with few, or single, nucleotide differences. One method of the detection of allele-specific variants by PCR is based upon the fact that it is difficult for Taq polymerase to synthesize a DNA strand when there is a mismatch between the template strand and the 3′ end of the primer. An allele-specific variant may be detected by the use of a primer that is perfectly matched with only one of the possible alleles; the mismatch to the other allele acts to prevent the extension of the primer, thereby preventing the amplification of that sequence. This method has a substantial limitation in that the base composition of the mismatch influences the ability to prevent extension across the mismatch, and certain mismatches do not prevent extension or have only a minimal effect.

[0818] A similar 3′-mismatch strategy is used with greater effect to prevent ligation in the LCR. Any mismatch effectively blocks the action of the thermostable ligase, but LCR still has the drawback of target-independent background ligation products initiating the amplification. Moreover, the combination of PCR with subsequent LCR to identify the nucleotides at individual positions is also a clearly cumbersome proposition for the clinical laboratory.

[0819] The direct detection method according to various preferred embodiments of the present invention may be, for example a cycling probe reaction (CPR) or a branched DNA analysis.

[0820] When a sufficient amount of a nucleic acid to be detected is available, there are advantages to detecting that sequence directly, instead of making more copies of that target, (e.g., as in PCR and LCR). Most notably, a method that does not amplify the signal exponentially is more amenable to quantitative analysis. Even if the signal is enhanced by attaching multiple dyes to a single oligonucleotide, the correlation between the final signal intensity and amount of target is direct. Such a system has an additional advantage that the products of the reaction will not themselves promote further reaction, so contamination of lab surfaces by the products is not as much of a concern. Recently devised techniques have sought to eliminate the use of radioactivity and/or improve the sensitivity in automatable formats. Two examples are the “Cycling Probe Reaction” (CPR), and “Branched DNA” (bDNA).

[0821] Cycling probe reaction (CPR): The cycling probe reaction (CPR), uses a long chimeric oligonucleotide in which a central portion is made of RNA while the two termini are made of DNA. Hybridization of the probe to a target DNA and exposure to a thermostable RNase H causes the RNA portion to be digested. This destabilizes the remaining DNA portions of the duplex, releasing the remainder of the probe from the target DNA and allowing another probe molecule to repeat the process. The signal, in the form of cleaved probe molecules, accumulates at a linear rate. While the repeating process increases the signal, the RNA portion of the oligonucleotide is vulnerable to RNases that may carried through sample preparation.

[0822] Branched DNA: Branched DNA (bDNA), involves oligonucleotides with branched structures that allow each individual oligonucleotide to carry 35 to 40 labels (e.g., alkaline phosphatase enzymes). While this enhances the signal from a hybridization event, signal from non-specific binding is similarly increased.

[0823] The detection of at least one sequence change according to various preferred embodiments of the present invention may be accomplished by, for example restriction fragment length polymorphism (RFLP analysis), allele specific oligonucleotide (ASO) analysis, Denaturing/Temperature Gradient Gel Electrophoresis (DGGE/TGGE), Single-Strand Conformation Polymorphism (SSCP) analysis or Dideoxy fingerprinting (ddF).

[0824] The demand for tests which allow the detection of specific nucleic acid sequences and sequence changes is growing rapidly in clinical diagnostics. As nucleic acid sequence data for genes from humans and pathogenic organisms accumulates, the demand for fast, cost-effective, and easy-to-use tests for as yet mutations within specific sequences is rapidly increasing.

[0825] A handful of methods have been devised to scan nucleic acid segments for mutations. One option is to determine the entire gene sequence of each test sample (e.g., a bacterial isolate). For sequences under approximately 600 nucleotides, this may be accomplished using amplified material (e.g., PCR reaction products). This avoids the time and expense associated with cloning the segment of interest. However, specialized equipment and highly trained personnel are required, and the method is too labor-intense and expensive to be practical and effective in the clinical setting.

[0826] In view of the difficulties associated with sequencing, a given segment of nucleic acid may be characterized on several other levels. At the lowest resolution, the size of the molecule can be determined by electrophoresis by comparison to a known standard run on the same gel. A more detailed picture of the molecule may be achieved by cleavage with combinations of restriction enzymes prior to electrophoresis, to allow construction of an ordered map. The presence of specific sequences within the fragment can be detected by hybridization of a labeled probe, or the precise nucleotide sequence can be determined by partial chemical degradation or by primer extension in the presence of chain-terminating nucleotide analogs.

[0827] Restriction fragment length polymorphism (RFLP): For detection of single-base differences between like sequences, the requirements of the analysis are often at the highest level of resolution. For cases in which the position of the nucleotide in question is known in advance, several methods have been developed for examining single base changes without direct sequencing. For example, if a mutation of interest happens to fall within a restriction recognition sequence, a change in the pattern of digestion can be used as a diagnostic tool (e.g., restriction fragment length polymorphism [RFLP] analysis).

[0828] Single point mutations have been also detected by the creation or destruction of RFLPs. Mutations are detected and localized by the presence and size of the RNA fragments generated by cleavage at the mismatches. Single nucleotide mismatches in DNA heteroduplexes are also recognized and cleaved by some chemicals, providing an alternative strategy to detect single base substitutions, generically named the “Mismatch Chemical Cleavage” (MCC). However, this method requires the use of osmium tetroxide and piperidine, two highly noxious chemicals which are not suited for use in a clinical laboratory.

[0829] RFLP analysis suffers from low sensitivity and requires a large amount of sample. When RFLP analysis is used for the detection of point mutations, it is, by its nature, limited to the detection of only those single base changes which fall within a restriction sequence of a known restriction endonuclease. Moreover, the majority of the available enzymes have 4 to 6 base-pair recognition sequences, and cleave too frequently for many large-scale DNA manipulations. Thus, it is applicable only in a small fraction of cases, as most mutations do not fall within such sites.

[0830] A handful of rare-cutting restriction enzymes with 8 base-pair specificities have been isolated and these are widely used in genetic mapping, but these enzymes are few in number, are limited to the recognition of G+C-rich sequences, and cleave at sites that tend to be highly clustered. Recently, endonucleases encoded by group I introns have been discovered that might have greater than 12 base-pair specificity, but again, these are few in number.

[0831] Allele specific oligonucleotide (ASO): If the change is not in a recognition sequence, then allele-specific oligonucleotides (ASOs), can be designed to hybridize in proximity to the mutated nucleotide, such that a primer extension or ligation event can bused as the indicator of a match or a mis-match. Hybridization with radioactively labeled allelic specific oligonucleotides (ASO) also has been applied to the detection of specific point mutations. The method is based on the differences in the melting temperature of short DNA fragments differing by a single nucleotide. Stringent hybridization and washing conditions can differentiate between mutant and wild-type alleles. The ASO approach applied to PCR products also has been extensively utilized by various researchers to detect and characterize point mutations in ras genes and gsp/gip oncogenes. Because of the presence of various nucleotide changes in multiple positions, the ASO method requires the use of many oligonucleotides to cover all possible oncogenic mutations.

[0832] With either of the techniques described above (i.e., RFLP and ASO), the precise location of the suspected mutation must be known in advance of the test. That is to say, they are inapplicable when one needs to detect the presence of a mutation within a gene or sequence of interest.

[0833] Denaturing/Temperature Gradient Gel Electrophoresis (DGGE/TGGE): Two other methods rely on detecting changes in electrophoretic mobility in response to minor sequence changes. One of these methods, termed “Denaturing Gradient Gel Electrophoresis” (DGGE) is based on the observation that slightly different sequences will display different patterns of local melting when electrophoretically resolved on a gradient gel. In this manner, variants can be distinguished, as differences in melting properties of homoduplexes versus heteroduplexes differing in a single nucleotide can detect the presence of mutations in the target sequences because of the corresponding changes in their electrophoretic mobilities. The fragments to be analyzed, usually PCR products, are “clamped” at one end by a long stretch of G-C base pairs (30-80) to allow complete denaturation of the sequence of interest without complete dissociation of the strands. The attachment of a GC “clamp” to the DNA fragments increases the fraction of mutations that can be recognized by DGGE. Attaching a GC clamp to one primer is critical to ensure that the amplified sequence has a low dissociation temperature. Modifications of the technique have been developed, using temperature gradients, and the method can be also applied to RNA:RNA duplexes.

[0834] Limitations on the utility of DGGE include the requirement that the denaturing conditions must be optimized for each type of DNA to be tested. Furthermore, the method requires specialized equipment to prepare the gels and maintain the needed high temperatures during electrophoresis. The expense associated with the synthesis of the clamping tail on one oligonucleotide for each sequence to be tested is also a major consideration. In addition, long running times are required for DGGE. The long running time of DGGE was shortened in a modification of DGGE called constant denaturant gel electrophoresis (CDGEi). CDGE requires that gels be performed under different denaturant conditions in order to reach high efficiency for the detection of mutations.

[0835] A technique analogous to DGGE, termed temperature gradient gel electrophoresis (TGGE), uses a thermal gradient rather than a chemical denaturant gradient. TGGE requires the use of specialized equipment which can generate a temperature gradient perpendicularly oriented relative to the electrical field. TGGE can detect mutations in relatively small fragments of DNA therefore scanning of large gene segments requires the use of multiple PCR products prior to running the gel.

[0836] Single-Strand Conformation Polymorphism (SSCP): Another common method, called “Single-Strand Conformation Polymorphism” (SSCP) was developed by Hayashi, Sekya and colleagues and is based on the observation that single strands of nucleic acid can take on characteristic conformations in non-denaturing conditions, and these conformations influence electrophoretic mobility. The complementary strands assume sufficiently different structures that one strand may be resolved from the other. Changes in sequences within the fragment will also change the conformation, consequently altering the mobility and allowing this to be used as an assay for sequence variations.

[0837] The SSCP process involves denaturing a DNA segment (e.g., a PCR product) that is labeled on both strands, followed by slow electrophoretic separation on a non-denaturing polyacrylamide gel, so that intra-molecular interactions can form and not be disturbed during the run. This technique is extremely sensitive to variations in gel composition and temperature. A serious limitation of this method is the relative difficulty encountered in comparing data generated in different laboratories, under apparently similar conditions.

[0838] Dideoxy fingerprinting (ddF): The dideoxy fingerprinting (ddF) is another technique developed to scan genes for the presence of mutations. The ddF technique combines components of Sanger dideoxy sequencing with SSCP. A dideoxy sequencing reaction is performed using one dideoxy terminator and then the reaction products are electrophoresed on nondenaturing polyacrylamide gels to detect alterations in mobility of the termination segments as in SSCP analysis. While ddF is an improvement over SSCP in terms of increased sensitivity, ddF requires the use of expensive dideoxynucleotides and this technique is still limited to the analysis of fragments of the size suitable for SSCP (i.e., fragments of 200-300 bases for optimal detection of mutations).

[0839] In addition to the above limitations, all of these methods are limited as to the size of the nucleic acid fragment that can be analyzed. For the direct sequencing approach, sequences of greater than 600 base pairs require cloning, with the consequent delays and expense of either deletion sub-cloning or primer walking, in order to cover the entire fragment. SSCP and DGGE have even more severe size limitations. Because of reduced sensitivity to sequence changes, these methods are not considered suitable for larger fragments. Although SSCP is reportedly able to detect 90% of single-base substitutions within a 200 base-pair fragment, the detection drops to less than 50% for 400 base pair fragments. Similarly, the sensitivity of DGGE decreases as the length of the fragment reaches 500 base-pairs. The ddF technique, as a combination of direct sequencing and SSCP, is also limited by the relatively small size of the DNA that can be screened.

[0840] According to a presently preferred embodiment of the present invention the step of searching for any of the nucleic acid sequences described here, in tumor cells or in cells derived from a cancer patient is effected by any suitable technique, including, but not limited to, nucleic acid sequencing, polymerase chain reaction, ligase chain reaction, self-sustained synthetic reaction, Qβ-Replicase, cycling probe reaction, branched DNA, restriction fragment length polymorphism analysis, mismatch chemical cleavage, heteroduplex analysis, allele-specific oligonucleotides, denaturing gradient gel electrophoresis, constant denaturant gel electrophoresis, temperature gradient gel electrophoresis and dideoxy fingerprinting.

[0841] Detection may also optionally be performed with a chip or other such device. The nucleic acid sample which includes the candidate region to be analyzed is preferably isolated, amplified and labeled with a reporter group. This reporter group can be a fluorescent group such as phycoerythrin. The labeled nucleic acid is then incubated with the probes immobilized on the chip using a fluidics station. describe the fabrication of fluidics devices and particularly microcapillary devices, in silicon and glass substrates.

[0842] Once the reaction is completed, the chip is inserted into a scanner and patterns of hybridization are detected. The hybridization data is collected, as a signal emitted from the reporter groups already incorporated into the nucleic acid, which is now bound to the probes attached to the chip. Since the sequence and position of each probe immobilized on the chip is known, the identity of the nucleic acid hybridized to a given probe can be determined.

[0843] It will be appreciated that when utilized along with automated equipment, the above described detection methods can be used to screen multiple samples for a disease and/or pathological condition both rapidly and easily.

### Amino Acid Sequences and Peptides

[0844] The terms “polypeptide,” “peptide” and “protein” are used interchangeably herein to refer to a polymer of amino acid residues. The terms apply to amino acid polymers in which one or more amino acid residue is an analog or mimetic of a corresponding naturally occurring amino acid, as well as to naturally occurring amino acid polymers. Polypeptides can be modified, e.g., by the addition of carbohydrate residues to form glycoproteins. The terms “polypeptide,” “peptide” and “protein” include glycoproteins, as well as non-glycoproteins.

[0845] Polypeptide products can be biochemically synthesized such as by employing standard solid phase techniques. Such methods include but are not limited to exclusive solid phase synthesis, partial solid phase synthesis methods, fragment condensation, classical solution synthesis. These methods are preferably used when the peptide is relatively short (i.e., 10 kDa) and/or when it cannot be produced by recombinant techniques (i.e., not encoded by a nucleic acid sequence) and therefore involves different chemistry.

[0846] Solid phase polypeptide synthesis procedures are well known in the art and further described by John Morrow Stewart and Janis Dillaha Young, Solid Phase Peptide Syntheses (2nd Ed., Pierce Chemical Company, 1984).

[0847] Synthetic polypeptides can optionally be purified by preparative high performance liquid chromatography [Creighton T. (1983) Proteins, structures and molecular principles. WH Freeman and Co. N.Y.], after which their composition can be confirmed via amino acid sequencing.

[0848] In cases where large amounts of a polypeptide are desired, it can be generated using recombinant techniques such as described by Bitter et al., (1987) Methods in Enzymol. 153:516-544, Studier et al. (1990) Methods in Enzymol. 185:60-89, Brisson et al. (1984) Nature 310:511-514, Takamatsu et al. (1987) EMBO J. 6:307-311, Coruzzi et al. (1984) EMBO J. 3:1671-1680 and Brogli et al., (1984) Science 224:838-843, Gurley et al. (1986) Mol. Cell. Biol. 6:559-565 and Weissbach & Weissbach, 1988, Methods for Plant Molecular Biology, Academic Press, NY, Section VIII, pp 421-463.

[0849] The present invention also encompasses polypeptides encoded by the polynucleotide sequences of the present invention, as well as polypeptides according to the amino acid sequences described herein. The present invention also encompasses homologues of these polypeptides, such homologues can be at least 50%, at least 55%, at least 60%, at least 65%, at least 70%, at least 75%, at least 80%, at least 85%, at least 95% or more say 100% homologous to the amino acid sequences set forth below, as can be determined using BlastP software of the National Center of Biotechnology Information (NCBI) using default parameters, optionally and preferably including the following: filtering on (this option filters repetitive or low-complexity sequences from the query using the Seg (protein) program), scoring matrix is BLOSUM62 for proteins, word size is 3, E value is 10, gap costs are 11, 1 (initialization and extension), and number of alignments shown is 50. Optionally and preferably, nucleic acid sequence homology/identity may be determined by using BlastN software of the National Center of Biotechnology Information (NCBI) using default parameters, which preferably include using the DUST filter program, and also preferably include having an E value of 10, filtering low complexity sequences and a word size of 11. Finally, the present invention also encompasses fragments of the above described polypeptides and polypeptides having mutations, such as deletions, insertions or substitutions of one or more amino acids, either naturally occurring or artificially induced, either randomly or in a targeted fashion.

[0850] It will be appreciated that peptides identified according the present invention may be degradation products, synthetic peptides or recombinant peptides as well as peptidomimetics, typically, synthetic peptides and peptoids and semipeptoids which are peptide analogs, which may have, for example, modifications rendering the peptides more stable while in a body or more capable of penetrating into cells. Such modifications include, but are not limited to N terminus modification, C terminus modification, peptide bond modification, including, but not limited to, CH2-NH, CH2-S, CH2-S═O, O═C—NH, CH2-O, CH2-CH2, S═C—NH, CH═CH or CF═CH, backbone modifications, and residue modification. Methods for preparing peptidomimetic compounds are well known in the art and are specified. Further details in this respect are provided hereinunder.

[0851] Peptide bonds (—CO—NH—) within the peptide may be substituted, for example, by N-methylated bonds (—N(CH3)-CO—), ester bonds (—C(R)H—C—O—O—C(R)—N—), ketomethylen bonds (—CO—CH2-), α-aza bonds (—NH—N(R)—CO—), wherein R is any alkyl, e.g., methyl, carba bonds (—CH2-NH—), hydroxyethylene bonds (—CH(OH)—CH2-), thioamide bonds (—CS—NH—), olefinic double bonds (—CH═CH—), retro amide bonds (—NH—CO—), peptide derivatives (—N(R)—CH2-CO—), wherein R is the “normal” side chain, naturally presented on the carbon atom.

[0852] These modifications can occur at any of the bonds along the peptide chain and even at several (2-3) at the same time.

[0853] Natural aromatic amino acids, Trp, Tyr and Phe, may be substituted for synthetic non-natural acid such as Phenylglycine, TIC, naphthylelanine (Nol), ring-methylated derivatives of Phe, halogenated derivatives of Phe or o-methyl-Tyr.

[0854] In addition to the above, the peptides of the present invention may also include one or more modified amino acids or one or more non-amino acid monomers (e.g. fatty acids, complex carbohydrates etc).

[0855] As used herein in the specification and in the claims section below the term “amino acid” or “amino acids” is understood to include the 20 naturally occurring amino acids; those amino acids often modified post-translationally in vivo, including, for example, hydroxyproline, phosphoserine and phosphothreonine; and other unusual amino acids including, but not limited to, 2-aminoadipic acid, hydroxylysine, isodesmosine, nor-valine, nor-leucine and ornithine. Furthermore, the term “amino acid” includes both D- and L-amino acids.

TABLE A
Table A: non-conventional or modified amino acids
which can be used with the present invention.

| Non-conventional amino acid | Code | Non-conventional amino acid | Code |
|---|---|---|---|
| α-aminobutyric acid | Abu | L-N-methylalanine | Nmala |
| α-amino-α-methylbutyrate | Mgabu | L-N-methylarginine | Nmarg |
| aminocyclopropane- | Cpro | L-N-methylasparagine | Nmasn |
| Carboxylate | | L-N-methylaspartic acid | Nmasp |
| aminoisobutyric acid | Aib | L-N-methylcysteine | Nmcys |
| aminonorbomyl- | Norb | L-N-methylglutamine | Nmgin |
| Carboxylate | | L-N-methylglutamic acid | Nmglu |
| Cyclohexylalanine | Chexa | L-N-methylhistidine | Nmhis |
| Cyclopentylalanine | Cpen | L-N-methylisolleucine | Nmile |
| D-alanine | Dal | L-N-methylleucine | Nmleu |
| D-arginine | Darg | L-N-methyllysine | Nmlys |
| D-aspartic acid | Dasp | L-N-methylmethionine | Nmmet |
| D-cysteine | Dcys | L-N-methylnorleucine | Nmnle |
| D-glutamine | Dgln | L-N-methylnorvaline | Nmnva |
| D-glutamic acid | Dglu | L-N-methylornithine | Nmorn |
| D-histidine | Dhis | L-N-methylphenylalanine | Nmphe |
| D-isoleucine | Dile | L-N-methylproline | Nmpro |
| D-leucine | Dleu | L-N-methylserine | Nmser |
| D-lysine | Dlys | L-N-methylthreonine | Nmthr |
| D-methionine | Dmet | L-N-methyltryptophan | Nmtrp |
| D-ornithine | Dorn | L-N-methyltyrosine | Nmtyr |
| D-phenylalanine | Dphe | L-N-methylvaline | Nmval |
| D-proline | Dpro | L-N-methylethylglycine | Nmetg |
| D-serine | Dser | L-N-methyl-t-butylglycine | Nmtbug |
| D-threonine | Dthr | L-norleucine | Nle |
| D-tryptophan | Dtrp | L-norvaline | Nva |
| D-tyrosine | Dtyr | α-methyl-aminoisobutyrate | Maib |
| D-valine | Dval | α-methyl-γ-aminobutyrate | Mgabu |
| D-α-methylalanine | Dmala | α-methylcyclohexylalanine | Mchexa |
| D-α-methylarginine | Dmarg | α-methylcyclopentylalanine | Mcpen |
| D-α-methylasparagine | Dmasn | α-methyl-α-napthylalanine | Manap |
| D-α-methylaspartate | Dmasp | α-methylpenicillamine | Mpen |
| D-α-methylcysteine | Dmcys | N-(4-aminobutyl)glycine | Nglu |
| D-α-methylglutamine | Dmgln | N-(2-aminoethyl)glycine | Naeg |
| D-α-methylhistidine | Dmhis | N-(3-aminopropyl)glycine | Norn |
| D-α-methylisoleucine | Dmile | N-amino-α-methylbutyrate | Nmaabu |
| D-α-methylleucine | Dmleu | α-napthylalanine | Anap |
| D-α-methyllysine | Dmlys | N-benzylglycine | Nphe |
| D-α-methylmethionine | Dmmet | N-(2-carbamylethyl)glycine | Ngln |
| D-α-methylornithine | Dmorn | N-(carbamylmethyl)glycine | Nasn |
| D-α-methylphenylalanine | Dmphe | N-(2-carboxyethyl)glycine | Nglu |
| D-α-methylproline | Dmpro | N-(carboxymethyl)glycine | Nasp |
| D-α-methylserine | Dmser | N-cyclobutylglycine | Ncbut |
| D-α-methylthreonine | Dmthr | N-cycloheptylglycine | Nchep |
| D-α-methyltryptophan | Dmtrp | N-cyclohexylglycine | Nchex |
| D-α-methyltyrosine | Dmty | N-cyclodecylglycine | Ncdec |
| D-α-methylvaline | Dmval | N-cyclododeclglycine | Ncdod |
| D-α-methylalnine | Dnmala | N-cyclooctylglycine | Ncoct |
| D-α-methylarginine | Dnmarg | N-cyclopropylglycine | Ncpro |
| D-α-methylasparagine | Dnmasn | N-cycloundecylglycine | Ncund |
| D-α-methylasparatate | Dnmasp | N-(2,2-diphenylethyl)glycine | Nbhm |
| D-α-methylcysteine | Dnmcys | N-(3,3-diphenylpropyl)glycine | Nbhe |
| D-N-methylleucine | Dnmleu | N-(3-indolylyethyl) glycine | Nhtrp |
| D-N-methyllysine | Dnmlys | N-methyl-γ-aminobutyrate | Nmgabu |
| N-methylcyclohexylalanine | Nmchexa | D-N-methylmethionine | Dnmmet |
| D-N-methylornithine | Dnmorn | N-methylcyclopentylalanine | Nmcpen |
| N-methylglycine | Nala | D-N-methylphenylalanine | Dnmphe |
| N-methylaminoisobutyrate | Nmaib | D-N-methylproline | Dnmpro |
| N-(1-methylpropyl)glycine | Nile | D-N-methylserine | Dnmser |
| N-(2-methylpropyl)glycine | Nile | D-N-methylserine | Dnmser |
| N-(2-methylpropyl)glycine | Nleu | D-N-methylthreonine | Dnmthr |
| D-N-methyltryptophan | Dnmtrp | N-(1-methylethyl)glycine | Nva |
| D-N-methyltyrosine | Dnmtyr | N-methyla-napthylalanine | Nmanap |
| D-N-methylvaline | Dnmval | N-methylpenicillamine | Nmpen |
| γ-aminobutyric acid | Gabu | N-(p-hydroxyphenyl)glycine | Nhtyr |
| L-t-butylglycine | Tbug | N-(thiomethyl)glycine | Ncys |
| L-ethylglycine | Etg | penicillamine | Pen |
| L-homophenylalanine | Hphe | L-α-methylalanine | Mala |
| L-α-methylarginine | Marg | L-α-methylasparagine | Masn |
| L-α-methylaspartate | Masp | L-α-methyl-t-butylglycine | Mtbug |
| L-α-methylcysteine | Mcys | L-methylethylglycine | Metg |
| L-α-methylglutamine | Mgln | L-α-methylglutamate | Mglu |
| L-α-methylhistidine | Mhis | L-α-methylhomo phenylalanine | Mhphe |
| L-α-methylisoleucine | Mile | N-(2-methylthioethyl)glycine | Nmet |
| D-N-methylglutamine | Dnmgln | N-(3-guanidinopropyl)glycine | Narg |
| D-N-methylglutamate | Dnmglu | N-(1-hydroxyethyl)glycine | Nthr |
| D-N-methylhistidine | Dnmhis | N-(hydroxyethyl)glycine | Nser |
| D-N-methylisoleucine | Dnmile | N-(imidazolylethyl)glycine | Nhis |
| D-N-methylleucine | Dnmleu | N-(3-indolylyethyl)glycine | Nhtrp |
| D-N-methyllysine | Dnmlys | N-methyl-γ-aminobutyrate | Nmgabu |
| N-methylcyclohexylalanine | Nmchexa | D-N-methylmethionine | Dnmmet |
| D-N-methylornithine | Dnmorn | N-methylcyclopentylalanine | Nmcpen |
| N-methylglycine | Nala | D-N-methylphenylalanine | Dnmphe |
| N-methylaminoisobutyrate | Nmaib | D-N-methylproline | Dnmpro |
| N-(1-methylpropyl)glycine | Nile | D-N-methylserine | Dnmser |
| N-(2-methylpropyl)glycine | Nleu | D-N-methylthreonine | Dnmthr |
| D-N-methyltryptophan | Dnmtrp | N-(1-methylethyl)glycine | Nval |
| D-N-methyltyrosine | Dnmtyr | N-methyla-napthylalanine | Nmanap |
| D-N-methylvaline | Dnmval | N-methylpenicillamine | Nmpen |
| γ-aminobutyric acid | Gabu | N-(p-hydroxyphenyl)glycine | Nhtyr |
| L-t-butylglycine | Tbug | N-(thiomethyl)glycine | Ncys |
| L-ethylglycine | Etg | penicillamine | Pen |
| L-homophenylalanine | Hphe | L-α-methylalanine | Mala |
| L-α-methylarginine | Marg | L-α-methylasparagine | Masn |
| L-α-methylaspartate | Masp | L-α-methyl-t-butylglycine | Mtbug |
| L-α-methylcysteine | Mcys | L-methylethylglycine | Metg |
| L-α-methylglutamine | Mgln | L-α-methylglutamate | Mglu |
| L-α-methylhistidine | Mhis | L-α-methylhomophenylalanine | Mhphe |
| L-α-methylisoleucine | Mile | N-(2-methylthioethyl)glycine | Nmet |
| L-α-methylleucine | Mleu | L-α-methyllysine | Mlys |
| L-α-methylmethionine | Mmet | L-α-methylnorleucine | Mnle |
| L-α-methylnorvaline | Mnva | L-α-methylornithine | Morn |
| L-α-methylphenylalanine | Mphe | L-α-methylproline | Mpro |
| L-α-methylserine | mser | L-α-methylthreonine | Mthr |
| L-α-methylvaline | Mtrp | L-α-methyltyrosine | Mtyr |
| L-α-methylleucine | Mval Nnbhm | L-N-methylhomophenylalanine | Nmhphe |
| N-(N-(2,2-diphenylethyl) | | N-(N-(3,3-diphenylpropyl) | |
| carbamylmethyl-glycine | Nnbhm | carbamylmethyl(1)glycine | Nnbhe |
| 1-carboxy-1-(2,2-diphenyl | Nmbc | | |
| ethylamino)cyclopropane | | | |

[0856] Since the peptides of the present invention are preferably utilized in diagnostics which require the peptides to be in soluble form, the peptides of the present invention preferably include one or more non-natural or natural polar amino acids, including but not limited to serine and threonine which are capable of increasing peptide solubility due to their hydroxyl-containing side chain.

[0857] The peptides of the present invention are preferably utilized in a linear form, although it will be appreciated that in cases where cyclicization does not severely interfere with peptide characteristics, cyclic forms of the peptide can also be utilized.

[0858] The peptides of present invention can be biochemically synthesized such as by using standard solid phase techniques. These methods include exclusive solid phase synthesis well known in the art, partial solid phase synthesis methods, fragment condensation, classical solution synthesis. These methods are preferably used when the peptide is relatively short (i.e., 10 kDa) and/or when it cannot be produced by recombinant techniques (i.e., not encoded by a nucleic acid sequence) and therefore involves different chemistry.

[0859] Synthetic peptides can be purified by preparative high performance liquid chromatography and the composition of which can be confirmed via amino acid sequencing.

[0860] In cases where large amounts of the peptides of the present invention are desired, the peptides of the present invention can be generated using recombinant techniques such as described by Bitter et al., (1987) Methods in Enzymol. 153:516-544, Studier et al. (1990) Methods in Enzymol. 185:60-89, Brisson et al. (1984) Nature 310:511-514, Takamatsu et al. (1987) EMBO J. 6:307-311, Coruzzi et al. (1984) EMBO J. 3:1671-1680 and Brogli et al., (1984) Science 224:838-843, Gurley et al. (1986) Mol. Cell. Biol. 6:559-565 and Weissbach & Weissbach, 1988, Methods for Plant Molecular Biology, Academic Press, NY, Section VIII, pp 421-463 and also as described above.

### Antibodies

[0861] “Antibody” refers to a polypeptide ligand that is preferably substantially encoded by an immunoglobulin gene or immunoglobulin genes, or fragments thereof, which specifically binds and recognizes an epitope (e.g., an antigen). The recognized immunoglobulin genes include the kappa and lambda light chain constant region genes, the alpha, gamma, delta, epsilon and mu heavy chain constant region genes, and the myriad-immunoglobulin variable region genes. Antibodies exist, e.g., as intact immunoglobulins or as a number of well characterized fragments produced by digestion with various peptidases. This includes, e.g., Fab′ and F(ab)′₂ fragments. The term “antibody,” as used herein, also includes antibody fragments either produced by the modification of whole antibodies or those synthesized de novo using recombinant DNA methodologies. It also includes polyclonal antibodies, monoclonal antibodies, chimeric antibodies, humanized antibodies, or single chain antibodies. “Fc” portion of an antibody refers to that portion of an immunoglobulin heavy chain that comprises one or more heavy chain constant region domains, CH1, CH2 and CH3, but does not include the heavy chain variable region.

[0862] The functional fragments of antibodies, such as Fab, F(ab′)2, and Fv that are capable of binding to macrophages, are described as follows: (1) Fab, the fragment which contains a monovalent antigen-binding fragment of an antibody molecule, can be produced by digestion of whole antibody with the enzyme papain to yield an intact light chain and a portion of one heavy chain; (2) Fab′, the fragment of an antibody molecule that can be obtained by treating whole antibody with pepsin, followed by reduction, to yield an intact light chain and a portion of the heavy chain; two Fab′ fragments are obtained per antibody molecule; (3) (Fab′)₂, the fragment of the antibody that can be obtained by treating whole antibody with the enzyme pepsin without subsequent reduction; F(ab′)2 is a dimer of two Fab′ fragments held together by two disulfide bonds; (4) Fv, defined as a genetically engineered fragment containing the variable region of the light chain and the variable region of the heavy chain expressed as two chains; and (5) Single chain antibody (“SCA”), a genetically engineered molecule containing the variable region of the light chain and the variable region of the heavy chain, linked by a suitable polypeptide linker as a genetically fused single chain molecule.

[0863] Methods of producing polyclonal and monoclonal antibodies as well as fragments thereof are well known in the art (See for example, Harlow and Lane, Antibodies: A Laboratory Manual, Cold Spring Harbor Laboratory, New York, 1988, incorporated herein by reference).

[0864] Antibody fragments according to the present invention can be prepared by proteolytic hydrolysis of the antibody or by expression in E. coli or mammalian cells (e.g. Chinese hamster ovary cell culture or other protein expression systems) of DNA encoding the fragment. Antibody fragments can be obtained by pepsin or papain digestion of whole antibodies by conventional methods. For example, antibody fragments can be produced by enzymatic cleavage of antibodies with pepsin to provide a 5S fragment denoted F(ab′)2. This fragment can be further cleaved using a thiol reducing agent, and optionally a blocking group for the sulfhydryl groups resulting from cleavage of disulfide linkages, to produce 3.5S Fab′ monovalent fragments. Alternatively, an enzymatic cleavage using pepsin produces two monovalent Fab′ fragments and an Fc fragment directly. These methods are described, for example, by Goldenberg, U.S. Pat. Nos. 4,036,945 and 4,331,647, and references contained therein, which patents are hereby incorporated by reference in their entirety. See also Porter, R. R. [Biochem. J. 73: 119-126 (1959)]. Other methods of cleaving antibodies, such as separation of heavy chains to form monovalent light-heavy chain fragments, further cleavage of fragments, or other enzymatic, chemical, or genetic techniques may also be used, so long as the fragments bind to the antigen that is recognized by the intact antibody.

[0865] Fv fragments comprise an association of VH and VL chains. This association may be noncovalent, as described in Inbar et al. [Proc. Nat'l Acad. Sci. USA 69:2659-62 (19720]. Alternatively, the variable chains can be linked by an intermolecular disulfide bond or cross-linked by chemicals such as glutaraldehyde. Preferably, the Fv fragments comprise VH and VL chains connected by a peptide linker. These single-chain antigen binding proteins (sFv) are prepared by constructing a structural gene comprising DNA sequences encoding the VH and VL domains connected by an oligonucleotide. The structural gene is inserted into an expression vector, which is subsequently introduced into a host cell such as E. coli. The recombinant host cells synthesize a single polypeptide chain with a linker peptide bridging the two V domains. Methods for producing sFvs are described, for example, by [Whitlow and Filpula, Methods 2: 97-105 (1991); Bird et al., Science 242:423-426 (1988); Pack et al., Bio/Technology 11:1271-77 (1993); and U.S. Pat. No. 4,946,778, which is hereby incorporated by reference in its entirety.

[0866] Another form of an antibody fragment is a peptide coding for a single complementarity-determining region (CDR). CDR peptides (“minimal recognition units”) can be obtained by constructing genes encoding the CDR of an antibody of interest. Such genes are prepared, for example, by using the polymerase chain reaction to synthesize the variable region from RNA of antibody-producing cells. See, for example, Larrick and Fry [Methods, 2: 106-10 (1991)].

[0867] Humanized forms of non-human (e.g., murine) antibodies are chimeric molecules of immunoglobulins, immunoglobulin chains or fragments thereof (such as Fv, Fab, Fab′, F(ab′) or other antigen-binding subsequences of antibodies) which contain minimal sequence derived from non-human immunoglobulin. Humanized antibodies include human immunoglobulins (recipient antibody) in which residues from a complementary determining region (CDR) of the recipient are replaced by residues from a CDR of a non-human species (donor antibody) such as mouse, rat or rabbit having the desired specificity, affinity and capacity. In some instances, Fv framework residues of the human immunoglobulin are replaced by corresponding non-human residues. Humanized antibodies may also comprise residues which are found neither in the recipient antibody nor in the imported CDR or framework sequences. In general, the humanized antibody will comprise substantially all of at least one, and typically two, variable domains, in which all or substantially all of the CDR regions correspond to those of a non-human immunoglobulin and all or substantially all of the FR regions are those of a human immunoglobulin consensus sequence. The humanized antibody optimally also will comprise at least a portion of an immunoglobulin constant region (Fc), typically that of a human immunoglobulin [Jones et al., Nature, 321:522-525 (1986); Riechmann et al., Nature, 332:323-329 (1988); and Presta, Curr. Op. Struct. Biol., 2:593-596 (1992)].

[0868] Methods for humanizing non-human antibodies are well known in the art. Generally, a humanized antibody has one or more amino acid residues introduced into it from a source which is non-human. These non-human amino acid residues are often referred to as import residues, which are typically taken from an import variable domain. Humanization can be essentially performed following the method of Winter and co-workers [Jones et al., Nature, 321:522-525 (1986); Riechmann et al., Nature 332:323-327 (1988); Verhoeyen et al., Science, 239:1534-1536 (1988)], by substituting rodent CDRs or CDR sequences for the corresponding sequences of a human antibody. Accordingly, such humanized antibodies are chimeric antibodies (U.S. Pat. No. 4,816,567), wherein substantially less than an intact human variable domain has been substituted by the corresponding sequence from a non-human species. In practice, humanized antibodies are typically human antibodies in which some CDR residues and possibly some FR residues are substituted by residues from analogous sites in rodent antibodies.

[0869] Human antibodies can also be produced using various techniques known in the art, including phage display libraries [Hoogenboom and Winter, J. Mol. Biol., 227:381 (1991); Marks et al., J. Mol. Biol., 222:581 (1991)]. The techniques of Cole et al. and Boerner et al. are also available for the preparation of human monoclonal antibodies (Cole et al., Monoclonal Antibodies and Cancer Therapy, Alan R. Liss, p. 77 (1985) and Boerner et al., J. Immunol., 147(1):86-95 (1991)]. Similarly, human antibodies can be made by introduction of human immunoglobulin loci into transgenic animals, e.g., mice in which the endogenous immunoglobulin genes have been partially or completely inactivated. Upon challenge, human antibody production is observed, which closely resembles that seen in humans in all respects, including gene rearrangement, assembly, and antibody repertoire. This approach is described, for example, in U.S. Pat. Nos. 5,545,807; 5,545,806; 5,569,825; 5,625,126; 5,633,425; 5,661,016, and in the following scientific publications: Marks et al., Bio/Technology 10: 779-783 (1992); Lonberg et al., Nature 368: 856-859 (1994); Morrison, Nature 368 812-13 (1994); Fishwild et al., Nature Biotechnology 14, 845-51 (1996); Neuberger, Nature Biotechnology 14: 826 (1996); and Lonberg and Huszar, Intern. Rev. Immunol. 13, 65-93 (1995).

[0870] Preferably, the antibody of this aspect of the present invention specifically binds at least one epitope of the polypeptide variants of the present invention. As used herein, the term “epitope” refers to any antigenic determinant on an antigen to which the paratope of an antibody binds.

[0871] Epitopic determinants usually consist of chemically active surface groupings of molecules such as amino acids or carbohydrate side chains and usually have specific three dimensional structural characteristics, as well as specific charge characteristics.

[0872] Optionally, a unique epitope may be created in a variant due to a change in one or more post-translational modifications, including but not limited to glycosylation and/or phosphorylation, as described below. Such a change may also cause a new epitope to be created, for example through removal of glycosylation at a particular site.

[0873] An epitope according to the present invention may also optionally comprise part or all of a unique sequence portion of a variant according to the present invention in combination with at least one other portion of the variant which is not contiguous to the unique sequence portion in the linear polypeptide itself, yet which are able to form an epitope in combination. One or more unique sequence portions may optionally combine with one or more other non-contiguous portions of the variant (including a portion which may have high homology to a portion of the known protein) to form an epitope.

### Immunoassays

[0874] In another embodiment of the present invention, an immunoassay can be used to qualitatively or quantitatively detect and analyze markers in a sample. This method comprises: providing an antibody that specifically binds to a marker; contacting a sample with the antibody; and detecting the presence of a complex of the antibody bound to the marker in the sample.

[0875] To prepare an antibody that specifically binds to a marker, purified protein markers can be used. Antibodies that specifically bind to a protein marker can be prepared using any suitable methods known in the art.

[0876] After the antibody is provided, a marker can be detected and/or quantified using any of a number of well recognized immunological binding assays. Useful assays include, for example, an enzyme immune assay (EIA) such as enzyme-linked immunosorbent assay (ELISA), a radioimmune assay (RIA), a Western blot assay, or a slot blot assay see, e.g., U.S. Pat. Nos. 4,366,241; 4,376,110; 4,517,288; and 4,837,168). Generally, a sample obtained from a subject can be contacted with the antibody that specifically binds the marker.

[0877] Optionally, the antibody can be fixed to a solid support to facilitate washing and subsequent isolation of the complex, prior to contacting the antibody with a sample. Examples of solid supports include but are not limited to glass or plastic in the form of, e.g., a microtiter plate, a stick, a bead, or a microbead. Antibodies can also be attached to a solid support.

[0878] After incubating the sample with antibodies, the mixture is washed and the antibody-marker complex formed can be detected. This can be accomplished by incubating the washed mixture with a detection reagent. Alternatively, the marker in the sample can be detected using an indirect assay, wherein, for example, a second, labeled antibody is used to detect bound marker-specific antibody, and/or in a competition or inhibition assay wherein, for example, a monoclonal antibody which binds to a distinct epitope of the marker are incubated simultaneously with the mixture.

[0879] Throughout the assays, incubation and/or washing steps may be required after each combination of reagents. Incubation steps can vary from about 5 seconds to several hours, preferably from about 5 minutes to about 24 hours. However, the incubation time will depend upon the assay format, marker, volume of solution, concentrations and the like. Usually the assays will be carried out at ambient temperature, although they can be conducted over a range of temperatures, such as 10° C. to 40° C.

[0880] The immunoassay can be used to determine a test amount of a marker in a sample from a subject. First, a test amount of a marker in a sample can be detected using the immunoassay methods described above. If a marker is present in the sample, it will form an antibody-marker complex with an antibody that specifically binds the marker under suitable incubation conditions described above. The amount of an antibody-marker complex can optionally be determined by comparing to a standard. As noted above, the test amount of marker need not be measured in absolute units, as long as the unit of measurement can be compared to a control amount and/or signal.

[0881] Preferably used are antibodies which specifically interact with the polypeptides of the present invention and not with wild type proteins or other isoforms thereof, for example. Such antibodies are directed, for example, to the unique sequence portions of the polypeptide variants of the present invention, including but not limited to bridges, heads, tails and insertions described in greater detail below. Preferred embodiments of antibodies according to the present invention are described in greater detail with regard to the section entitled “Antibodies”.

[0882] Radio-immunoassay (RIA): In one version, this method involves precipitation of the desired substrate and in the methods detailed hereinbelow, with a specific antibody and radiolabelled antibody binding protein (e.g., protein A labeled with I¹²⁵) immobilized on a precipitable carrier such as agarose beads. The number of counts in the precipitated pellet is proportional to the amount of substrate.

[0883] In an alternate version of the RIA, a labeled substrate and an unlabelled antibody binding protein are employed. A sample containing an unknown amount of substrate is added in varying amounts. The decrease in precipitated counts from the labeled substrate is proportional to the amount of substrate in the added sample.

[0884] Enzyme linked immunosorbent assay (ELISA): This method involves fixation of a sample (e.g., fixed cells or a proteinaceous solution) containing a protein substrate to a surface such as a well of a microtiter plate. A substrate specific antibody coupled to an enzyme is applied and allowed to bind to the substrate. Presence of the antibody is then detected and quantitated by a calorimetric reaction employing the enzyme coupled to the antibody. Enzymes commonly employed in this method include horseradish peroxidase and alkaline phosphatase. If well calibrated and within the linear range of response, the amount of substrate present in the sample is proportional to the amount of color produced. A substrate standard is generally employed to improve quantitative accuracy.

[0885] Western blot: This method involves separation of a substrate from other protein by means of an acrylamide gel followed by transfer of the substrate to a membrane (e.g., nylon or PVDF). Presence of the substrate is then detected by antibodies specific to the substrate, which are in turn detected by antibody binding reagents. Antibody binding reagents may be, for example, protein A, or other antibodies. Antibody binding reagents may be radiolabelled or enzyme linked as described hereinabove. Detection may be by autoradiography, colorimetric reaction or chemiluminescence. This method allows both quantitation of an amount of substrate and determination of its identity by a relative position on the membrane which is indicative of a migration distance in the acrylamide gel during electrophoresis.

[0886] Immunohistochemical analysis: This method involves detection of a substrate in situ in fixed cells by substrate specific antibodies. The substrate specific antibodies may be enzyme linked or linked to fluorophores. Detection is by microscopy and subjective evaluation. If enzyme linked antibodies are employed, a colorimetric reaction may be required.

[0887] Fluorescence activated cell sorting (FACS): This method involves detection of a substrate in situ in cells by substrate specific antibodies. The substrate specific antibodies are linked to fluorophores. Detection is by means of a cell sorting machine which reads the wavelength of light emitted from each cell as it passes through a light beam. This method may employ two or more antibodies simultaneously.

### Radio-Imaging Methods

[0888] These methods include but are not limited to, positron emission tomography (PET) single photon emission computed tomography (SPECT). Both of these techniques are non-invasive, and can be used to detect and/or measure a wide variety of tissue events and/or functions, such as detecting cancerous cells for example. Unlike PET, SPECT can optionally be used with two labels simultaneously. SPECT has some other advantages as well, for example with regard to cost and the types of labels that can be used. For example, U.S. Pat. No. 6,696,686 describes the use of SPECT for detection of breast cancer, and is hereby incorporated by reference as if fully set forth herein.

### Display Libraries

[0889] According to still another aspect of the present invention there is provided a display library comprising a plurality of display vehicles (such as phages, viruses or bacteria) each displaying at least 6, at least 7, at least 8, at least 9, at least 10, 10-15, 12-17, 15-20, 15-30 or 20-50 consecutive amino acids derived from the polypeptide sequences of the present invention.

[0890] Methods of constructing such display libraries are well known in the art. Such methods are described in, for example, Young A C, et al., “The three-dimensional structures of a polysaccharide binding antibody to Cryptococcus neoformans and its complex with a peptide from a phage display library: implications for the identification of peptide mimotopes” J Mol Biol 1997 Dec. 12; 274(4):622-34; Giebel L B et al. “Screening of cyclic peptide phage libraries identifies ligands that bind streptavidin with high affinities” Biochemistry 1995 Nov. 28; 34(47):15430-5; Davies E L et al., “Selection of specific phage-display antibodies using libraries derived from chicken immunoglobulin genes” J Immunol Methods 1995 Oct. 12; 186(1):125-35; Jones C R T al. “Current trends in molecular recognition and bioseparation” J Chromatogr A 1995 Jul. 14; 707(1):3-22; Deng S J et al. “Basis for selection of improved carbohydrate-binding single-chain antibodies from synthetic gene libraries” Proc Natl Acad Sci USA 1995 May 23; 92(11):4992-6; and Deng S J et al. “Selection of antibody single-chain variable fragments with improved carbohydrate binding by phage display” J Biol Chem 1994 Apr. 1; 269(13):9533-8, which are incorporated herein by reference.

[0891] The following sections relate to Candidate Marker Examples (first section) and to Experimental Data for these Marker Examples (second section).

[0892] It should be noted that Table numbering is restarted within each section.

### Candidate Marker Examples Section

[0893] This Section relates to Examples of sequences according to the present invention, including illustrative methods of selection thereof.

[0894] Description of the Methodology Undertaken to Uncover the Biomolecular Sequences of the Present Invention

[0895] Human ESTs and cDNAs were obtained from GenBank versions 136 (Jun. 15, 2003 ftp.ncbi.nih.gov/genbank/release.notes/gb136.release.notes); NCBI genome assembly of April 2003; RefSeq sequences from June 2003; Genbank version 139 (December 2003); Human Genome from NCBI (Build 34) (from October 2003); and RefSeq sequences from December 2003; and from the LifeSeq library of Incyte Corporation (Wilmington, Del., USA; ESTs only). With regard to GenBank sequences, the human EST sequences from the EST (GBEST) section and the human mRNA sequences from the primate (GBPRI) section were used; also the human nucleotide RefSeq mRNA sequences were used (see for example www.ncbi.nlm.nih.gov/Genbank/GenbankOverview.html and for a reference to the EST section, see www.ncbi.nlm.nih.gov/dbEST/; a general reference to dbEST, the EST database in GenBank, may be found in Boguski et al, Nat. Genet. 1993 August; 4(4):332-3; all of which are hereby incorporated by reference as if fully set forth herein).

[0896] Novel splice variants were predicted using the LEADS clustering and assembly system as described in Sorek, R., Ast, G. & Graur, D. Alu-containing exons are alternatively spliced. Genome Res 12, 1060-7 (2002); U.S. Pat. No. 6,625,545; and U.S. patent application Ser. No. 10/426,002, published as US20040101876 on May 27, 2004; all of which are hereby incorporated by reference as if fully set forth herein. Briefly, the software cleans the expressed sequences from repeats, vectors and immunoglobulins. It then aligns the expressed sequences to the genome taking alternatively splicing into account and clusters overlapping expressed sequences into “clusters” that represent genes or partial genes.

[0897] These were annotated using the GeneCarta (Compugen, Tel-Aviv, Israel) platform. The GeneCarta platform includes a rich pool of annotations, sequence information (particularly of spliced sequences), chromosomal information, alignments, and additional information such as SNPs, gene ontology terms, expression profiles, functional analyses, detailed domain structures, known and predicted proteins and detailed homology reports.

[0898] A brief explanation is provided with regard to the method of selecting the candidates. However, it should noted that this explanation is provided for descriptive purposes only, and is not intended to be limiting in any way. The potential markers were identified by a computational process that was designed to find genes and/or their splice variants that are over-expressed in tumor tissues, by using databases of expressed sequences. Various parameters related to the information in the EST libraries, determined according to a manual classification process, were used to assist in locating genes and/or splice variants thereof that are over-expressed in cancerous tissues. The detailed description of the selection method is presented in Example 1 below. The cancer biomarkers selection engine and the following wet validation stages are schematically summarized in FIG. 1.

### Example 1

### Identification of Differentially Expressed Gene Products

### Algorithm

[0899] In order to distinguish between differentially expressed gene products and constitutively expressed genes (i.e., house keeping genes ) an algorithm based on an analysis of frequencies was configured. A specific algorithm for identification of transcripts over expressed in cancer is described hereinbelow.

[0900] Dry Analysis

[0901] Library annotation—EST libraries are manually classified according to:

[0902] (i) Tissue origin

[0903] (ii) Biological source—Examples of frequently used biological sources for construction of EST libraries include cancer cell-lines; normal tissues; cancer tissues; fetal tissues; and others such as normal cell lines and pools of normal cell-lines, cancer cell-lines and combinations thereof. A specific description of abbreviations used below with regard to these tissues/cell lines etc is given above.

[0904] (iii) Protocol of library construction—various methods are known in the art for library construction including normalized library construction; non-normalized library construction; subtracted libraries; ORESTES and others. It will be appreciated that at times the protocol of library construction is not indicated.

[0905] The following rules are followed:

[0906] EST libraries originating from identical biological samples are considered as a single library.

[0907] EST libraries which included above-average levels of contamination, such as DNA contamination for example, were eliminated. The presence of such contamination was determined as follows. For each library, the number of unspliced ESTs that are not fully contained within other spliced sequences was counted. If the percentage of such sequences (as compared to all other sequences) was at least 4 standard deviations above the average for all libraries being analyzed, this library was tagged as being contaminated and was eliminated from further consideration in the below analysis (see also Sorek, R. & Safer, H. M. A novel algorithm for computational identification of contaminated EST libraries. Nucleic Acids Res 31, 1067-74 (2003) for further details).

[0908] Clusters (genes) having at least five sequences including at least two sequences from the tissue of interest were analyzed. Splice variants were identified by using the LEADS software package as described above.

### Example 2

### Identification of Genes Over Expressed in Cancer

[0909] Two different scoring algorithms were developed.

[0910] Libraries score—candidate sequences which are supported by a number of cancer libraries, are more likely to serve as specific and effective diagnostic markers.

[0911] The basic algorithm—for each cluster the number of cancer and normal libraries contributing sequences to the cluster was counted. Fisher exact test was used to check if cancer libraries are significantly over-represented in the cluster as compared to the total number of cancer and normal libraries.

[0912] Library counting: Small libraries (e.g., less than 1000 sequences) were excluded from consideration unless they participate in the cluster. For this reason, the total number of libraries is actually adjusted for each cluster.

[0913] Clones no. score—Generally, when the number of ESTs is much higher in the cancer libraries relative to the normal libraries it might indicate actual over-expression.

[0914] The Algorithm—

[0915] Clone counting: For counting EST clones each library protocol class was given a weight based on our belief of how much the protocol reflects actual expression levels:

[0916] (i) non-normalized: 1

[0917] (ii) normalized: 0.2

[0918] (iii) all other classes: 0.1

[0919] Clones number score—The total weighted number of EST clones from cancer libraries was compared to the EST clones from normal libraries. To avoid cases where one library contributes to the majority of the score, the contribution of the library that gives most clones for a given cluster was limited to 2 clones.

[0920] The score was computed as

$$\frac{\frac{c + 1}{C}}{\frac{n + 1}{N}}$$

where:

[0921] c—weighted number of “cancer” clones in the cluster.

[0922] C—weighted number of clones in all “cancer” libraries.

[0923] n—weighted number of “normal” clones in the cluster.

[0924] N—weighted number of clones in all “normal” libraries.

[0925] Clones number score significance—Fisher exact test was used to check if EST clones from cancer libraries are significantly over-represented in the cluster as compared to the total number of EST clones from cancer and normal libraries.

[0926] Two search approaches were used to find either general cancer-specific candidates or tumor specific candidates.
[0927] Libraries/sequences originating from tumor tissues are counted as well as libraries originating from cancer cell-lines (“normal” cell-lines were ignored).
[0928] Only libraries/sequences originating from tumor tissues are counted

### Example 3

### Identification of Tissue Specific Genes

[0929] For detection of tissue specific clusters, tissue libraries/sequences were compared to the total number of libraries/sequences in cluster. Similar statistical tools to those described in above were employed to identify tissue specific genes. Tissue abbreviations are the same as for cancerous tissues, but are indicated with the header “normal tissue”.

[0930] The algorithm—for each tested tissue T and for each tested cluster the following were examined:

[0931] 1. Each cluster includes at least 2 libraries from the tissue T. At least 3 clones (weighed—as described above) from tissue T in the cluster; and

[0932] 2. Clones from the tissue T are at least 40% from all the clones participating in the tested cluster

[0933] Fisher exact test P-values were computed both for library and weighted clone counts to check that the counts are statistically significant.

### Example 4

### Identification of Splice Variants Over Expressed in Cancer of Clusters which are not Over Expressed in Cancer

[0934] Cancer-specific splice variants containing a unique region were identified.

[0935] Identification of unique sequence regions in splice variants

[0936] A Region is defined as a group of adjacent exons that always appear or do not appear together in each splice variant.

[0937] A “segment” (sometimes referred also as “seg” or “node”) is defined as the shortest contiguous transcribed region without known splicing inside.

[0938] Only reliable ESTs were considered for region and segment analysis. An EST was defined as unreliable if:

[0939] (i) Unspliced;

[0940] (ii) Not covered by RNA;

[0941] (iii) Not covered by spliced ESTs; and

[0942] (iv) Alignment to the genome ends in proximity of long poly-A stretch or starts in proximity of long poly-T stretch.

[0943] Only reliable regions were selected for further scoring. Unique sequence regions were considered reliable if:

[0944] (i) Aligned to the genome; and

[0945] (ii) Regions supported by more than 2 ESTs.

[0946] The Algorithm

[0947] Each unique sequence region divides the set of transcripts into 2 groups:

| | |
|---|---|
| (i) Transcripts containing this region | (group TA). |
| (ii) Transcripts not containing this region | (group TB). |

[0948] The set of EST clones of every cluster is divided into 3 groups:

[0949] (i) Supporting (originating from) transcripts of group TA (S1).

[0950] (ii) Supporting transcripts of group TB (S2).

[0951] (iii) Supporting transcripts from both groups (S3).

[0952] Library and clones number scores described above were given to S1 group.

[0953] Fisher Exact Test P-values were used to check if:

[0954] S1 is significantly enriched by cancer EST clones compared to S2; and

[0955] S1 is significantly enriched by cancer EST clones compared to cluster background (S1+S2+S3).

[0956] Identification of unique sequence regions and division of the group of transcripts accordingly is illustrated in FIG. 2. Each of these unique sequence regions corresponds to a segment, also termed herein a “node”. Region 1: common to all transcripts, thus it is not considered; Region 2: specific to Transcript 1: T_{—}1 unique regions (2+6) against T_{—}2+3 unique regions (3+4); Region 3: specific to Transcripts 2+3: T_{—}2+3 unique regions (3+4) against T1 unique regions (2+6); Region 4: specific to Transcript 3: T_{—}3 unique regions (4) against T1+2 unique regions (2+5+6); Region 5: specific to Transcript 1+2: T_{—}1+2 unique regions (2+5+6) against T3 unique regions (4); Region 6: specific to Transcript 1: same as region 2.

### Example 5

### Identification of Cancer Specific Splice Variants of Genes Over Expressed in Cancer

[0957] A search for EST supported (no mRNA) regions for genes of:

[0958] (i) known cancer markers

[0959] (ii) Genes shown to be over-expressed in cancer in published micro-array experiments.

[0960] Reliable EST supported-regions were defined as supported by minimum of one of the following:

[0961] (i) 3 spliced ESTs; or

[0962] (ii) 2 spliced ESTs from 2 libraries;

[0963] (iii) 10 unspliced ESTs from 2 libraries, or

[0964] (iv) 3 libraries.

### Actual Marker Examples

[0965] The following examples relate to specific actual marker examples.

### Experimental Examples Section

[0966] This Section relates to Examples describing experiments involving these sequences, and illustrative, non-limiting examples of methods, assays and uses thereof. The materials and experimental procedures are explained first, as all experiments used them as a basis for the work that was performed.

[0967] The markers of the present invention were tested with regard to their expression in various cancerous and non-cancerous tissue samples. A description of the samples used in the panel is provided in Tables 1 and 1_{—}1 below. A description of the samples used in the normal tissue panel is provided in Tables 2 and 2_{—}2 below. Tests were then performed as described in the “Materials and Experimental Procedures” section below. The key for the is listed in tables 1_{—}1_{—}1.

TABLE 1
Tissue samples in testing panel

| COLON PANEL | | | | | | |
|---|---|---|---|---|---|---|
| sample name | Lot No. | tissue | source | pathology | Grade | gender/age |
| 58-B-Adeno G1 | A609152 | Colon | biochain | Adenocarcinoma | 1 | M/73 |
| 59-B-Adeno G1 | A609059 | Colon | biochain | Adenocarcinoma, Ulcer | 1 | M/58 |
| 14-CG-Polypoid Adeno G1 D-C | CG-222 (2) | Rectum | Ichilov | Well polypoid adeocarcinoma Duke's C | | F/49 |
| 17-CG-Adeno G1-2 | CG-163 | Rectum | Ichilov | Adenocarcinoma | 2 | M/73 |
| 10-CG-Adeno G1-2 D-B2 | CG-311 | Sigmod co [symbol] | Ichilov | Adenocarcinoma Astler-Coller B2. | 1-2 | M/88 |
| 11-CG-Adeno G1-2 D-C2 | CG-337 | Colon | Ichilov | Adenocarcinoma Astler-Coller C2. | 1-2 | NA |
| 6-CG-Adeno G1-2 D-C2 | CG-303 (3) | Colon | Ichilov | Adenocarcinoma Astler-Coller C2. | 1-2 | F/77 |
| 5-CG-Adeno G2 | CG-308 | Colon Sign [symbol] | Ichilov | Adenocarcinoma. | 2 | F/80 |
| 16-CG-Adeno G2 | CG-278C | colon | Ichilov | Adenocarcinoma | 2 | F/60 |
| 56-B-Adeno G2 | A609148 | Colon | biochain | Adenocarcinoma | 2 | F48 |
| 61-B-Adeno G2 | A606258 | Colon | biochain | Adenocarcinoma, Ulcer | 2 | M/41 |
| 60-B-Adeno G2 | A609058 | Colon | biochain | Adenocarcinoma, Ulcer | 2 | M/67 |
| 22-CG-Adeno G2 D-B | CG-229C | Colon | Ichilov | Adenocarcinoma Duke's B | 2 | F/55 |
| 1-CG-Adeno G2 D-B2 | CG-335 | Cecum | Ichilov | Adenocarcinoma Dukes B2. | 2 | F/66 |
| 12-CG-Adeno G2 D-B2 | CG-340 | Colon Sign [symbol] | Ichilov | Adenocarcinoma Astler-Coller B2. | 2 | M/66 |
| 28-CG-Adeno G2 D-B2 | CG-284 | sigma | Ichilov | Adenocarcinoma Duke's B2 | 2 | F/72 |
| 2-CG-Adeno G2 D-C2 | CG-307 X2 | Cecum | Ichilov | Adenocarcinoma Astler-Coller C2. | 2 | F/89 |
| 9-CG-Adeno G2 D-D | CG-297 X2 | Rectum | Ichilov | Adenocarcinoma Dukes D. | 2 | M/62 |
| 13-CG-Adeno G2 D-D | CG-290 X2 | Rectosigm [symbol] | Ichilov | Adenocarcinoma Dukes D. | 2 | M/47 |
| 26-CG-Adeno G2 D-D | CG-283 | sigma | Ichilov | Colonic adenocarcinoma Duke's D | 2 | F/63 |
| 4-CG-Adeno G3 | CG-276 | Colon | Ichilov | Carcinoma. | 3 | M/64 |
| 53-B-Adeno G3 | A609161 | Colon | biochain | Adenocarcinoma | 3 | F/53 |
| 54-B-Adeno G3 | A609142 | Colon | biochain | Adenocarcinoma | 3 | M/53 |
| 55-B-Adeno G3 | A609144 | Colon | biochain | Adenocarcinoma | 3 | M/68 |
| 57-B-Adeno G3 | A609150 | Colon | biochain | Adenocarcinoma | 3 | F/45 |
| 72-CG-Adeno G3 | CG-309 | colon | Ichilov | Adenocarcinoma | 3 | F/88 |
| 20-CG-Adeno G3 D-B2 | CG-249 | Colon | Ichilov | Ulcerated adenocarcinoma Duke's B2 | 3 | M/36 |
| 7-CG-Adeno D-A | CG-235 | Rectum | Ichilov | Adenocarcinoma intramucosal Duke's A. | | F/66 |
| 23-CG-Adeno D-C | CG-282 | sigma | Ichilov | Mucinus adenocarcinoma Astler Coller C | | M/51 |
| 3-CG-Muc adeno D-D | CG-224 | Colon | Ichilov | Mucinois adenocarcinoma Duke's D | | M/48 |
| 18-CG-Adeno | CG-22C | Colon | Ichilov | Adenocarcinoma | | NA |
| 19-CG-Adeno | CG-19C (1) | Colon | Ichilov | Adenocarcinoma | | NA |
| 21-CG-Adeno | CG-18C | Colon | Ichilov | Adenocarcinoma | | NA |
| 24-CG-Adeno | CG-12 (2) | Colon | Ichilov | Adenocarcinoma | | NA |
| 25-CG-Adeno | CG-2 | Colon | Ichilov | Adenocarcinoma | | NA |
| 27-CG-Adeno | CG-4 | Colon | Ichilov | Adenocarcinoma | | NA |
| 8-CG-diverticolosis, diverticulitis | CG-291 | Wall of sig [symbol] | Ichilov | Diverticolosis and diverticulitis of the Colon | | F/65 |
| 46-CG-Crohn's disease | CG-338C | Cecum | Ichilov | Crohn's disease | | M/22 |
| 47-CG-Crohn's disease | CG-338AC | Colon | Ichilov | Crohn's disease. | | M/22 |
| 42-CG-N M20 | CG-249N | Colon | Ichilov | Normal | | M/36 |
| 43-CG-N M8 | CG-291N | Wall of sig [symbol] | Ichilov | Normal | | F/65 |
| 44-CG-N M21 | CG-18N | Colon | Ichilov | Normal | | NA |
| 45-CG-N M11 | CG-337N | Colon | Ichilov | Normal | | M/75 |
| 49-CG-N M14 | CG-222N | Rectum | Ichilov | Normal | | F/49 |
| 50-CG-N M5 | CG-308N | Sigma | Ichilov | Within normal limits | | F/80 |
| 51-CG-N M26 | CG-283N | Sigma | Ichilov | Normal | | F/63 |
| 41-B-N | A501156 | Colon | biochain | Normal PM | | M/78 |
| 52-CG-N | CG-309TR | Colon | Ichilov | Within normal limits | | F/88 |
| 62-B-N | A608273 | Colon | biochain | Normal PM | | M/66 |
| 63-B-N | A609260 | Colon | biochain | Normal PM | | M/61 |
| 64-B-N | A609261 | Colon | biochain | Normal PM | | F/68 |
| 65-B-N | A607115 | Colon | biochain | Normal PM | | M/24 |
| 66-B-N | A609262 | Colon | biochain | Normal PM | | M/58 |
| 67-B-N | A406029 | Colon | biochain | Normal PM (Pool of 10) | | |
| 69-B-N | A411078 | Colon | biochain | Normal PM (Pool of 10) | | F&M |
| 70-Cl-N | 1110101 | Colon | clontech | Normal PM (Pool of 3) | | |
| 71-Am-N | 071P10B | Colon | Ambion | Normal (IC BLEED) | | F/34 |
| 15-CG-Adeno D-A | CG-235 | Rectum | Ichilov | Adenocarcinoma intramucosal Duke's A. | | F/66 |

[symbol]

indicates data missing or illegible when filed

TABLE 1_1
Colon cancer testing panel

| | | | sample_id | | | | | | | |
|---|---|---|---|---|---|---|---|---|---|---|
| | | | (GCI)/ | | | | | | | |
| | | | case id | | | | | | | |
| | | | (Asterand)/ | TISSUE ID | | | | | | |
| | | | lot | (GCI)/ | | | | | | |
| | | | no. | specimen | Sample | | | | | |
| | Source/ | sample | (old | ID | ID | | Diag | Specimen | | |
| Tissue | Delivery | name | samples | (Asterand) | (Asterand) | Diag | remarks | location | Gr | TNM |
| CC | Asterand | 1-As- | 18036 | 31312 | 31312B1 | Aden | | Cec | 3 | TXN0M0 |
| | | AdenS0 | | | | | | | | |
| CC | GCI | 2-GC- | 4QDH8 | 4QDH8ADT | | Aden | | Dis C | | |
| | | Adeno | | | | | | | | |
| | | SI | | | | | | | | |
| CC | Ichilov | 3-(7)- | CG-235 | | | Al | | Rectum | UN | |
| | | Ic- | | | | | | | | |
| | | Adeno | | | | | | | | |
| | | SI | | | | | | | | |
| CC | GCI | 4-GC- | NTAI8 | NTAI8AOU | | Aden | | Cec | | |
| | | Adeno | | | | | | | | |
| | | SI | | | | | | | | |
| CC | GCI | 5-GC- | ARA7P | ARA7PAQA | | Aden | | Ret, | | |
| | | Adeno | | | | | | Low | | |
| | | SI | | | | | | Ant | | |
| CC | Ichilov | 6-(20)- | CG-249 | | | UA | | | 3 | |
| | | Ic- | | | | | | | | |
| | | Adeno | | | | | | | | |
| | | SIIA | | | | | | | | |
| CC | GCI | 7-GC- | AFTS6 | AFTS6AP6 | | Aden | | | | |
| | | Adeno | | | | | | | | |
| | | SIIA | | | | | | | | |
| CC | GCI | 8-GC- | 5CYDK | 5CYDKACS | | Aden | | | | |
| | | Adeno | | | | | | | | |
| | | SIIA | | | | | | | | |
| CC | GCI | 9-GC- | XKSLS | XKSLSAF7 | | Aden | | | | |
| | | Adeno | | | | | | | | |
| | | SIIA | | | | | | | | |
| CC | GCI | 10- | B4RU8 | B4RU8A8Q | | Aden | | | | |
| | | GC- | | | | | | | | |
| | | Adeno | | | | | | | | |
| | | SIIA | | | | | | | | |
| CC | GCI | 11- | HB8EY | HB8EYA8I | | Aden | | | | |
| | | GC- | | | | | | | | |
| | | Adeno | | | | | | | | |
| | | SIIA | | | | | | | | |
| CC | Ichilov | 12- | CG-229C | | | Aden | | | 2 | |
| | | (22)- | | | | | | | | |
| | | Adeno | | | | | | | | |
| | | SII | | | | | | | | |
| CC | GCI | 13- | X8C7X | X8C7XATL | | Aden | | | | |
| | | GC- | | | | | | | | |
| | | Adeno | | | | | | | | |
| | | SIIA | | | | | | | | |
| CC | GCI | 14- | HCP6K | HCP6KA8Z | | Aden | | | | |
| | | GC- | | | | | | | | |
| | | Adeno | | | | | | | | |
| | | SIIA | | | | | | | | |
| CC | GCI | 15- | ZX4X7 | ZX4X7AXA | | Aden | | | | |
| | | GC- | | | | | | | | |
| | | Adeno | | | | | | | | |
| | | SIIA | | | | | | | | |
| CC | Asterand | 16-As- | 17915 | 31176 | 31176A1 | Aden | | | 2-3 | T3N0M0 |
| | | Adeno | | | | | | | | |
| | | SIIA | | | | | | | | |
| CC | Ichilov | 17-(1)- | CG-335 | | | Aden | | Cec | 2 | |
| | | Ic- | | | | | | | | |
| | | Adeno | | | | | | | | |
| | | SIIA | | | | | | | | |
| CC | Asterand | 19-As- | 12772 | 18885 | 18885A1 | Aden | | rectum | 2 | T3NXM0 |
| | | Adeno | | | | | | | | |
| | | SIIA | | | | | | | | |
| CC | GCI | 20- | JFYXP | JFYXPAMP | | Aden | | | | |
| | | GC- | | | | | | | | |
| | | Adeno | | | | | | | | |
| | | SIIA | | | | | | | | |
| CC | GCI | 21- | OJXW9 | OJXW9ASR | | Aden | | | | |
| | | GC- | | | | | | | | |
| | | Adeno | | | | | | | | |
| | | SIIA | | | | | | | | |
| CC | Ichilov | 22- | CG-284 | | | Aden | | sigma | 2 | |
| | | (28)- | | | | | | | | |
| | | Ic- | | | | | | | | |
| | | Adeno | | | | | | | | |
| | | SIIA | | | | | | | | |
| CC | Ichilov | 23- | CG-311 | | | Aden | | Sig | 1-2 | |
| | | (10)- | | | | | | Col | | |
| | | Ic- | | | | | | | | |
| | | Adeno | | | | | | | | |
| | | SIIA | | | | | | | | |
| CC | Ichilov | 24- | CG-222 | | | WP | | Rectum | | |
| | | (14)- | (2) | | | Aden | | | | |
| | | Ic- | | | | | | | | |
| | | Adeno | | | | | | | | |
| | | SIII | | | | | | | | |
| CC | Ichilov | 25- | CG-282 | | | MA | | sigma | UN | |
| | | (23)- | | | | | | | | |
| | | Ic- | | | | | | | | |
| | | Adeno | | | | | | | | |
| | | SIII | | | | | | | | |
| CC | GCI | 26- | OTPI7 | OTPI7AWY | | Aden | | | | |
| | | GC- | | | | | | | | |
| | | Adeno | | | | | | | | |
| | | SIII | | | | | | | | |
| CC | GCI | 27- | IG9NK | IG9NKAD3 | | MA | | | | |
| | | GC- | | | | | | | | |
| | | Adeno | | | | | | | | |
| | | SIII | | | | | | | | |
| CC | GCI | 28- | 53OM7 | 53OM7AGL | | Aden | | | | |
| | | GC- | | | | | | | | |
| | | Adeno | | | | | | | | |
| | | SIII | | | | | | | | |
| CC | GCI | 29- | BLUW6 | BLUW6A6Y | | Aden | | | | |
| | | GC- | | | | | | | | |
| | | Adeno | | | | | | | | |
| | | SIII | | | | | | | | |
| CC | GCI | 30- | VZ6QA | VZ6QAAFA | | Aden | | RECTUM | | |
| | | GC- | | | | | | | | |
| | | Adeno | | | | | | | | |
| | | SIII | | | | | | | | |
| CC | Ichilov | 31-(6)- | CG-303 | | | Aden | | | 1-2 | |
| | | Ic- | (3) | | | | | | | |
| | | Adeno | | | | | | | | |
| | | SIII | | | | | | | | |
| CC | Ichilov | 32-(2)- | CG-307 | | | Aden | | Cecum | 2 | |
| | | Ic- | | | | | | | | |
| | | Adeno | | | | | | | | |
| | | SIII | | | | | | | | |
| CC | Ichilov | 33- | CG-337 | | | Aden | | | 1-2 | |
| | | (11)- | | | | | | | | |
| | | Ic- | | | | | | | | |
| | | Adeno | | | | | | | | |
| | | SIII | | | | | | | | |
| CC | Asterand | 34-As- | 18462 | 40971 | 40971A1 | TA | | Sig | 2 | TXN2M0 |
| | | Adeno | | | | | | Col | | |
| | | SIIIC | | | | | | | | |
| CC | Ichilov | 35- | CG-290 | | | Aden | | Rect | 2 | |
| | | (13)- | | | | | | Col | | |
| | | Ic- | | | | | | | | |
| | | Adeno | | | | | | | | |
| | | SIV | | | | | | | | |
| CC | GCI | 36- | 7D7QV | 7D7QVAE6 | | Aden | | | | |
| | | GC- | | | | | | | | |
| | | Adeno | | | | | | | | |
| | | SIV | | | | | | | | |
| CC | GCI | 37- | 38U4V | 38U4VAA4 | | Aden | | | | |
| | | GC- | | | | | | | | |
| | | Adeno | | | | | | | | |
| | | SIV | | | | | | | | |
| CC | Ichilov | 38-(9)- | CG-297 | | | Aden | | Rectum | 2 | |
| | | Ic- | | | | | | | | |
| | | Adeno | | | | | | | | |
| | | SIV | | | | | | | | |
| CC | Ichilov | 71- | CG-278C | | | Aden | | | 2 | |
| | | (16)- | | | | | | | | |
| | | Ic- | | | | | | | | |
| | | Adeno | | | | | | | | |
| CC | Ichilov | 72-(4)- | CG-276 | | | Carc | | | 3 | |
| | | Ic- | | | | | | | | |
| | | Adeno | | | | | | | | |
| CC | Ichilov | 73- | CG-163 | | | Aden | | Rectum | 2 | |
| | | (17)- | | | | | | | | |
| | | Ic- | | | | | | | | |
| | | Adeno | | | | | | | | |
| CC | Ichilov | 74-(5)- | CG-308 | | | Aden | | Col | 2 | |
| | | Ic- | | | | | | Sig | | |
| | | Adeno | | | | | | | | |
| CC | Ichilov | 75- | CG-309 | | | Aden | | | 3 | |
| | | (72)- | | | | | | | | |
| | | Ic- | | | | | | | | |
| | | Adeno | | | | | | | | |
| CC | Ichilov | 76- | CG-22C | | | Aden | | | UN | |
| | | (18)- | | | | | | | | |
| | | Ic- | | | | | | | | |
| | | Adeno | | | | | | | | |
| CC | Ichilov | 78- | CG-18C | | | Aden | | | UN | |
| | | (21)- | | | | | | | | |
| | | Ic- | | | | | | | | |
| | | Adeno | | | | | | | | |
| CC | Ichilov | 79- | CG-12 | | | Aden | | | UN | |
| | | (24)- | | | | | | | | |
| | | Ic- | | | | | | | | |
| | | Adeno | | | | | | | | |
| CC | Ichilov | 80- | CG-2 | | | Aden | | | UN | |
| | | (25)- | | | | | | | | |
| | | Ic- | | | | | | | | |
| | | Adeno | | | | | | | | |
| CC | biochain | 82- | A606258 | | | Aden, | | | 2 | |
| | | (61)- | | | | Ulcer | | | | |
| | | Bc- | | | | | | | | |
| | | Adeno | | | | | | | | |
| CC | biochain | 83- | A609150 | | | Aden | | | 3 | |
| | | (57)- | | | | | | | | |
| | | Bc- | | | | | | | | |
| | | Adeno | | | | | | | | |
| CC | biochain | 84- | A609148 | | | Aden | | | 2 | |
| | | (56)- | | | | | | | | |
| | | Bc- | | | | | | | | |
| | | Adeno | | | | | | | | |
| CC | biochain | 85- | A609161 | | | Aden | | | 3 | |
| | | (53)- | | | | | | | | |
| | | Bc- | | | | | | | | |
| | | Adeno | | | | | | | | |
| CC | biochain | 86- | A609142 | | | Aden | | | 3 | |
| | | (54)- | | | | | | | | |
| | | Bc- | | | | | | | | |
| | | Adeno | | | | | | | | |
| CC | biochain | 87- | A609059 | | | Aden, | | | 1 | |
| | | (59)- | | | | Ulcer | | | | |
| | | Bc- | | | | | | | | |
| | | Adeno | | | | | | | | |
| CC | biochain | 88- | A609058 | | | Aden, | | | 2 | |
| | | (60)- | | | | Ulcer | | | | |
| | | Bc- | | | | | | | | |
| | | Adeno | | | | | | | | |
| CC | biochain | 89- | A609144 | | | Aden | | | 3 | |
| | | (55)- | | | | | | | | |
| | | Bc- | | | | | | | | |
| | | Adeno | | | | | | | | |
| CC | biochain | 90- | A609152 | | | Aden | | | 1 | |
| | | (58)- | | | | | | | | |
| | | Bc- | | | | | | | | |
| | | Adeno | | | | | | | | |
| CB | GCI | 40- | IG3OY | IG3OYN7S | | TS | | RT Col | | |
| | | GC- | | | | Aden | | | | |
| | | Ben | | | | | | | | |
| CB | GCI | 41- | GKIEY | GKIEYAV4 | | TS | | Prox T | | |
| | | GC- | | | | Aden | | Col | | |
| | | Ben | | | | HGD | | | | |
| CN | GCI | 42- | AGVTC | AGVTCNK7 | | NC | DIV | | | |
| | | GC-N | | | | | | | | |
| | | PS | | | | | | | | |
| CN | Asterand | 43-As- | 8956 | 9153 | 9153B1 | NC | | | | |
| | | N PS | | | | | | | | |
| CN | GCI | 44- | IG3OY | IG3OYN7S | | NC | | RT Col | | |
| | | GC-N | | | | | | | | |
| | | PS | | | | | | | | |
| CN | GCI | 45- | K9OYX | K9OYXN4F | | NC | Divs | LT Col | | |
| | | GC-N | | | | | w/F DIV | | | |
| | | PS | | | | | | | | |
| CN | Asterand | 46-As- | 23024 | 74445 | 74445B1 | NC | Chr | | | |
| | | N PS | | | | | Divs | | | |
| CN | Asterand | 47-As- | 23049 | 71410 | 71410B2 | NC | Chr | | | |
| | | N PS | | | | | Divs | | | |
| CN | GCI | 48- | G7JJX | G7JJXAX7 | | NC | Divs | Sig | | |
| | | GC-N | | | | | w/ | Col | | |
| | | PS | | | | | DIV . . . | | | |
| CN | Asterand | 49-As- | 22900 | 74446 | 74446B1 | NC | AD | | | |
| | | N PS | | | | | w/AF | | | |
| CN | GCI | 50- | XVPZ2 | XVPZ2NDD | | NC | Div | | | |
| | | GC-N | | | | | | | | |
| | | PS | | | | | | | | |
| CN | GCI | 51- | CDSUV | CDSUVNR3 | | NC | CU | | | |
| | | GC-N | | | | | | | | |
| | | PS | | | | | | | | |
| CN | GCI | 52- | GP5KH | GP5KHAOC | | NC | Div | | | |
| | | GC-N | | | | | | | | |
| | | PS | | | | | | | | |
| CN | GCI | 53- | YUZNR | YUZNRNDN | | NC | Divs | Sig | | |
| | | GC-N | | | | | | Col | | |
| | | PS | | | | | | | | |
| CN | GCI | 54- | 28QN6 | 28QN6NI1 | | NC | TS | RT Col | | |
| | | GC-N | | | | | Aden | | | |
| | | PS | | | | | | | | |
| CN | GCI | 55- | GV6N8 | GV6N8NG9 | | NC | Divs, | | | |
| | | GC-N | | | | | PA | | | |
| | | PS | | | | | | | | |
| CN | GCI | 56- | ZJ17R | ZJ17RNIH | | NC | Tub | RT Col | | |
| | | GC-N | | | | | Aden | | | |
| | | PS | | | | | | | | |
| CN | GCI | 57- | 2EEBJ | 2EEBJN2Q | | NC | Div/Chr | | | |
| | | GC-N | | | | | Infl | | | |
| | | PS | | | | | | | | |
| CN | GCI | 58- | 68IX5 | 68IX5N1H | | NC | Chr Div | LT Col | | |
| | | GC-N | | | | | | | | |
| | | PS | | | | | | | | |
| CN | GCI | 59- | 9GEGL | 9GEGLN1V | | NC | Ext Divs | Sig | | |
| | | GC-N | | | | | | Col | | |
| | | PS | | | | | | | | |
| CN | GCI | 60- | PKU8O | PKU8OAJ3 | | NC | Divs, | Sig | | |
| | | GC-N | | | | | Chr | Col | | |
| | | PS | | | | | Div . . . | | | |
| CN | Asterand | 61-As- | 22903 | 74452 | 74452B1 | NC | MU | | | |
| | | N PS | | | | | w/MI | | | |
| CN | Asterand | 62-As- | 16364 | 31802 | 31802B1 | NC | UC | | | |
| | | N PS | | | | | | | | |
| CN | biochain | 63- | A607115 | | | N-PM | PM | | | |
| | | (65)- | | | | | | | | |
| | | Bc-N | | | | | | | | |
| | | PM | | | | | | | | |
| CN | Ambion | 64- | 071P10B | | | N-PM | PM | | | |
| | | (71)- | | | | | | | | |
| | | Am-N | | | | | | | | |
| | | PM | | | | | | | | |
| CN | biochain | 65- | A609262 | | | N-PM | PM | | | |
| | | (66)- | | | | | | | | |
| | | Bc-N | | | | | | | | |
| | | PM | | | | | | | | |
| CN | biochain | 66- | A609260 | | | N-PM | PM | | | |
| | | (63)- | | | | | | | | |
| | | Bc-N | | | | | | | | |
| | | PM | | | | | | | | |
| CN | biochain | 67- | A608273 | | | N-PM | PM | | | |
| | | (62)- | | | | | | | | |
| | | Bc-N | | | | | | | | |
| | | PM | | | | | | | | |
| CN | biochain | 68- | A609261 | | | N-PM | PM | | | |
| | | (64)- | | | | | | | | |
| | | Bc-N | | | | | | | | |
| | | PM | | | | | | | | |
| CN | biochain | 69- | A501156 | | | N-PM | PM | | | |
| | | (41)- | | | | | | | | |
| | | Bc-N | | | | | | | | |
| | | PM | | | | | | | | |
| CN | biochain | 70- | A406029 + | | | N-PM | PM | | | |
| | | (67)- | A411078 | | | P10 | | | | |
| | | Bc-N | | | | | | | | |
| | | PM | | | | | | | | |

| | | | | | | | | Dr. | | | |
|---|---|---|---|---|---|---|---|---|---|---|---|
| | | | | | | | Alcohol | per | Alc. | Recovery | Exc. |
| Tissue | CS | CS2 | Tumor % | Gender | age | Ethnic B | Status | day | Dur. | Type | Y. |
| CC | 0 | | 80 | F | 43 | CAU | NU | | | Auto | 2004 |
| CC | I | Duke A | 85 | F | 44 | WCAU | Y | 4 | | Surg | |
| CC | I | Duke A | | F | 66 | | | | | | |
| CC | I | Duke | 80 | M | 53 | WCAU | Y | — | | Surg | |
| | | B1 | | | | | | | | | |
| CC | I | Duke | 70 | F | 70 | WCAU | Y | 0 | | Surg | |
| | | B1 | | | | | | | | | |
| CC | IIA | Duke | | M | 36 | | | | | | |
| | | B2 | | | | | | | | | |
| CC | IIA | Duke | 75 | M | 39 | WCAU | N | 0 | | Surg | |
| | | B2 | | | | | | | | | |
| CC | IIA | Duke | 65 | M | 44 | WCAU | N | — | | Surg | |
| | | B2 | | | | | | | | | |
| CC | IIA | Duke | 65 | M | 48 | WCAU | Y | 10 | | Surg | |
| | | B2 | | | | | | | | | |
| CC | IIA | Duke | 65 | F | 50 | WCAU | N | — | | Surg | |
| | | B2 | | | | | | | | | |
| CC | IIA | Duke | 65 | M | 53 | WCAU | N | — | | Surg | |
| | | B2 | | | | | | | | | |
| CC | II | Duke B | | F | 55 | | | | | | |
| CC | IIA | Duke | 90 | M | 56 | WCAU | N | — | | Surg | |
| | | B2 | | | | | | | | | |
| CC | IIA | Duke | 80 | M | 58 | WCAU | Y | 4 | | Surg | |
| | | B2. | | | | | | | | | |
| CC | IIA | Duke | 90 | M | 60 | WCAU | Y | 5 | | Surg | |
| | | B2 | | | | | | | | | |
| CC | IIA | Duke | 60 | F | 64 | CAU | occ | 1 | 21-30 | Auto | 2004 |
| | | B2 | | | | | | drink/ | years | | |
| | | | | | | | | week | | | |
| CC | IIA | Duke | | F | 66 | | | | | | |
| | | B2 | | | | | | | | | |
| CC | IIA | Duke | 60 | F | 67 | CAU | NU | | | Surg | 2004 |
| | | B2 | | | | | | | | | |
| CC | IIA | Duke | 60 | F | 68 | WCAU | Y | — | | Surg | |
| | | B2 | | | | | | | | | |
| CC | IIA | Duke | 90 | F | 69 | WCAU | N | — | | Surg | |
| | | B2 | | | | | | | | | |
| CC | IIA | Duke | | F | 72 | | | | | | |
| | | B2 | | | | | | | | | |
| CC | e | Duke | | M | 88 | | | | | | |
| | IIA | B2 | | | | | | | | | |
| CC | III | Duke C | | F | 49 | | | | | | |
| CC | III | Duke C | | M | 51 | | | | | | |
| CC | III | Duke | 70 | F | 54 | WCAU | N | — | | Surg | |
| | | C2 | | | | | | | | | |
| CC | III | Duke | 90 | F | 54 | WCAU | N | — | | Surg | |
| | | C2 | | | | | | | | | |
| CC | III | Duke | 75 | F | 61 | WCAU | N | — | | Surg | |
| | | C2 | | | | | | | | | |
| CC | III | Duke | 85 | F | 64 | WCAU | N | — | | Surg | |
| | | C2 | | | | | | | | | |
| CC | III | Duke | 60 | M | 67 | WCAU | Y | 14 | | Surg | |
| | | C2 | | | | | | | | | |
| CC | III | Duke | | F | 77 | | | | | | |
| | | C2. | | | | | | | | | |
| CC | III | Duke | | F | 89 | | | | | | |
| | | C2. | | | | | | | | | |
| CC | III | Duke | | NA | NA | | | | | | |
| | | C2. | | | | | | | | | |
| CC | IIIC | | 76 | F | 68 | CAU | NU | | | Surg | 2005 |
| CC | IV | Duke | | M | 47 | | | | | | |
| | | D. | | | | | | | | | |
| CC | IV | Duke D | 80 | F | 52 | WCAU | Y | 3 | | Surg | |
| CC | IV | Duke D | 85 | F | 53 | WCAU | | | | Surg | |
| CC | IV | Duke | | M | 62 | | | | | | |
| | | D. | | | | | | | | | |
| CC | | UN | 50 | F | 60 | | | | | | |
| CC | | UN | 75 | M | 64 | | | | | | |
| CC | | UN | | M | 73 | | | | | | |
| CC | | UN | | F | 80 | | | | | | |
| CC | | UN | | F | 88 | | | | | | |
| CC | | UN | | NA | NA | | | | | | |
| CC | | UN | | NA | NA | | | | | | |
| CC | | UN | | NA | NA | | | | | | |
| CC | | UN | | NA | NA | | | | | | |
| CC | | UN | | M | 41 | | | | | | |
| CC | | UN | | F | 45 | | | | | | |
| CC | | UN | 40 | F | 48 | | | | | | |
| CC | | UN | | F | 53 | | | | | | |
| CC | | UN | | M | 53 | | | | | | |
| CC | | UN | | M | 58 | | | | | | |
| CC | | UN | | M | 67 | | | | | | |
| CC | | UN | | M | 68 | | | | | | |
| CC | | UN | | M | 73 | | | | | | |
| CB | | | | F | 48 | WCAU | Y | 1 | | Surg | |
| CB | | | | F | 75 | WCAU | N | — | | Surg | |
| CN | | | 0 | M | 45 | WCAU | N | — | | Surg | |
| CN | | | 0 | F | 46 | CAU | NU | | | Surg | 2002 |
| CN | | | 0 | F | 48 | WCAU | Y | 1 | | Surg | |
| CN | | | 0 | F | 50 | WCAU | N | — | | Surg | |
| CN | | | 0 | F | 52 | CAU | Occ | | | Surg | 2005 |
| CN | | | 0 | F | 52 | CAU | occ | | | Surg | 2005 |
| CN | | | 0 | M | 52 | WCAU | N | — | | Surg | |
| CN | | | 0 | M | 54 | CAU | Cur U | | | Surg | 2005 |
| CN | | | 0 | F | 55 | WCAU | N | — | | Surg | |
| CN | | | 0 | M | 55 | WCAU | N | — | | Surg | |
| CN | | | 0 | F | 57 | WCAU | Y | 6 | | Surg | |
| CN | | | 0 | F | 57 | WCAU | Y | 1 | | Surg | |
| CN | | | 0 | M | 59 | WCAU | Y | 42 | | Surg | |
| CN | | | 0 | F | 61 | WCAU | Y | 3 | | Surg | |
| CN | | | 0 | M | 61 | WCAU | Y | — | | Surg | |
| CN | | | 0 | F | 66 | WCAU | Y | 4 | | Surg | |
| CN | | | 0 | F | 66 | WCAU | N | — | | Surg | |
| CN | | | 0 | M | 68 | WCAU | N | — | | Surg | |
| CN | | | 0 | F | 69 | WCAU | N | — | | Surg | |
| CN | | | 0 | M | 71 | CAU | Occ | | | Surg | 2005 |
| CN | | | 0 | F | 74 | WCAU | Occ | | | Surg | 2004 |
| CN | | | | M | 24 | | | | | | |
| CN | | | | F | 34 | | | | | | |
| CN | | | | M | 58 | | | | | | |
| CN | | | | M | 61 | | | | | | |
| CN | | | | M | 66 | | | | | | |
| CN | | | | F | 68 | | | | | | |
| CN | | | | M | 78 | | | | | | |
| CN | | | | F&M | M | | | | | | |
| | | | | | (26-78) | | | | | | |
| | | | | | &F | | | | | | |
| | | | | | (53-77). | | | | | | |

TABLE 1_1_1

| Key | Full Name |
|---|---|
| CC | Colon Cancer |
| CB | Colon Benign |
| CN | Colon Normal |
| WT | Weight |
| HT | Height |
| Aden | Adenocarcinoma |
| AI | Adenocarcinoma intramucosal |
| UA | Ulcerated adenocarcinoma |
| WP Aden | Well polypoid adeocarcinoma |
| MA | Mucinus adenocarcinoma |
| TA | Tubular adenocarcinoma |
| Carc | Carcinoma |
| TS Aden | TUBULOVILLOUS ADENOMA |
| TS Aden HGD | TUBULOVILLOUS ADENOMA |
| | with HIGH GRADE DYSPLASIA |
| NC | Normal Colon |
| N-PM | Normal PM |
| N-PM P10 | Normal PM (Pool 10) |
| Diag | Diagnosis |
| Div | DIVERTICULITIS |
| Divs w/F DIV | Diverticulosis with Focal DIVERTICULITIS |
| Chr Divs | Chronic diverticulosis |
| Divs w/DIV . . . | DIVERTICULOSIS WITH DIVERTICULITIS |
| | AND FOCAL ABSCESS FORMATION; NO |
| | MALIGNANCY |
| AD w/AF | Acute diverticulitis with abscess formation |
| CU | CECAL ULCERATION |
| Divs, PA | DIVERTICULOSIS AND PERICOLIC ABSCESS |
| Tub Aden | TUBULAR ADENOMA |
| Div/Chr Infl | DIVERTICULOSIS/CHRONIC INFLAMMATION |
| Chr Div | CHRONIC DIVERTICULITIS |
| Ext Divs | EXTENSIVE DIVERTICULOSIS |
| Divs, Chr Div . . . | DIVERTICULOSIS AND |
| | CHRONIC DIVERTICULITIS, |
| | SEROSAL FIBROSIS AND CHRONIC |
| | SEROSITIS |
| MU w/MI | Mucosal ulceration with mural inflammation |
| UC | Ulcerative colitis |
| Cec | cecum |
| Dis C | DISTAL COLON |
| Ret, Low Ant | RETROSIGMOID, LOW ANTERIOR |
| Rect Col | Rectosigmoidal colon |
| Sig col | Sigmod colon |
| Col Sig | Colon Sigma |
| RT Col | RIGHT COLON |
| Prox T Col | PROXIMAL TRANSVERSE COLON |
| LT Col | Left Colon |
| Gr | Grade |
| CS | Cancer Stage |
| Ethnic B | Ethnic background |
| NU | Never Used |
| Occ | Occasion |
| Cur U | Current use |
| Dr. per day | Drinks per day |
| Alc. Dur. | Alcohol Duration |
| Auto. | Autopsy |
| Surg. | Surgical |
| Exc. Y. | Excision Year |

TABLE 2
Tissue samples in normal panel:

| | Lot no. | Source | Tissue | Pathology | Sex/Age |
|---|---|---|---|---|---|
| 1-Am-Colon (C71) | 071P10B | Ambion | Colon | PM | F/43 |
| 2-B-Colon (C69) | A411078 | Biochain | Colon | PM-Pool of 10 | M&F |
| 3-Cl-Colon (C70) | 1110101 | Clontech | Colon | PM-Pool of 3 | M&F |
| 4-Am-Small Intestine | 091P0201A | Ambion | Small Intestine | PM | M/75 |
| 5-B-Small Intestine | A501158 | Biochain | Small Intestine | PM | M/63 |
| 6-B-Rectum | A605138 | Biochain | Rectum | PM | M/25 |
| 7-B-Rectum | A610297 | Biochain | Rectum | PM | M/24 |
| 8-B-Rectum | A610298 | Biochain | Rectum | PM | M/27 |
| 9-Am-Stomach | 110P04A | Ambion | Stomach | PM | M/16 |
| 10-B-Stomach | A501159 | Biochain | Stomach | PM | M/24 |
| 11-B-Esophagus | A603814 | Biochain | Esophagus | PM | M/26 |
| 12-B-Esophagus | A603813 | Biochain | Esophagus | PM | M/41 |
| 13-Am-Pancreas | 071P25C | Ambion | Pancreas | PM | M/25 |
| 14-CG-Pancreas | CG-255-2 | Ichilov | Pancreas | PM | M/75 |
| 15-B-Lung | A409363 | Biochain | Lung | PM | F/26 |
| 16-Am-Lung (L93) | 111P0103A | Ambion | Lung | PM | F/61 |
| 17-B-Lung (L92) | A503204 | Biochain | Lung | PM | M/28 |
| 18-Am-Ovary (O47) | 061P43A | Ambion | Ovary | PM | F/16 |
| 19-B-Ovary (O48) | A504087 | Biochain | Ovary | PM | F/51 |
| 20-B-Ovary (O46) | A504086 | Biochain | Ovary | PM | F/41 |
| 21-Am-Cervix | 101P0101A | Ambion | Cervix | PM | F/40 |
| 22-B-Cervix | A408211 | Biochain | Cervix | PM | F/36 |
| 23-B-Cervix | A504089 | Biochain | Cervix | PM-Pool of 5 | M&F |
| 24-B-Uterus | A411074 | Biochain | Uterus | PM-Pool of 10 | M&F |
| 25-B-Uterus | A409248 | Biochain | Uterus | PM | F/43 |
| 26-B-Uterus | A504090 | Biochain | Uterus | PM-Pool of 5 | M&F |
| 27-B-Bladder | A501157 | Biochain | Bladder | PM | M/29 |
| 28-Am-Bladder | 071P02C | Ambion | Bladder | PM | M/20 |
| 29-B-Bladder | A504088 | Biochain | Bladder | PM-Pool of 5 | M&F |
| 30-Am-Placenta | 021P33A | Ambion | Placenta | PB | F/33 |
| 31-B-Placenta | A410165 | Biochain | Placenta | PB | F/26 |
| 32-B-Placenta | A411073 | Biochain | Placenta | PB-Pool of 5 | M&F |
| 33-B-Breast (B59) | A607155 | Biochain | Breast | PM | F/36 |
| 34-Am-Breast (B63) | 26486 | Ambion | Breast | PM | F/43 |
| 35-Am-Breast (B64) | 23036 | Ambion | Breast | PM | F/57 |
| 36-Cl-Prostate (P53) | 1070317 | Clontech | Prostate | PB-Pool of 47 | M&F |
| 37-Am-Prostate (P42) | 061P04A | Ambion | Prostate | PM | M/47 |
| 38-Am-Prostate (P59) | 25955 | Ambion | Prostate | PM | M/62 |
| 39-Am-Testis | 111P0104A | Ambion | Testis | PM | M/25 |
| 40-B-Testis | A411147 | Biochain | Testis | PM | M/74 |
| 41-Cl-Testis | 1110320 | Clontech | Testis | PB-Pool of 45 | M&F |
| 42-CG-Adrenal | CG-184-10 | Ichilov | Adrenal | PM | F/81 |
| 43-B-Adrenal | A610374 | Biochain | Adrenal | PM | F/83 |
| 44-B-Heart | A411077 | Biochain | Heart | PB-Pool of 5 | M&F |
| 45-CG-Heart | CG-255-9 | Ichilov | Heart | PM | M/75 |
| 46-CG-Heart | CG-227-1 | Ichilov | Heart | PM | F/36 |
| 47-Am-Liver | 081P0101A | Ambion | Liver | PM | M/64 |
| 48-CG-Liver | CG-93-3 | Ichilov | Liver | PM | F/19 |
| 49-CG-Liver | CG-124-4 | Ichilov | Liver | PM | F/34 |
| 50-Cl-BM | 1110932 | Clontech | Bone Marrow | PM-Pool of 8 | M&F |
| 51-CGEN-Blood | WBC#5 | CGEN | Blood | | M |
| 52-CGEN-Blood | WBC#4 | CGEN | Blood | | M |
| 53-CGEN-Blood | WBC#3 | CGEN | Blood | | M |
| 54-CG-Spleen | CG-267 | Ichilov | Spleen | PM | F/25 |
| 55-CG-Spleen | 111P0106B | Ambion | Spleen | PM | M/25 |
| 56-CG-Spleen | A409246 | Biochain | Spleen | PM | F/12 |
| 56-CG-Thymus | CG-98-7 | Ichilov | Thymus | PM | F/28 |
| 58-Am-Thymus | 101P0101A | Ambion | Thymus | PM | M/14 |
| 59-B-Thymus | A409278 | Biochain | Thymus | PM | M/28 |
| 60-B-Thyroid | A610287 | Biochain | Thyroid | PM | M/27 |
| 61-B-Thyroid | A610286 | Biochain | Thyroid | PM | M/24 |
| 62-CG-Thyroid | CG-119-2 | Ichilov | Thyroid | PM | F/66 |
| 63-Cl-Salivary Gland | 1070319 | Clontech | Salivary Gland | PM-Pool of 24 | M&F |
| 64-Am-Kidney | 111P0101B | Ambion | Kidney | PM-Pool of 14 | M&F |
| 65-Cl-Kidney | 1110970 | Clontech | Kidney | PM-Pool of 14 | M&F |
| 66-B-Kidney | A411080 | Biochain | Kidney | PM-Pool of 5 | M&F |
| 67-CG-Cerebellum | CG-183-5 | Ichilov | Cerebellum | PM | M/74 |
| 68-CG-Cerebellum | CG-212-5 | Ichilov | Cerebellum | PM | M/54 |
| 69-B-Brain | A411322 | Biochain | Brain | PM | M/28 |
| 70-Cl-Brain | 1120022 | Clontech | Brain | PM-Pool of 2 | M&F |
| 71-B-Brain | A411079 | Biochain | Brain | PM-Pool of 2 | M&F |
| 72-CG-Brain | CG-151-1 | Ichilov | Brain | PM | F/86 |
| 73-Am-Skeletal Muscle | 101P013A | Ambion | Skeletal Muscle | PM | F/28 |
| 74-Cl-Skeletal Muscle | 1061038 | Clontech | Skeletal Muscle | PM-Pool of 2 | M&F |

TABLE 1_5
Tissue samples in normal panel:

| | | Sample id(GCI)/ | Tissue id (GCI)/ | Sample id |
|---|---|---|---|---|
| | | case id | Specimen id | (Asterand)/RNA id |
| sample name | Source | (Asterand) Lot no. | (Asternd) | (GCI) |
| 1-(7)-Bc-Rectum | Biochain | A610297 | | |
| 2-(8)-Bc-Rectum | Biochain | A610298 | | |
| 3-GC-Colon | GCI | CDSUV | CDSUVNR3 | |
| 4-As-Colon | Asterand | 16364 | 31802 | 31802B1 |
| 5-As-Colon | Asterand | 22900 | 74446 | 74446B1 |
| 6-GC-Small bowl | GCI | V9L7D | V9L7DN6Z | |
| 7-GC-Small bowl | GCI | M3GVT | M3GVTN5R | |
| 8-GC-Small bowl | GCI | 196S2 | 196S2AJN | |
| 9-(9)-Am-Stomach | Ambion | 110P04A | | |
| 10-(10)-Bc-Stomach | Biochain | A501159 | | |
| 11-(11)-Bc-Esoph | Biochain | A603814 | | |
| 12-(12)-Bc-Esoph | Biochain | A603813 | | |
| 13-As-Panc | Asterand | 8918 | 9442 | 9442C1 |
| 14-As-Panc | Asterand | 10082 | 11134 | 11134B1 |
| 15-(48)-Ic-Liver | Ichilov | CG-93-3 | | |
| 16-As-Liver | Asterand | 7916 | 7203 | 7203B1 |
| 17-(28)-Am-Bladder | Ambion | 071P02C | | |
| 18-(29)-Bc-Bladder | Biochain | A504088 | | |
| 19-(64)-Am-Kidney | Ambion | 111P0101B | | |
| 20-(65)-Cl-Kidney | Clontech | 1110970 | | |
| 21-(66)-Bc-Kidney | Biochain | A411080 | | |
| 22-GC-Kidney | GCI | N1EVZ | N1EVZN91 | |
| 23-GC-Kidney | GCI | BMI6W | BMI6WN9F | |
| 24-(42)-Ic-Adrenal | Ichilov | CG-184-10 | | |
| 25-(43)-Bc-Adrenal | Biochain | A610374 | | |
| 26-(16)-Am-Lung | Ambion | 111P0103A | | |
| 27-(17)-Bc-Lung | Biochain | A503204 | | |
| 28-As-Lung | Asterand | 9078 | 9275 | 9275B1 |
| 29-As-Lung | Asterand | 6692 | 6161 | 6161A1 |
| 30-As-Lung | Asterand | 7900 | 7180 | 7180F1 |
| 31-(75)-GC-Ovary | GCI | L629FRV1 | | |
| 32-(76)-GC-Ovary | GCI | DWHTZRQX | | |
| 33-(77)-GC-Ovary | GCI | FDPL9NJ6 | | |
| 34-(78)-GC-Ovary | GCI | GWXUZN5M | | |
| 35-(21)-Am-Cerix | Ambion | 101P0101A | | |
| 36-GC-cervix | GCI | E2P2N | E2P2NAP4 | |
| 37-(24)-Bc-Uterus | Biochain | A411074 | | |
| 38-(26)-Bc-Uterus | Biochain | A504090 | | |
| 39-(30)-Am-Placen | Ambion | 021P33A | | |
| 40-(32)-Bc-Placen | Biochain | A411073 | | |
| 41-GC-Breast | GCI | DHLR1 | | |
| 42-GC-Breast | GCI | TG6J6 | | |
| 43-GC-Breast | GCI | E6UDD | E6UDDNCF | |
| 44-(38)-Am-Prostate | Ambion | 25955 | | |
| 45-Bc-Prostate | Biochain | A609258 | | |
| 46-As-Testis | Asterand | 13071 | 19567 | 19567B1 |
| 47-As-Testis | Asterand | 19671 | 42120 | 42120A1 |
| 48-GC-Artery | GCI | 7FUUP | 7FUUPAMP | |
| 49-GC-Artery | GCI | YGTVY | YGTVYAIN | |
| 50-Th-Blood-PBMC | Tel-Hashomer | 52497 | | |
| 51-Th-Blood-PBMC | Tel-Hashomer | 31055 | | |
| 52-Th-Blood-PBMC | Tel-Hashomer | 31058 | | |
| 53-(54)-Ic-Spleen | Ichilov | CG-267 | | |
| 54-(55)-Ic-Spleen | Ichilov | 111P0106B | | |
| 55-(57)-Ic-Thymus | Ichilov | CG-98-7 | | |
| 56-(58)-Am-Thymus | Ambion | 101P0101A | | |
| 57-(60)-Bc-Thyroid | Biochain | A610287 | | |
| 58-(62)-Ic-Thyroid | Ichilov | CG-119-2 | | |
| 59-Gc-Sali gland | GCI | NNSMV | NNSMVNJC | |
| 60-(67)-Ic-Cerebellum | Ichilov | CG-183-5 | | |
| 61-(68)-Ic-Cerebellum | Ichilov | CG-212-5 | | |
| 62-(69)-Bc-Brain | Biochain | A411322 | | |
| 63-(71)-Bc-Brain | Biochain | A411079 | | |
| 64-(72)-Ic-Brain | Ichilov | CG-151-1 | | |
| 65-(44)-Bc-Heart | Biochain | A411077 | | |
| 66-(46)-Ic-Heart | Ichilov | CG-227-1 | | |
| 67-(45)-Ic-Heart | Ichilov | CG-255-9 | | |
| (Fibrotic) | | | | |
| 68-GC-Skel Mus | GCI | T8YZS | T8YZSN7O | |
| 69-GC-Skel Mus | GCI | Q3WKA | Q3WKANCJ | |
| 70-As-Skel Mus | Asterand | 8774 | 8235 | 8235G1 |
| 71-As-Skel Mus | Asterand | 8775 | 8244 | 8244A1 |
| 72-As-Skel Mus | Asterand | 10937 | 12648 | 12648C1 |
| 73-As-Skel Mus | Asterand | 6692 | 6166 | 6166A1 |

### Materials and Experimental Procedures

[0968] RNA preparation—RNA was obtained from Clontech (Franklin Lakes, N.J. USA 07417, www.clontech.com), BioChain Inst. Inc. (Hayward, Calif. 94545 USA www.biochain.com), ABS (Wilmington, Del. 19801, USA, http://www.absbioreagents.com) or Ambion (Austin, Tex. 78744 USA, http://www.ambion.com). Alternatively, RNA was generated from tissue samples using TRI-Reagent (Molecular Research Center), according to Manufacturer's instructions. Tissue and RNA samples were obtained from patients or from postmortem. Total RNA samples were treated with DNaseI (Ambion) and purified using RNeasy columns (Qiagen).

[0969] RT PCR—Purified RNA (1 μg) was mixed with 150 ng Random Hexamer primers (Invitrogen) and 500 μM dNTP in a total volume of 15.6 μl. The mixture was incubated for 5 min at 65° C. and then quickly chilled on ice. Thereafter, 5 μl of 5× SuperscriptII first strand buffer (Invitrogen), 2.4 μl 0.1M DTT and 40 units RNasin (Promega) were added, and the mixture was incubated for 10 min at 25° C., followed by further incubation at 42° C. for 2 min. Then, 1 μl (200 units) of SuperscriptII (Invitrogen) was added and the reaction (final volume of 25 μl) was incubated for 50 min at 42° C. and then inactivated at 70° C. for 15 min. The resulting cDNA was diluted 1:20 in TE buffer (10 mM Tris pH=8, 1 mM EDTA pH=8).

[0970] Real-Time RT-PCR analysis—cDNA (5 μl), prepared as described above, was used as a template in Real-Time PCR reactions using the SYBR Green I assay (PE Applied Biosystem) with specific primers and UNG Enzyme (Eurogentech or ABI or Roche). The amplification was effected as follows: 50° C. for 2 min, 95° C. for 10 min, and then 40 cycles of 95° C. for 15 sec, followed by 60° C. for 1 min. Detection was performed by using the PE Applied Biosystem SDS 7000. The cycle in which the reactions achieved a threshold level (Ct) of fluorescence was registered and was used to calculate the relative transcript quantity in the RT reactions. The relative quantity was calculated using the equation Q=efficiencŷ^{-Ct}. The efficiency of the PCR reaction was calculated from a standard curve, created by using serial dilutions of several reverse transcription (RT) reactions. To minimize inherent differences in the RT reaction, the resulting relative quantities were normalized to normalization factor calculated in one of the following methods as indicated in the text:

[0971] Method 1—the geometric mean of the relative quantities of the selected housekeeping (HSKP) genes was used as normalization factor.

[0972] Method 2—The expression of several housekeeping (HSKP) genes was checked on every panel. The relative quantity (Q) of each housekeeping gene in each sample, calculated as described above, was divided by the median quantity of this gene in all panel samples to obtain the “relative Q rel to MED”. Then, for each sample the median of the “relative Q rel to MED” of the selected housekeeping genes was calculated and served as normalization factor of this sample for further calculations. Schematic summary of quantitative real-time PCR analysis is presented in FIG. 3. As shown, the x-axis shows the cycle number. The CT=Threshold Cycle point, which is the cycle that the amplification curve crosses the fluorescence threshold that was set in the experiment. This point is a calculated cycle number in which PCR products signal is above the background level (passive dye ROX) and still in the Geometric/Exponential phase (as shown, once the level of fluorescence crosses the measurement threshold, it has a geometrically increasing phase, during which measurements are most accurate, followed by a linear phase and a plateau phase; for quantitative measurements, the latter two phases do not provide accurate measurements). The y-axis shows the normalized reporter fluorescence. It should be noted that this type of analysis provides relative quantification.

[0973] Unless defined otherwise, the normalization of the Real-Time RT-PCR analysis results described herein was carried out according to method 1 above.

[0974] The sequences of the housekeeping genes measured in all the examples on tissue testing panel were as follows:

PBGD (GenBank Accession No. BC019323)
(SEQ ID NO:1576),
PBGD Forward primer (SEQ ID NO: 529):
TGAGAGTGATTCGCGTGGG
PBGD Reverse primer (SEQ ID NO: 530):
CCAGGGTACGAGGCTTTCAAT
PBGD-amplicon (SEQ ID NO: 531):
TGAGAGTGATTCGCGTGGGTACCCGCAAGAGCCAGCTTGCTCGCATACAG
ACGGACAGTGTGGTGGCAACATTGAAAGCCTCGTACCCTGG
HPRT1 (GenBank Accession No. NM_000194)
(SEQ ID NO: 1577),
HPRT1 Forward primer (SEQ ID NO: 532):
TGACACTGGCAAAACAATGCA
HPRT1 Reverse primer (SEQ ID NO: 533):
GGTCCTTTTCACCAGCAAGCT
HPRT1-amplicon (SEQ ID NO: 612):
TGACACTGGCAAAACAATGCAGACTTTGCTTTCCTTGGTCAGGCAGTATA
ATCCAAAGATGGTCAAGGTCGCAAGCTTGCTGGTGAAAAGGACC
G6PD (GenBank Accession No. NM_000402)
(SEQ ID NO:1578)
G6PD Forward primer (SEQ ID NO: 613):
gaggccgtcaccaagaacat
G6PD Reverse primer (SEQ ID NO: 614):
ggacagccggtcagagctc
G6PD-amplicon (SEQ ID NO: 615):
gaggccgtcaccaagaacattcacgagtcctgcatgagccagataggctg
gaaccgcatcatcgtggagaagcccttcgggagggacctgcagagctctg
accggctgtcc
RPS27A (GenBank Accession No. NM_002954)
(SEQ ID NO:1579)
RPS27A Forward primer (SEQ ID NO: 642):
CTGGCAAGCAGCTGGAAGAT
RPS27A Reverse primer (SEQ ID NO:1260):
TTTCTTAGCACCACCACGAAGTC
RPS27A-amplicon (SEQ ID NO: 1261):
CTGGCAAGCAGCTGGAAGATGGACGTACTTTGTCTGACTACAATATTCAA
AAGGAGTCTACTCTTCATCTTGTGTTGAGACTTCGTGGTGGTGCTAAGAA
A

[0975] The sequences of the housekeeping genes measured in all the examples on normal tissue panel were as follows:

RPL19 (GenBank Accession No. NM_000981)
(SEQ ID NO: 1580),
RPL19 Forward primer (SEQ ID NO: 1262):
TGGCAAGAAGAAGGTCTGGTTAG
RPL19 Reverse primer (SEQ ID NO: 1263):
TGATCAGCCCATCTTTGATGAG
RPL19 amplicon (SEQ ID NO: 1264):
TGGCAAGAAGAAGGTCTGGTTAGACCCCAATGAGACCAATGAAATCGCCA
ATGCCAACTCCCGTCAGCAGATCCGGAAGCTCATCAAAGATGGGCTGATC
A
TATA box (GenBank Accession No. NM_003194)
(SEQ ID NO: 1581),
TATA box Forward primer (SEQ ID NO: 1265):
CGGTTTGCTGCGGTAATCAT
TATA box Reverse primer (SEQ ID NO: 1266):
TTTCTTGCTGCCAGTCTGGAC
TATA box amplicon (SEQ ID NO: 1267):
CGGTTTGCTGCGGTAATCATGAGGATAAGAGAGCCACGAACCACGGCACT
GATTTTCAGTTCTGGGAAAATGGTGTGCACAGGAGCCAAGAGTGAAGAAC
AGTCCAGACTGGCAGCAAGAAA
Ubiquitin (GenBank Accession No. BC000449)
(SEQ ID NO: 1582)
Uhiquitin Forward primer (SEQ ID NO: 1268):
ATTTGGGTCGCGGTTCTTG
Ubiquitin Reverse primer (SEQ ID NO: 1269):
TGCCTTGACATTCTCGATGGT
Ubiquitin amplicon (SEQ ID NO: 1270):
ATTTGGGTCGCGGTTCTTGTTTGTGGATCGCTGTGATCGTCACTTGACAA
TGCAGATCTTCGTGAAGACTCTGACTGGTAAGACCATCACCCTCGAGG T
TGAGCCCAGTGACACCATCGAGAATGTCAAGGCA
SDHA (GenBank Accession No. NM_004168)
(SEQ ID NO: 1583)
SDHA Forward primer (SEQ ID NO: 1271):
TGGGAACAAGAGGGCATCTG
SDHA Reverse primer (SEQ ID NO: 1272):
CCACCACTGCATCAAATTCATG
SDHA-amplicon (SEQ ID NO: 1273):
TGGGAACAAGAGGGCATCTGCTAAAGTTTCAGATTCCATTTCTGCTCAGT
ATCCAGTAGTGGATCATGAATTTGATGCAGTGGTGG

[0976] Oligonucleotide-Based Micro-Array Experiment Protocol—

### Microarray Fabrication

[0977] Microarrays (chips) were printed by pin deposition using the MicroGrid II MGII 600 robot from BioRobtics Limited (Cambridge, UK). 50-mer oligonucleotides target sequences were designed by Compugen Ltd (Tel-Aviv, Ill.) as described by A. Shoshan et al, “Optical technologies and informatics”, Proceedings of SPIE. Vol 4266, pp. 86-95 (2001). The designed oligonucleotides were synthesized and purified by desalting with the Sigma-Genosys system (The Woodlands, Tex., US) and all of the oligonucleotides were joined to a C6 amino-modified linker at the 5′ end, or being attached directly to CodeLink slides (Cat #25-6700-01. Amersham Bioscience, Piscataway, N.J., US). The 50-mer oligonucleotides, forming the target sequences, were first suspended in Ultra-pure DDW (Cat # 01-866-1A Kibbutz Beit-Haemek, Israel) to a concentration of 50 μM. Before printing the slides, the oligonucleotides were resuspended in 300 mM sodium phosphate (pH 8.5) to final concentration of 150 mM and printed at 35-40% relative humidity at 21° C.

[0978] Each slide contained a total of 9792 features in 32 subarrays. Of these features, 4224 features were sequences of interest according to the present invention and negative controls that were printed in duplicate. An additional 288 features (96 target sequences printed in triplicate) contained housekeeping genes from Human Evaluation Library2, Compugen Ltd, Israel. Another 384 features are E. coli spikes 1-6, which are oligos to E-Coli genes which are commercially available in the Array Control product (Array control-sense oligo spots, Ambion Inc. Austin, Tex. Cat #1781, Lot #112K06).

### Post-Coupling Processing of Printed Slides

[0979] After the spotting of the oligonucleotides to the glass (CodeLink) slides, the slides were incubated for 24 hours in a sealed saturated NaCl humidification chamber (relative humidity 70-75%).

[0980] Slides were treated for blocking of the residual reactive groups by incubating them in blocking solution at 50° C. for 15 minutes (10 ml/slide of buffer containing 0.1M Tris, 50 mM ethanolamine, 0.1% SDS). The slides were then rinsed twice with Ultra-pure DDW (double distilled water). The slides were then washed with wash solution (10 ml/slide. 4×SSC, 0.1% SDS)) at 50° C. for 30 minutes on the shaker. The slides were then rinsed twice with Ultra-pure DDW, followed by drying by centrifugation for 3 minutes at 800 rpm.

[0981] Next, in order to assist in automatic operation of the hybridization protocol, the slides were treated with Ventana Discovery hybridization station barcode adhesives. The printed slides were loaded on a Bio-Optica (Milan, Italy) hematology staining device and were incubated for 10 minutes in 50 ml of 3-Aminopropyl Triethoxysilane (Sigma A3648 lot #122K589). Excess fluid was dried and slides were then incubated for three hours in 20 mm/Hg in a dark vacuum desiccator (Pelco 2251, Ted Pella, Inc. Redding Calif.).

[0982] The following protocol was then followed with the Genisphere 900-RP (random primer), with mini elute columns on the Ventana Discovery HybStation™, to perform the microarray experiments. Briefly, the protocol was performed as described with regard to the instructions and information provided with the device itself. The protocol included cDNA synthesis and labeling. cDNA concentration was measured with the TBS-380 (Turner Biosystems. Sunnyvale, Calif.) PicoFlour, which is used with the OliGreen ssDNA Quantitation reagent and kit.

[0983] Hybridization was performed with the Ventana Hybridization device, according to the provided protocols (Discovery Hybridization Station Tuscon Ariz.).

[0984] The slides were then scanned with GenePix 4000B dual laser scanner from Axon Instruments Inc, and analyzed by GenePix Pro 5.0 software.

[0985] Schematic summary of the oligonucleotide based microarray fabrication and the experimental flow is presented in FIGS. 4 and 5.

[0986] Briefly, as shown in FIG. 4, DNA oligonucleotides at 25 uM were deposited (printed) onto Amersham ‘CodeLink’ glass slides generating a well defined ‘spot’. These slides are covered with a long-chain, hydrophilic polymer chemistry that creates an active 3-D surface that covalently binds the DNA oligonucleotides 5′-end via the C6-amine modification. This binding ensures that the full length of the DNA oligonucleotides is available for hybridization to the cDNA and also allows lower background, high sensitivity and reproducibility.

[0987] FIG. 5 shows a schematic method for performing the microarray experiments. It should be noted that stages on the left-hand or right-hand side may optionally be performed in any order, including in parallel, until stage 4 (hybridization). Briefly, on the left-hand side, the target oligonucleotides are being spotted on a glass microscope slide (although optionally other materials could be used) to form a spotted slide (stage 1). On the right hand side, control sample RNA and cancer sample RNA are Cy3 and Cy5 labeled, respectively (stage 2), to form labeled probes. It should be noted that the control and cancer samples come from corresponding tissues (for example, normal prostate tissue and cancerous prostate tissue). Furthermore, the tissue from which the RNA was taken is indicated below in the specific examples of data for particular clusters, with regard to overexpression of an oligonucleotide from a “chip” (microarray), as for example “prostate” for chips in which prostate cancerous tissue and normal tissue were tested as described above. In stage 3, the probes are mixed. In stage 4, hybridization is performed to form a processed slide. In stage 5, the slide is washed and scanned to form an image file, followed by data analysis in stage 6.

### Description for Cluster M85491

[0988] Cluster M85491 features 2 transcript(s) and 11 segment(s) of interest, the names for which are given in Tables 1 and 2, respectively, the sequences themselves are given at the end of the application. The selected protein variants are given in table 3.

TABLE 1
Transcripts of interest

| Transcript Name | SEQ ID NO: |
|---|---|
| M85491_PEA_1_T16 | 1 |
| M85491_PEA_1_T20 | 2 |

TABLE 2
Segments of interest

| Segment Name | SEQ ID NO: |
|---|---|
| M85491_PEA_1_node_0 | 89 |
| M85491_PEA_1_node_13 | 90 |
| M85491_PEA_1_node_21 | 91 |
| M85491_PEA_1_node_23 | 92 |
| M85491_PEA_1_node_24 | 93 |
| M85491_PEA_1_node_8 | 94 |
| M85491_PEA_1_node_9 | 95 |
| M85491_PEA_1_node_10 | 96 |
| M85491_PEA_1_node_18 | 97 |
| M85491_PEA_1_node_19 | 98 |
| M85491_PEA_1_node_6 | 99 |

TABLE 3
Proteins of interest

| Protein Name | SEQ ID NO: |
|---|---|
| M85491_PEA_1_P13 | 534 |
| M85491_PEA_1_P14 | 535 |

[0989] These sequences are variants of the known protein Ephrin type-B receptor 2 [precursor] (SwissProt accession identifier EPB2_HUMAN; known also according to the synonyms EC 2.7.1.112; Tyrosine-protein kinase receptor EPH-3; DRT; Receptor protein-tyrosine kinase HEK5; ERK), SEQ ID NO: 616, referred to herein as the previously known protein.

[0990] Protein Ephrin type-B receptor 2 [precursor] is known or believed to have the following function(s): Receptor for members of the ephrin-B family. The sequence for protein Ephrin type-B receptor 2 [precursor] is given at the end of the application, as “Ephrin type-B receptor 2 [precursor] amino acid sequence” (SEQ ID NO:616). Known polymorphisms for this sequence are as shown in Table 4.

TABLE 4
Amino acid mutations for Known Protein

| SNP position(s) on | |
|---|---|
| amino acid sequence | Comment |
| 671 | A -> R./FTId = VAR_004162. |
| 1-20 | MALRRLGAALLLLPLLAAVE -> |
| | MWVPVLALPVCTYA |
| 923 | E -> 22K |
| 956 | L -> 22V |
| 958 | V -> 22L |
| 154 | G -> 22D |
| 476 | K -> 22KQ |
| 495-496 | Missing |
| 532 | E -> 22D |
| 568 | R -> 22RR |
| 589 | M -> 22I |
| 788 | I -> 22F |
| 853 | S -> 22A |

[0991] Protein Ephrin type-B receptor 2 [precursor] (SEQ ID NO:616) localization is believed to be Type I membrane protein.

[0992] The following GO Annotation(s) apply to the previously known protein. The following annotation(s) were found: protein amino acid phosphorylation; transmembrane receptor protein tyrosine kinase signaling pathway; neurogenesis, which are annotation(s) related to Biological Process; protein tyrosine kinase; receptor; transmembrane-ephrin receptor; ATP binding; transferase, which are annotation(s) related to Molecular Function; and integral membrane protein, which are annotation(s) related to Cellular Component.

[0993] The GO assignment relies on information from one or more of the SwissProt/TremB1 Protein knowledgebase, available from <http://www.expasy.ch/sprot/>; or Locuslink, available from <http://www.ncbi.nlm.nih.gov/projects/LocusLink/>.

[0994] Cluster M85491 can be used as a diagnostic marker according to overexpression of transcripts of this cluster in cancer. Expression of such transcripts in normal tissues is also given according to the previously described methods. The term “number” in the left hand column of the table and the numbers on the y-axis of the figure below refer to weighted expression of ESTs in each category, as “parts per million” (ratio of the expression of ESTs for a particular cluster to the expression of all ESTs in that category, according to parts per million).

[0995] Overall, the following results were obtained as shown with regard to the histograms in FIG. 6 and Table 5. This cluster is overexpressed (at least at a minimum level) in the following pathological conditions: epithelial malignant tumors and a mixture of malignant tumors from different tissues.

TABLE 5
Normal tissue distribution

| Name of Tissue | Number |
|---|---|
| bladder | 0 |
| Bone | 0 |
| Brain | 10 |
| Colon | 31 |
| epithelial | 10 |
| general | 12 |
| Kidney | 0 |
| Liver | 0 |
| Lung | 5 |
| Breast | 8 |
| Muscle | 5 |
| Ovary | 36 |
| pancreas | 10 |
| Skin | 0 |
| stomach | 0 |

TABLE 6
P values and ratios for expression in cancerous tissue

| Name of Tissue | P1 | P2 | SP1 | R3 | SP2 | R4 |
|---|---|---|---|---|---|---|
| bladder | 5.4e−01 | 6.0e−01 | 3.2e−01 | 2.5 | 4.6e−01 | 1.9 |
| Bone | 1 | 2.8e−01 | 1 | 1.0 | 7.0e−01 | 1.8 |
| Brain | 3.4e−01 | 3.6e−01 | 1.2e−01 | 2.9 | 1.8e−02 | 2.7 |
| Colon | 3.4e−02 | 5.7e−02 | 8.2e−02 | 2.8 | 2.0e−01 | 2.1 |
| epithelial | 1.7e−03 | 3.5e−03 | 2.0e−03 | 2.8 | 1.1e−02 | 2.2 |
| general | 4.8e−04 | 5.2e−04 | 6.7e−04 | 2.3 | 1.3e−03 | 1.9 |
| Kidney | 4.3e−01 | 3.7e−01 | 1 | 1.1 | 7.0e−01 | 1.5 |
| Liver | 1 | 4.5e−01 | 1 | 1.0 | 6.9e−01 | 1.5 |
| Lung | 2.2e−01 | 2.7e−01 | 6.9e−02 | 3.6 | 3.4e−02 | 3.6 |
| Breast | 8.2e−01 | 7.3e−01 | 6.9e−01 | 1.2 | 6.8e−01 | 1.2 |
| Muscle | 9.2e−01 | 4.8e−01 | 1 | 0.8 | 1.5e−01 | 3.2 |
| Ovary | 8.5e−01 | 7.3e−01 | 9.0e−01 | 0.7 | 6.7e−01 | 1.0 |
| pancreas | 5.5e−01 | 2.0e−01 | 6.7e−01 | 1.2 | 3.5e−01 | 1.8 |
| Skin | 2.9e−01 | 4.7e−01 | 1.4e−01 | 7.0 | 6.4e−01 | 1.6 |
| stomach | 1.5e−01 | 3.2e−01 | 1 | 1.0 | 8.0e−01 | 1.3 |

[0996] As noted above, cluster M85491 features 2 transcript(s), which were listed in Table 1 above. These transcript(s) encode for protein(s) which are variant(s) of protein Ephrin type-B receptor 2 [precursor]. A description of each variant protein according to the present invention is now provided.

[0997] Variant protein M85491_PEA_{—}1_P13 (SEQ ID NO:534) according to the present invention has an amino acid sequence as given at the end of the application; it is encoded by transcript(s) M85491_PEA_{—}1_T16 (SEQ ID NO:1). An alignment is given to the known protein (Ephrin type-B receptor 2 [precursor]) at the end of the application. One or more alignments to one or more previously published protein sequences are given at the end of the application. A brief description of the relationship of the variant protein according to the present invention to each such aligned protein is as follows:

[0998] Comparison Report Between M85491_PEA_{—}1_P13 (SEQ ID NO:534) and EPB2_HUMAN (SEQ ID NO:616):

[0999] 1. An isolated chimeric polypeptide encoding for M85491_PEA_{—}1_P13 (SEQ ID NO:534), comprising a first amino acid sequence being at least 90% homologous to MALRRLGAALLLLPLLAAVEETLMDSTTATAELGWMVHPPSGWEEVSGYDENMNTIRTYQVCNVFESSQ NNWLRTKFIRRRGAHRIHVEMKFSVRDCSSIPSVPGSCKETFNLYYYEADFDSATKTFPNWMENPWVKVD TIAADESFSQVDLGGRVMKINTEVRSFGPVSRSGFYLAFQDYGGCMSLIAVRVFYRKCPRIIQNGAIFQETL SGAESTSLVAARGSCIANAEEVDVPIKLYCNGDGEWLVPIGRCMCKAGFEAVENGTVCRGCPSGTFKANQ GDEACTHCPINSRTTSEGATNCVCRNGYYRADLDPLDMPCTTIPSAPQAVISSVNETSLMLEWTPPRDSGG REDLVYNIICKSCGSGRGACTRCGDNVQYAPRQLGLTEPRIYISDLLAHTQYTFEIQAVNGVTDQSPFSPQF ASVNITTNQAAPSAVSIMHQVSRTVDSITLSWSQPDQPNGVILDYELQYYEK corresponding to amino acids 1-476 of EPB2_HUMAN (SEQ ID NO:616), which also corresponds to amino acids 1-476 of M85491_PEA_{—}1_P13 (SEQ ID NO:534), and a second amino acid sequence being at least 70%, optionally at least 80%, preferably at least 85%, more preferably at least 90% and most preferably at least 95% homologous to a polypeptide having the sequence VPIGWVLSPSPTSLRAPLPG (SEQ ID NO:1480) corresponding to amino acids 477-496 of M85491_PEA_{—}1_P13 (SEQ ID NO:534), wherein said first and second amino acid sequences are contiguous and in a sequential order.

[1000] 2. An isolated polypeptide encoding for a tail of M85491_PEA_{—}1_P13 (SEQ ID NO:534), comprising a polypeptide being at least 70%, optionally at least about 80%, preferably at least about 85%, more preferably at least about 90% and most preferably at least about 95% homologous to the sequence VPIGWVLSPSPTSLRAPLPG (SEQ ID NO:1480) in M85491_PEA_{—}1_P13 (SEQ ID NO:534).

[1001] The location of the variant protein was determined according to results from a number of different software programs and analyses, including analyses from SignalP and other specialized programs. The variant protein is believed to be located as follows with regard to the cell: secreted. The protein localization is believed to be secreted because both signal-peptide prediction programs predict that this protein has a signal peptide, and neither trans-membrane region prediction program predicts that this protein has a trans-membrane region.

[1002] Variant protein M85491_PEA_{—}1_P13 (SEQ ID NO:534) is encoded by the following transcript(s): M85491_PEA_{—}1_T16 (SEQ ID NO:1), for which the sequence(s) is/are given at the end of the application. The coding portion of transcript M85491_PEA_{—}1_T16 (SEQ ID NO:1) is shown in bold; this coding portion starts at position 143 and ends at position 1630. The transcript also has the following SNPs as listed in Table 7 (given according to their position on the nucleotide sequence, with the alternative nucleic acid listed; the last column indicates whether the SNP is known or not; the presence of known SNPs in variant protein M85491_PEA_{—}1_P13 (SEQ ID NO:534) sequence provides support for the deduced sequence of this variant protein according to the present invention).

TABLE 7
Nucleic acid SNPs

| SNP position on nucleotide | Alternative | Previously |
|---|---|---|
| sequence | nucleic acid | known SNP? |
| 799 | G -> A | Yes |
| 1066 | C -> T | Yes |
| 1519 | A -> G | Yes |
| 1872 | C -> T | Yes |
| 2044 | T -> C | Yes |
| 2156 | G -> A | Yes |
| 2606 | C -> A | Yes |
| 2637 | G -> C | Yes |

[1003] Variant protein M85491_PEA_{—}1_P14 (SEQ ID NO:535) according to the present invention has an amino acid sequence as given at the end of the application; it is encoded by transcript(s) M85491_PEA_{—}1_T20 (SEQ ID NO:2). An alignment is given to the known protein (Ephrin type-B receptor 2 [precursor]) at the end of the application. One or more alignments to one or more previously published protein sequences are given at the end of the application. A brief description of the relationship of the variant protein according to the present invention to each such aligned protein is as follows:

[1004] Comparison Report Between M85491_PEA_{—}1_P14 (SEQ ID NO:535) and EPB2_HUMAN (SEQ ID NO:616):

[1005] 1. An isolated chimeric polypeptide encoding for M85491_PEA_{—}1_P14 (SEQ ID NO:535), comprising a first amino acid sequence being at least 90% homologous to MALRRLGAALLLLPLLAAVEETLMDSTTATAELGWMVHPPSGWEEVSGYDENMNTIRTYQVCNVFESSQ NNWLRTKFIRRRGAHRIHVEMKFSVRDCSSIPSVPGSCKETFNLYYYEADFDSATKTFPNWMENPWVKVD TIAADESFSQVDLGGRVMKINTEVRSFGPVSRSGFYLAFQDYGGCMSLIAVRVFYRKCPRIIQNGAIFQETL SGAESTSLVAARGSCIANAEEVDVPIKLYCNGDGEWLVPIGRCMCKAGFEAVENGTVCR corresponding to amino acids 1-270 of EPB2_HUMAN (SEQ ID NO:616), which also corresponds to amino acids 1-270 of M85491_PEA_{—}1_P14 (SEQ ID NO:535), and a second amino acid sequence being at least 70%, optionally at least 80%, preferably at least 85%, more preferably at least 90% and most preferably at least 95% homologous to a polypeptide having the sequence ERQDLTMLSRLVLNSWPQMILPPQPPKVLEL (SEQ ID NO:1481) corresponding to amino acids 271-301 of M85491_PEA_{—}1_P14 (SEQ ID NO:535), wherein said first and second amino acid sequences are contiguous and in a sequential order.

[1006] 2. An isolated polypeptide encoding for a tail of M85491_PEA_{—}1_P14 (SEQ ID NO:535), comprising a polypeptide being at least 70%, optionally at least about 80%, preferably at least about 85%, more preferably at least about 90% and most preferably at least about 95% homologous to the sequence ERQDLTMLSRLVLNSWPQMILPPQPPKVLEL (SEQ ID NO:1481) in M85491_PEA_{—}1_P14 (SEQ ID NO:535). The location of the variant protein was determined according to results from a number of different software programs and analyses, including analyses from SignalP and other specialized programs. The variant protein is believed to be located as follows with regard to the cell: secreted. The protein localization is believed to be secreted because both signal-peptide prediction programs predict that this protein has a signal peptide, and neither trans-membrane region prediction program predicts that this protein has a trans-membrane region.

[1007] Variant protein M85491_PEA_{—}1_P14 (SEQ ID NO:535) is encoded by the following transcript(s): M85491_PEA_{—}1_T20 (SEQ ID NO:2), for which the sequence(s) is/are given at the end of the application. The coding portion of transcript M85491_PEA_{—}1_T20 (SEQ ID NO:2) is shown in bold; this coding portion starts at position 143 and ends at position 1045. The transcript also has the following SNPs as listed in Table 8 (given according to their position on the nucleotide sequence, with the alternative nucleic acid listed; the last column indicates whether the SNP is known or not; the presence of known SNPs in variant protein M85491_PEA_{—}1_P14 (SEQ ID NO:535) sequence provides support for the deduced sequence of this variant protein according to the present invention).

TABLE 8
Nucleic acid SNPs

| SNP position on nucleotide | Alternative | Previously |
|---|---|---|
| sequence | nucleic acid | known SNP? |
| 799 | G -> A | Yes |
| 1135 | T -> C | Yes |
| 1160 | T -> C | Yes |
| 1172 | A -> C | Yes |
| 1176 | T -> A | Yes |

[1008] As noted above, cluster M85491 features 11 segment(s), which were listed in Table 2 above and for which the sequence(s) are given at the end of the application. These segment(s) are portions of nucleic acid sequence(s) which are described herein separately because they are of particular interest. A description of each segment according to the present invention is now provided.

[1009] Segment cluster M85491_PEA_{—}1_node_{—}0 (SEQ ID NO:89) according to the present invention is supported by 5 libraries. The number of libraries was determined as previously described. This segment can be found in the following transcript(s): M85491_PEA_{—}1_T16 (SEQ ID NO:1) and M85491_PEA_{—}1_T20 (SEQ ID NO:2). Table 9 below describes the starting and ending position of this segment on each transcript.

TABLE 9
Segment location on transcripts

| | Segment starting | Segment ending |
|---|---|---|
| Transcript name | position | position |
| M85491_PEA_1_T16 (SEQ ID | 1 | 203 |
| NO: 1) | | |
| M85491_PEA_1_T20 (SEQ ID | 1 | 203 |
| NO: 2) | | |

[1010] Segment cluster M85491_PEA_{—}1_node_{—}13 (SEQ ID NO:90) according to the present invention is supported by 6 libraries. The number of libraries was determined as previously described. This segment can be found in the following transcript(s): M85491_PEA_{—}1_T20 (SEQ ID NO:2). Table 10 below describes the starting and ending position of this segment on each transcript.

TABLE 10
Segment location on transcripts

| | Segment starting | Segment ending |
|---|---|---|
| Transcript name | position | position |
| M85491_PEA_1_T20 (SEQ ID | 954 | 1182 |
| NO: 2) | | |

[1011] Microarray (chip) data is also available for this segment as follows. As described above with regard to the cluster itself, various oligonucleotides were tested for being differentially expressed in various disease conditions, particularly cancer. The following oligonucleotides were found to hit this segment, shown in Table 11.

TABLE 11
Oligonucleotides related to this segment

| | Overexpressed | Chip |
|---|---|---|
| Oligonucleotide name | in cancers | reference |
| M85491_0_0_25999 | colorectal cancer | Colon |
| (SEQ ID NO: 1398) | | |

[1012] Segment cluster M85491_PEA_{—}1_node_{—}21 (SEQ. ID NO:91) according to the present invention is supported by 18 libraries. The number of libraries was determined as previously described. This segment can be found in the following transcript(s): M85491_PEA_{—}1_T16 (SEQ ID NO:1). Table 12 below describes the starting and ending position of this segment on each transcript.

TABLE 12
Segment location on transcripts

| | Segment | |
|---|---|---|
| Transcript name | starting position | Segment ending position |
| M85491_PEA_1_T16 | 1110 | 1445 |
| (SEQ ID NO: 1) | | |

[1013] Segment cluster M85491_PEA_{—}1_node_{—}23 (SEQ ID NO:92) according to the present invention is supported by 18 libraries. The number of libraries was determined as previously described. This segment can be found in the following transcript(s): M85491_PEA_{—}1_T16 (SEQ ID NO:1). Table 13 below describes the starting and ending position of this segment on each transcript.

TABLE 13
Segment location on transcripts

| | Segment | |
|---|---|---|
| Transcript name | starting position | Segment ending position |
| M85491_PEA_1_T16 | 1446 | 1570 |
| (SEQ ID NO: 1) | | |

[1014] Segment cluster M85491_PEA_{—}1_node_{—}24 (SEQ ID NO:93) according to the present invention is supported by 3 libraries. The number of libraries was determined as previously described. This segment can be found in the following transcript(s): M85491_PEA_{—}1_T16 (SEQ ID NO:1). Table 14 below describes the starting and ending position of this segment on each transcript.

TABLE 14
Segment location on transcripts

| | Segment | |
|---|---|---|
| Transcript name | starting position | Segment ending position |
| M85491_PEA_1_T16 | 1571 | 2875 |
| (SEQ ID NO: 1) | | |

[1015] Segment cluster M85491_PEA_{—}1_node_{—}8 (SEQ ID NO:94) according to the present invention is supported by 25 libraries. The number of libraries was determined as previously described. This segment can be found in the following transcript(s): M85491_PEA_{—}1_T16 (SEQ ID NO:1) and M85491_PEA_{—}1_T20 (SEQ ID NO:2). Table 15 below describes the starting and ending position of this segment on each transcript.

TABLE 15
Segment location on transcripts

| | Segment | |
|---|---|---|
| | starting | Segment ending |
| Transcript name | position | position |
| M85491_PEA_1_T16 (SEQ ID NO: 1) | 269 | 672 |
| M85491_PEA_1_T20 (SEQ ID NO: 2) | 269 | 672 |

[1016] Microarray (chip) data is also available for this segment as follows. As described above with regard to the cluster itself, various oligonucleotides were tested for being differentially expressed in various disease conditions, particularly cancer. The following oligonucleotides were found to hit this segment with regard to colon cancer, shown in Table 16.

TABLE 16
Oligonucleotides related to this segment

| Oligonucleotide name | Overexpressed in cancers | Chip reference |
|---|---|---|
| M85491_0_14_0 | colorectal cancer | Colon |
| (SEQ ID NO: 1399) | | |

[1017] Segment cluster M85491_PEA_{—}1_node_{—}9 (SEQ ID NO:95) according to the present invention is supported by 20 libraries. The number of libraries was determined as previously described. This segment can be found in the following transcript(s): M85491_PEA_{—}1_T16 (SEQ ID NO:1) and M85491_PEA_{—}1_T20 (SEQ ID NO:2). Table 17 below describes the starting and ending position of this segment on each transcript.

TABLE 17
Segment location on transcripts

| | Segment | |
|---|---|---|
| | starting | Segment ending |
| Transcript name | position | position |
| M85491_PEA_1_T16 (SEQ ID NO: 1) | 673 | 856 |
| M85491_PEA_1_T20 (SEQ ID NO: 2) | 673 | 856 |

[1018] According to an optional embodiment of the present invention, short segments related to the above cluster are also provided. These segments are up to about 120 bp in length, and so are included in a separate description.

[1019] Segment cluster M85491_PEA_{—}1_node_{—}10 (SEQ ID NO:96) according to the present invention is supported by 17 libraries. The number of libraries was determined as previously described. This segment can be found in the following transcript(s): M85491_PEA_{—}1_T16 (SEQ ID NO:1) and M85491_PEA_{—}1_T20 (SEQ ID NO:2). Table 18 below describes the starting and ending position of this segment on each transcript.

TABLE 18
Segment location on transcripts

| | Segment | |
|---|---|---|
| | starting | Segment ending |
| Transcript name | position | position |
| M85491_PEA_1_T16 (SEQ ID NO: 1) | 857 | 953 |
| M85491_PEA_1_T20 (SEQ ID NO: 2) | 857 | 953 |

[1020] Segment cluster M85491_PEA_{—}1_node_{—}18 (SEQ ID NO:97) according to the present invention is supported by 15 libraries. The number of libraries was determined as previously described. This segment can be found in the following transcript(s): M85491_PEA_{—}1_T16 (SEQ ID NO:1). Table 19 below describes the starting and ending position of this segment on each transcript.

TABLE 19
Segment location on transcripts

| | Segment | |
|---|---|---|
| Transcript name | starting position | Segment ending position |
| M85491_PEA_1_T16 | 954 | 1044 |
| (SEQ ID NO: 1) | | |

[1021] Segment cluster M85491_PEA_{—}1_node_{—}19 (SEQ ID NO:98) according to the present invention is supported by 15 libraries. The number of libraries was determined as previously described. This segment can be found in the following transcript(s): M85491_PEA_{—}1_T16 (SEQ ID NO:1). Table 20 below describes the starting and ending position of this segment on each transcript.

TABLE 20
Segment location on transcripts

| | Segment | |
|---|---|---|
| Transcript name | starting position | Segment ending position |
| M85491_PEA_1_T16 | 1045 | 1109 |
| (SEQ ID NO: 1) | | |

[1022] Segment cluster M85491_PEA_{—}1_node_{—}6 (SEQ ID NO:99) according to the present invention is supported by 11 libraries. The number of libraries was determined as previously described. This segment can be found in the following transcript(s): M85491_PEA_{—}1_T16 (SEQ ID NO:1) and M85491_PEA_{—}1_T20 (SEQ ID NO:2). Table 21 below describes the starting and ending position of this segment on each transcript.

TABLE 21
Segment location on transcripts

| | Segment | |
|---|---|---|
| | starting | Segment ending |
| Transcript name | position | position |
| M85491_PEA_1_T16 (SEQ ID NO: 1) | 204 | 268 |
| M85491_PEA_1_T20 (SEQ ID NO: 2) | 204 | 268 |

### Variant Protein Alignment to the Previously Known Protein:

[chemical structure]

[chemical structure]

[chemical structure]

[chemical structure]

[chemical structure]

[chemical structure]

[chemical structure]

[chemical structure]

[chemical structure]

[chemical structure]

[chemical structure]

[chemical structure]

[chemical structure]

[chemical structure]

[chemical structure]

[chemical structure]

Expression of Ephrin Type-B Receptor 2 Precursor (EC 2.7.1.112) (Tyrosine-Protein Kinase Receptor EPH-3) M85491 Transcripts which are Detectable by Amplicon as Depicted in Sequence Name M85491Seg24 (SEQ ID NO:1276) in Normal and Cancerous Colon Tissues

[1024] Expression of Ephrin type-B receptor 2 precursor (EC 2.7.1.112) (Tyrosine-protein kinase receptor EPH-3) transcripts detectable by or according to seg24, M85491seg24 amplicon (SEQ ID NO:1276) and M85491seg24F (SEQ ID NO:1274) and M85491seg24R (SEQ ID NO:1275) primers was measured by real time PCR. In parallel the expression of four housekeeping genes —PBGD (GenBank Accession No. BC019323 (SEQ ID NO:1576); amplicon —PBGD-amplicon, SEQ ID NO:531), HPRT1 (GenBank Accession No. NM_{—}000194 (SEQ ID NO:1577); amplicon —HPRT1-amplicon, SEQ ID NO:612), G6PD (GenBank Accession No. NM_{—}000402 (SEQ ID NO:1578); G6PD amplicon, SEQ ID NO:615), and RPS27A (GenBank Accession No. NM_{—}002954 (SEQ ID NO:1579); RPS27A amplicon, SEQ ID NO:1261) was measured similarly. For each RT (RT-PCR) sample, the expression of the above amplicon was normalized to the geometric mean of the quantities of the housekeeping genes. The normalized quantity of each RT sample was then divided by the median of the quantities of the normal post-mortem (PM) samples (Sample Nos. 41, 52, 62-67, 69-71, Table 1, “Tissue samples in testing panel”, above), to obtain a value of fold up-regulation for each sample relative to median of the normal PM samples.

[1025] FIG. 7 is a histogram showing over expression of the above-indicated Ephrin type-B receptor 2 precursor (EC 2.7.1.112) (Tyrosine-protein kinase receptor EPH-3) transcripts in cancerous colon samples relative to the normal samples. Values represent the average of duplicate experiments. Error bars indicate the minimal and maximal values obtained.

[1026] As is evident from FIG. 7, the expression of Ephrin type-B receptor 2 precursor (EC 2.7.1.112) (Tyrosine-protein kinase receptor EPH-3) transcripts detectable by the above amplicon in cancer samples was significantly higher than in the non-cancerous samples (Sample Nos. 41, 52, 62-67, 69-71 Table 1, “Tissue samples in testing panel”). Notably over-expression of at least 3 fold was found in 13 out of 37 adenocarcinoma samples.

[1027] Statistical analysis was applied to verify the significance of these results, as described below.

[1028] The P value for the difference in the expression levels of Ephrin type-B receptor 2 precursor (EC 2.7.1.112) (Tyrosine-protein kinase receptor EPH-3) transcripts detectable by the above amplicon(s) in colon cancer samples versus the normal tissue samples was determined by T test as 6.83E-04 Threshold of 3 fold over expression was found to differentiate between cancer and normal samples with P value of 2.66E-02 in as checked by exact fisher test. The above values demonstrate statistical significance of the results.

[1029] Primer pairs are also optionally and preferably encompassed within the present invention; for example, for the above experiment, the following primer pair was used as a non-limiting illustrative example only of a suitable primer pair: M85491seg24F forward primer (SEQ ID NO:1274); and M85491seg24R reverse primer (SEQ ID NO:1275).

[1030] The present invention also preferably encompasses any amplicon obtained through the use of any suitable primer pair; for example, for the above experiment, the following amplicon was obtained as a non-limiting illustrative example only of a suitable amplicon: M85491seg24 (SEQ ID NO:1276).

M85491seg24F-

(SEQ ID NO: 1274)

GGCGTCTTTCTCCCTCTGAAC
M85491seg24R-

(SEQ ID NO: 1275)

GTCCCATTCTGGGTGCTGTG
M85491seg24-

(SEQ ID NO: 1276)

GGCGTCTTTCTCCCTCTGAACCTCAGTTTCCACCTGTGTCGAGTGTGGGT
GAGACCCCTCGCGGGGAGCTATGCAGGTTACGGAGAAAAGGCAGCACAGC
ACCCAGAATGGGAC

Expression of Ephrin Type-B Receptor 2 Precursor (EC 2.7.1.112) (Tyrosine-Protein Kinase Receptor EPH-3) M85491 Transcripts which are Detectable by Amplicon as Depicted in Sequence Name M85491Seg24 (SEQ. ID NO:1276) in Different Normal Tissues.
Expression of Ephrin type-B receptor 2 precursor transcripts detectable by or according to M85491 seg24 amplicon(s) (SEQ ID NO:1276) and M85491 seg24F (SEQ ID NO:1274) and M85491 seg24R (SEQ ID NO:1275) was measured by real time PCR. In parallel the expression of four housekeeping genes—RPL19 (GenBank Accession No. NM_{—}000981 (SEQ ID NO:1580); RPL19 amplicon), TATA box (GenBank Accession No. NM_{—}003194 (SEQ ID NO:1581); TATA amplicon), Ubiquitin (GenBank Accession No. BC000449 (SEQ ID NO:1582); amplicon-Ubiquitin-amplicon) and SDHA (GenBank Accession No. NM_{—}004168 (SEQ ID NO:1583); amplicon—SDHA-amplicon) was measured similarly. For each RT sample, the expression of the above amplicon was normalized to the geometric mean of the quantities of the housekeeping genes. The normalized quantity of each RT sample was then divided by the median of the quantities of the lung samples (Sample Nos. 15-17 Table 2 Tissue samples in normal panel), to obtain a value of relative expression of each sample relative to median of the lung samples.

[1031] The results are described in FIG. 8, presenting the histogram showing the expression of M85491 transcripts which are detectable by amplicon as depicted in sequence name M85491seg24 (SEQ ID NO:1276) in different normal tissues.

Forward primer (SEQ ID NO: 1274):
GGCGTCTTTCTCCCTCTGAAC
Reverse primer (SEQ ID NO: 1275):
GTCCCATTCTGGGTGCTGTG
Amplicon (SEQ ID NO: 1276):
GGCGTCTTTCTCCCTCTGAACCTCAGTTTCCACCTGTGTCGAGTGTGGGT
GAGACCCCTCGCGGGGAGCTATGCAGGTTACGGAGAAAAGGCAGCACAGC
ACCCAGAATGGGAC

### Description for Cluster T10888

[1032] Cluster T10888 features 4 transcript(s) and 8 segment(s) of interest, the names for which are given in Tables 1 and 2, respectively, the sequences themselves are given at the end of the application. The selected protein variants are given in table 3.

TABLE 1
Transcripts of interest

| Transcript Name | SEQ ID NO: |
|---|---|
| T10888_PEA_1_T1 | 3 |
| T10888_PEA_1_T4 | 4 |
| T10888_PEA_1_T5 | 5 |
| T10888_PEA_1_T6 | 6 |

TABLE 2
Segments of interest

| Segment Name | SEQ ID NO: |
|---|---|
| T10888_PEA_1_node_11 | 100 |
| T10888_PEA_1_node_12 | 101 |
| T10888_PEA_1_node_17 | 102 |
| T10888_PEA_1_node_4 | 103 |
| T10888_PEA_1_node_6 | 104 |
| T10888_PEA_1_node_7 | 105 |
| T10888_PEA_1_node_9 | 106 |
| T10888_PEA_1_node_15 | 107 |

TABLE 3
Proteins of interest

| Protein Name | SEQ ID NO: |
|---|---|
| T10888_PEA_1_P2 | 536 |
| T10888_PEA_1_P4 | 537 |
| T10888_PEA_1_P5 | 538 |
| T10888_PEA_1_P6 | 539 |

[1033] These sequences are variants of the known protein Carcinoembryonic antigen-related cell adhesion molecule 6 precursor (SwissProt accession identifier CEA6_HUMAN; known also according to the synonyms Normal cross-reacting antigen; Nonspecific crossreacting antigen; CD66c antigen), SEQ ID NO: 617, referred to herein as the previously known protein.

[1034] The sequence for protein Carcinoembryonic antigen-related cell adhesion molecule 6 precursor (SEQ ID NO:617) is given at the end of the application, as “Carcinoembryonic antigen-related cell adhesion molecule 6 precursor amino acid sequence”. Known polymorphisms for this sequence are as shown in Table 4.

TABLE 4
Amino acid mutations for Known Protein

| SNP position(s) on amino | |
|---|---|
| acid sequence | Comment |
| 138 | F -> L |
| 239 | V -> G |

[1035] Protein Carcinoembryonic antigen-related cell adhesion molecule 6 precursor (SEQ ID NO:617) localization is believed to be Attached to the membrane by a GPI-anchor.

[1036] The previously known protein also has the following indication(s) and/or potential therapeutic use(s): Cancer. It has been investigated for clinical/therapeutic use in humans, for example as a target for an antibody or small molecule, and/or as a direct therapeutic; available information related to these investigations is as follows. Potential pharmaceutically related or therapeutically related activity or activities of the previously known protein are as follows: Immunostimulant. A therapeutic role for a protein represented by the cluster has been predicted. The cluster was assigned this field because there was information in the drug database or the public databases (e.g., described herein above) that this protein, or part thereof, is used or can be used for a potential therapeutic indication: Imaging agent; Anticancer; Immunostimulant; Immunoconjugate; Monoclonal antibody, murine; Antisense therapy; antibody.

[1037] The following GO Annotation(s) apply to the previously known protein. The following annotation(s) were found: signal transduction; cell-cell signaling, which are annotation(s) related to Biological Process; and integral plasma membrane protein, which are annotation(s) related to Cellular Component.

[1038] The GO assignment relies on information from one or more of the SwissProt/TremB1 Protein knowledgebase, available from <http://www.expasy.ch/sprot/>; or Locuslink, available from <http://www.ncbi.nlm.nih.gov/projects/LocusLink/>.

[1039] Cluster T10888 can be used as a diagnostic marker according to overexpression of transcripts of this cluster in cancer. Expression of such transcripts in normal tissues is also given according to the previously described methods. The term “number” in the right hand column of the table and the numbers on the y-axis of the figure below refer to weighted expression of ESTs in each category, as “parts per million” (ratio of the expression of ESTs for a particular cluster to the expression of all ESTs in that category, according to parts per million).

[1040] Overall, the following results were obtained as shown with regard to the histograms in FIG. 9 and Table 5. This cluster is overexpressed (at least at a minimum level) in the following pathological conditions: colorectal cancer, a mixture of malignant tumors from different tissues, pancreas carcinoma and gastric carcinoma.

TABLE 5
Normal tissue distribution

| Name of Tissue | Number |
|---|---|
| bladder | 0 |
| Colon | 107 |
| epithelial | 52 |
| general | 22 |
| head and neck | 40 |
| lung | 237 |
| breast | 0 |
| pancreas | 32 |
| prostate | 12 |
| stomach | 0 |

TABLE 6
P values and ratios for expression in cancerous tissue

| Name of Tissue | P1 | P2 | SP1 | R3 | SP2 | R4 |
|---|---|---|---|---|---|---|
| bladder | 5.4e−01 | 3.4e−01 | 5.6e−01 | 1.8 | 4.6e−01 | 1.9 |
| colon | 1.2e−01 | 1.7e−01 | 2.8e−05 | 3.7 | 7.9e−04 | 2.8 |
| epithelial | 3.3e−02 | 2.1e−01 | 2.8e−20 | 2.8 | 4.8e−10 | 1.9 |
| general | 3.3e−05 | 2.2e−03 | 1.9e−44 | 4.9 | 4.6e−27 | 3.3 |
| head and neck | 4.6e−01 | 4.3e−01 | 1 | 0.8 | 7.5e−01 | 1.0 |
| lung | 7.6e−01 | 8.2e−01 | 8.9e−01 | 0.6 | 1 | 0.3 |
| breast | 3.7e−02 | 4.1e−02 | 1.5e−01 | 3.3 | 3.1e−01 | 2.4 |
| pancreas | 2.6e−01 | 2.4e−01 | 8.6e−23 | 2.8 | 1.5e−19 | 4.5 |
| prostate | 9.1e−01 | 9.3e−01 | 4.1e−02 | 1.2 | 1.0e−01 | 1.0 |
| stomach | 4.5e−02 | 5.6e−02 | 5.1e−04 | 4.1 | 4.7e−04 | 6.3 |

[1041] As noted above, cluster T10888 features 4 transcript(s), which were listed in Table 1 above. These transcript(s) encode for protein(s) which are variant(s) of protein Carcinoembryonic antigen-related cell adhesion molecule 6 precursor (SEQ ID NO:617). A description of each variant protein according to the present invention is now provided.

[1042] Variant protein T10888_PEA_{—}1_P2 (SEQ ID NO:536) according to the present invention has an amino acid sequence as given at the end of the application; it is encoded by transcript(s) T10888_PEA_{—}1_T1 (SEQ ID NO:3). An alignment is given to the known protein (Carcinoembryonic antigen-related cell adhesion molecule 6 precursor (SEQ ID NO:617)) at the end of the application. One or more alignments to one or more previously published protein sequences are given at the end of the application. A brief description of the relationship of the variant protein according to the present invention to each such aligned protein is as follows:

[1043] Comparison Report Between T10888_PEA_{—}1_P2 (SEQ ID NO:536) and CEA6_HUMAN (SEQ ID NO:617):

[1044] 1. An isolated chimeric polypeptide encoding for T10888_PEA_{—}1_P2 (SEQ ID NO:536), comprising a first amino acid sequence being at least 90% homologous to MGPPSAPPCRLHVPWKEVLLTASLLTFWNPPTTAKLTIESTPFNVAEGKEVLLLAHNLPQNRIGYSWYKGE RVDGNSLIVGYVIGTQQATPGPAYSGRETIYPNASLLIQNVTQNDTGFYTLQVIKSDLVNEEATGQFHVYP ELPKPSISSNNSNPVEDKDAVAFTCEPEVQNTTYLWWVNGQSLPVSPRLQLSNGNMTLTLLSVKRNDAGS YECEIQNPASANRSDPVTLNVLYGPDVPTISPSKANYRPGENLNLSCHAASNPPAQYSWFINGTFQQSTQEL FIPNITVNNSGSYMCQAHNSATGLNRTTVTMITVS corresponding to amino acids 1-319 of CEA6_HUMAN (SEQ ID NO:617), which also corresponds to amino acids 1-319 of T10888_PEA_{—}1_P2 (SEQ ID NO:536), and a second amino acid sequence being at least 70%, optionally at least 80%, preferably at least 85%, more preferably at least 90% and most preferably at least 95% homologous to a polypeptide having the sequence DWTRP (SEQ ID NO:1482) corresponding to amino acids 320-324 of T10888_PEA_{—}1_P2 (SEQ ID NO:536), wherein said first and second amino acid sequences are contiguous and in a sequential order.

[1045] 2. An isolated polypeptide encoding for a tail of T10888_PEA_{—}1_P2 (SEQ ID NO:536), comprising a polypeptide being at least 70%, optionally at least about 80%, preferably at least about 85%, more preferably at least about 90% and most preferably at least about 95% homologous to the sequence DWTRP (SEQ ID NO:1482) in T10888_PEA_{—}1_P2 (SEQ ID NO:536).

[1046] The location of the variant protein was determined according to results from a number of different software programs and analyses, including analyses from SignalP and other specialized programs. The variant protein is believed to be located as follows with regard to the cell: secreted. The protein localization is believed to be secreted because both signal-peptide prediction programs predict that this protein has a signal peptide, and neither trans-membrane region prediction program predicts that this protein has a trans-membrane region.

[1047] Variant protein T10888_PEA_{—}1_P2 (SEQ ID NO:536) also has the following non-silent SNPs (Single Nucleotide Polymorphisms) as listed in Table 7, (given according to their position(s) on the amino acid sequence, with the alternative amino acid(s) listed; the last column indicates whether the SNP is known or not; the presence of known SNPs in variant protein T10888_PEA_{—}1_P2 (SEQ ID NO:536) sequence provides support for the deduced sequence of this variant protein according to the present invention).

TABLE 7
Amino acid mutations

| SNP position(s) on amino | Alternative | Previously |
|---|---|---|
| acid sequence | amino acid(s) | known SNP? |
| 13 | V -> | No |
| 232 | N -> D | No |
| 324 | P -> | No |
| 63 | I -> | No |
| 92 | G -> | No |

[1048] Variant protein T10888_PEA_{—}1_P2 (SEQ ID NO:536) is encoded by the following transcript(s): T10888_PEA_{—}1_T1 (SEQ ID NO:3), for which the sequence(s) is/are given at the end of the application. The coding portion of transcript T10888_PEA_{—}1_T1 (SEQ ID NO:3) is shown in bold; this coding portion starts at position 151 and ends at position 1122. The transcript also has the following SNPs as listed in Table 8 (given according to their position on the nucleotide sequence, with the alternative nucleic acid listed; the last column indicates whether the SNP is known or not; the presence of known SNPs in variant protein T10888_PEA_{—}1_P2 (SEQ ID NO:536) sequence provides support for the deduced sequence of this variant protein according to the present invention).

TABLE 8
Nucleic acid SNPs

| SNP position on | Alternative | Previously |
|---|---|---|
| nucleotide sequence | nucleic acid | known SNP? |
| 119 | C -> T | No |
| 120 | A -> T | No |
| 1062 | A -> G | Yes |
| 1120 | C -> | No |
| 1297 | G -> T | Yes |
| 1501 | A -> G | Yes |
| 1824 | G -> A | No |
| 2036 | A -> C | No |
| 2036 | A -> G | No |
| 2095 | A -> C | No |
| 2242 | A -> C | No |
| 2245 | A -> C | No |
| 189 | C -> | No |
| 2250 | A -> T | Yes |
| 2339 | C -> A | Yes |
| 276 | G -> A | Yes |
| 338 | T -> | No |
| 424 | G -> | No |
| 546 | A -> G | No |
| 702 | C -> T | No |
| 844 | A -> G | No |
| 930 | C -> T | Yes |

[1049] Variant protein T10888_PEA_{—}1_P4 (SEQ ID NO:537) according to the present invention has an amino acid sequence as given at the end of the application; it is encoded by transcript(s) T10888_PEA_{—}1_T4 (SEQ ID NO:4). An alignment is given to the known protein (Carcinoembryonic antigen-related cell adhesion molecule 6 precursor (SEQ ID NO:617)) at the end of the application. One or more alignments to one or more previously published protein sequences are given at the end of the application. A brief description of the relationship of the variant protein according to the present invention to each such aligned protein is as follows:

[1050] Comparison Report Between T10888_PEA_{—}1_P4 (SEQ ID NO:537) and CEA6_HUMAN (SEQ ID NO:617):

[1051] 1. An isolated chimeric polypeptide encoding for T10888_PEA_{—}1_P4 (SEQ ID NO:537), comprising a first amino acid sequence being at least 90% homologous to MGPPSAPPCRLHVPWKEVLLTASLLTFWNPPTTAKLTIESTPFNVAEGKEVLLLAHNLPQNRIGYSWYKGE RVDGNSLIVGYVIGTQQATPGPAYSGRETIYPNASLLIQNVTQNDTGFYTLQVIKSDLVNEEATGQFHVYP ELPKPSISSNNSNPVEDKDAVAFTCEPEVQNTTYLWWVNGQSLPVSPRLQLSNGNMTLTLLSVKRNDAGS YECEIQNPASANRSDPVTLNVL corresponding to amino acids 1-234 of CEA6_HUMAN (SEQ ID NO:617), which also corresponds to amino acids 1-234 of T10888_PEA_{—}1_P4 (SEQ ID NO:537), and a second amino acid sequence being at least 70%, optionally at least 80%, preferably at least 85%, more preferably at least 90% and most preferably at least 95% homologous to a polypeptide having the sequence LLLSSQLWPPSASRLECWPGWL (SEQ ID NO:1483) corresponding to amino acids 235-256 of T10888_PEA_{—}1_P4 (SEQ ID NO:537), wherein said first and second amino acid sequences are contiguous and in a sequential order.

[1052] 2. An isolated polypeptide encoding for a tail of T10888_PEA_{—}1_P4 (SEQ ID NO:537) comprising a polypeptide being at least 70%, optionally at least about 80%, preferably at least about 85%, more preferably at least about 90% and most preferably at least about 95% homologous to the sequence LLLSSQLWPPSASRLECWPGWL (SEQ ID NO:1483) in T10888_PEA_{—}1_P4 (SEQ ID NO:537).

[1053] Comparison Report Between T10888_PEA_{—}1_P4 (SEQ ID NO:537) and Q13774 (SEQ ID NO:1382):

[1054] 1. An isolated chimeric polypeptide encoding for T10888_PEA_{—}1_P4 (SEQ ID NO:537), comprising a first amino acid sequence being at least 90% homologous to MGPPSAPPCRLHVPWKEVLLTASLLTFWNPPTTAKLTIESTPFNVAEGKEVLLLAHNLPQNRIGYSWYKGE RVDGNSLIVGYVIGTQQATPGPAYSGRETIYPNASLLIQNVTQNDTGFYTLQVIKSDLVNEEATGQFHVYP ELPKPSISSNNSNPVEDKDAVAFTCEPEVQNTTYLWWVNGQSLPVSPRLQLSNGNMTLTLLSVKRNDAGS YECEIQNPASANRSDPVTLNVL corresponding to amino acids 1-234 of Q13774 (SEQ ID NO:1382), which also corresponds to amino acids 1-234 of T10888_PEA_{—}1_P4 (SEQ ID NO:537), and a second amino acid sequence being at least 70%, optionally at least 80%, preferably at least 85%, more preferably at least 90% and most preferably at least 95% homologous to a polypeptide having the sequence LLLSSQLWPPSASRLECWPGWL (SEQ ID NO:1483) corresponding to amino acids 235-256 of T10888_PEA_{—}1_P4 (SEQ ID NO:537), wherein said first and second amino acid sequences are contiguous and in a sequential order.

[1055] 2. An isolated polypeptide encoding for a tail of T10888_PEA_{—}1_P4 (SEQ ID NO:537), comprising a polypeptide being at least 70%, optionally at least about 80%, preferably at least about 85%, more preferably at least about 90% and most preferably at least about 95% homologous to the sequence LLLSSQLWPPSASRLECWPGWL (SEQ ID NO:1483) in T10888_PEA_{—}1_P4 (SEQ ID NO:537).

[1056] The location of the variant protein was determined according to results from a number of different software programs and analyses, including analyses from SignalP and other specialized programs. The variant protein is believed to be located as follows with regard to the cell: secreted. The protein localization is believed to be secreted because both signal-peptide prediction programs predict that this protein has a signal peptide, and neither trans-membrane region prediction program predicts that this protein has a trans-membrane region.

[1057] Variant protein T10888_PEA_{—}1_P4 (SEQ ID NO:537) also has the following non-silent SNPs (Single Nucleotide Polymorphisms) as listed in Table 9, (given according to their position(s) on the amino acid sequence, with the alternative amino acid(s) listed; the last column indicates whether the SNP is known or not; the presence of known SNPs in variant protein T10888_PEA_{—}1_P4 (SEQ ID NO:537) sequence provides support for the deduced sequence of this variant protein according to the present invention).

TABLE 9
Amino acid mutations

| SNP position(s) on amino | Alternative | Previously |
|---|---|---|
| acid sequence | amino acid(s) | known SNP? |
| 13 | V -> | No |
| 232 | N -> D | No |
| 63 | I -> | No |
| 92 | G -> | No |

[1058] Variant protein T10888_PEA_{—}1_P4 (SEQ ID NO:537) is encoded by the following transcript(s): T10888_PEA_{—}1_T4 (SEQ ID NO:4), for which the sequence(s) is/are given at the end of the application. The coding portion of transcript T10888_PEA_{—}1_T4 (SEQ ID NO:4) is shown in bold; this coding portion starts at position 151 and ends at position 918. The transcript also has the following SNPs as listed in Table 10 (given according to their position on the nucleotide sequence, with the alternative nucleic acid listed; the last column indicates whether the SNP is known or not; the presence of known SNPs in variant protein T10888_PEA_{—}1_P4 (SEQ ID NO:537) sequence provides support for the deduced sequence of this variant protein according to the present invention).

TABLE 10
Nucleic acid SNPs

| SNP position on | Alternative | Previously |
|---|---|---|
| nucleotide sequence | nucleic acid | known SNP? |
| 119 | C -> T | No |
| 120 | A -> T | No |
| 978 | C -> | No |
| 1155 | G -> T | Yes |
| 1359 | A -> G | Yes |
| 1682 | G -> A | No |
| 1894 | A -> C | No |
| 1894 | A -> G | No |
| 1953 | A -> C | No |
| 2100 | A -> C | No |
| 2103 | A -> C | No |
| 2108 | A -> T | Yes |
| 189 | C -> | No |
| 2197 | C -> A | Yes |
| 276 | G -> A | Yes |
| 338 | T -> | No |
| 424 | G -> | No |
| 546 | A -> G | No |
| 702 | C -> T | No |
| 844 | A -> G | No |
| 958 | G -> | No |

[1059] Variant protein T10888_PEA_{—}1_P5 (SEQ ID NO:538) according to the present invention has an amino acid sequence as given at the end of the application; it is encoded by transcript(s) T10888_PEA_{—}1_T5 (SEQ ID NO:5). An alignment is given to the known protein (Carcinoembryonic antigen-related cell adhesion molecule 6 precursor (SEQ ID NO:617)) at the end of the application. One or more alignments to one or more previously published protein sequences are given at the end of the application. A brief description of the relationship of the variant protein according to the present invention to each such aligned protein is as follows:

[1060] Comparison Report Between T10888_PEA_{—}1_P5 (SEQ ID NO:538) and CEA6_HUMAN (SEQ ID NO:617):

[1061] 1. An isolated chimeric polypeptide encoding for T10888_PEA_{—}1_P5 (SEQ ID NO:538), comprising a first amino acid sequence being at least 90% homologous to MGPPSAPPCRLHVPWKEVLLTASLLTFWNPPTTAKLTIESTPFNVAEGKEVLLLAHNLPQNRIGYSWYKGE RVDGNSLIVGYVIGTQQATPGPAYSGRETIYPNASLLIQNVTQNDTGFYTLQVIKSDLVNEEATGQFHVYP ELPKPSISSNNSNPVEDKDAVAFTCEPEVQNTTYLWWVNGQSLPVSPRLQLSNGNMTLTLLSVKRNDAGS YECEIQNPASANRSDPVTLNVLYGPDVPTISPSKANYRPGENLNLSCHAASNPPAQYSWFINGTFQQSTQEL FIPNITVNNSGSYMCQAHNSATGLNRTTVTMITVSG corresponding to amino acids 1-320 of CEA6_HUMAN (SEQ ID NO:617), which also corresponds to amino acids 1-320 of T10888_PEA_{—}1_P5 (SEQ ID NO:538), and a second amino acid sequence being at least 70%, optionally at least 80%, preferably at least 85%, more preferably at least 90% and most preferably at least 95% homologous to a polypeptide having the sequence KWIHEALASHFQVESGSQRRARKKFSFPTCVQGAHANPKFSPEPSQFTSADSFPLVFLFFVVFCFLISHV (SEQ ID NO:1484) corresponding to amino acids 321-390 of T10888_PEA_{—}1_P5 (SEQ ID NO:538), wherein said first and second amino acid sequences are contiguous and in a sequential order.

[1062] 2. An isolated polypeptide encoding for a tail of T10888_PEA_{—}1_P5 (SEQ ID NO:538), comprising a polypeptide being at least 70%, optionally at least about 80%, preferably at least about 85%, more preferably at least about 90% and most preferably at least about 95% homologous to the sequence KWIHEALASHFQVESGSQRRARKKFSFPTCVQGAHANPKFSPEPSQFTSADSFPLVFLFFVVFCFLISHV (SEQ ID NO:1484) in T10888_PEA_{—}1_P5 (SEQ ID NO:538).

[1063] The location of the variant protein was determined according to results from a number of different software programs and analyses, including analyses from SignalP and other specialized programs. The variant protein is believed to be located as follows with regard to the cell: membrane. The protein localization is believed to be membrane because although both signal-peptide prediction programs agree that this protein has a signal peptide, both trans-membrane region prediction programs predict that this protein has a trans-membrane region downstream of this signal peptide.

[1064] Variant protein T10888_PEA_{—}1_P5 (SEQ ID NO:538) also has the following non-silent SNPs (Single Nucleotide Polymorphisms) as listed in Table 11, (given according to their position(s) on the amino acid sequence, with the alternative amino acid(s) listed; the last column indicates whether the SNP is known or not; the presence of known SNPs in variant protein T10888_PEA_{—}1_P5 (SEQ ID NO:538) sequence provides support for the deduced sequence of this variant protein according to the present invention).

TABLE 11
Amino acid mutations

| SNP position(s) on amino | Alternative | Previously |
|---|---|---|
| acid sequence | amino acid(s) | known SNP? |
| 13 | V -> | No |
| 232 | N -> D | No |
| 63 | I -> | No |
| 92 | G -> | No |

[1065] Variant protein T10888_PEA_{—}1_P5 (SEQ ID NO:538) is encoded by the following transcript(s): T10888_PEA_{—}1_T5 (SEQ ID NO:5), for which the sequence(s) is/are given at the end of the application. The coding portion of transcript T10888_PEA_{—}1_T5 (SEQ ID NO:5) is shown in bold; this coding portion starts at position 151 and ends at position 1320. The transcript also has the following SNPs as listed in Table 12 (given according to their position on the nucleotide sequence, with the alternative nucleic acid listed; the last column indicates whether the SNP is known or not; the presence of known SNPs in variant protein T10888_PEA_{—}1_P5 (SEQ ID NO:538) sequence provides support for the deduced sequence of this variant protein according to the present invention).

TABLE 12
Nucleic acid SNPs

| SNP position on | Alternative | Previously |
|---|---|---|
| nucleotide sequence | nucleic acid | known SNP? |
| 119 | C -> T | No |
| 120 | A -> T | No |
| 1062 | A -> G | Yes |
| 1943 | C -> A | Yes |
| 2609 | C -> T | Yes |
| 2647 | C -> G | No |
| 2701 | C -> T | Yes |
| 2841 | T -> C | Yes |
| 189 | C -> | No |
| 276 | G -> A | Yes |
| 338 | T -> | No |
| 424 | G -> | No |
| 546 | A -> G | No |
| 702 | C -> T | No |
| 844 | A -> G | No |
| 930 | C -> T | Yes |

[1066] Variant protein T10888_PEA_{—}1_P6 (SEQ ID NO:539) according to the present invention has an amino acid sequence as given at the end of the application; it is encoded by transcript(s) T10888_PEA_{—}1_T6 (SEQ ID NO:6). An alignment is given to the known protein (Carcinoembryonic antigen-related cell adhesion molecule 6 precursor (SEQ ID NO:617)) at the end of the application. One or more alignments to one or more previously published protein sequences are given at the end of the application.

[1067] Comparison Report Between T10888_PEA_{—}1_P6 (SEQ ID NO:539) and CEA6_HUMAN (SEQ ID NO:617):

[1068] 1. An isolated chimeric polypeptide encoding for T10888_PEA_{—}1_P6 (SEQ ID NO:539), comprising a first amino acid sequence being at least 90% homologous to MGPPSAPPCRLHVPWKEVLLTASLLTFWNPPTTAKLTIESTPFNVAEGKEVLLLAHNLPQNRIGYSWYKGE RVDGNSLIVGYVIGTQQATPGPAYSGRETIYPNASLLIQNVTQNDTGFYTLQVIKSDLVNEEATGQFHVY corresponding to amino acids 1-141 of CEA6_HUMAN (SEQ ID NO:617), which also corresponds to amino acids 1-141 of T10888_PEA_{—}1_P6 (SEQ ID NO:539), and a second amino acid sequence being at least 70%, optionally at least 80%, preferably at least 85%, more preferably at least 90% and most preferably at least 95% homologous to a polypeptide having the sequence REYFHMTSGCWGSVLLPTYGIVRPGLCLWPSLHYILYQGLDI (SEQ ID NO:1485) corresponding to amino acids 142-183 of T10888_PEA_{—}1_P6 (SEQ ID NO:539), wherein said first and second amino acid sequences are contiguous and in a sequential order.

[1069] 2. An isolated polypeptide encoding for a tail of T10888_PEA_{—}1_P6 (SEQ ID NO:539), comprising a polypeptide being at least 70%, optionally at least about 80%, preferably at least about 85%, more preferably at least about 90% and most preferably at least about 95% homologous to the sequence REYFHMTSGCWGSVLLPTYGIVRPGLCLWPSLHYILYQGLDI (SEQ ID NO:1485) in T10888_PEA_{—}1_P6 (SEQ ID NO:539).

[1070] The location of the variant protein was determined according to results from a number of different software programs and analyses, including analyses from SignalP and other specialized programs. The variant protein is believed to be located as follows with regard to the cell: secreted. The protein localization is believed to be secreted because both signal-peptide prediction programs predict that this protein has a signal peptide, and neither trans-membrane region prediction program predicts that this protein has a trans-membrane region.

[1071] Variant protein T10888_PEA_{—}1_P6 (SEQ ID NO:539) also has the following non-silent SNPs (Single Nucleotide Polymorphisms) as listed in Table 13, (given according to their position(s) on the amino acid sequence, with the alternative amino acid(s) listed; the last column indicates whether the SNP is known or not; the presence of known SNPs in variant protein T10888_PEA_{—}1_P6 (SEQ ID NO:539) sequence provides support for the deduced sequence of this variant protein according to the present invention).

TABLE 13
Amino acid mutations

| SNP position(s) on amino | Alternative | Previously |
|---|---|---|
| acid sequence | amino acid(s) | known SNP? |
| 13 | V -> | No |
| 63 | I -> | No |
| 92 | G -> | No |

[1072] Variant protein T10888_PEA_{—}1_P6 (SEQ ID NO:539) is encoded by the following transcript(s): T10888_PEA_{—}1_T6 (SEQ ID NO:6), for which the sequence(s) is/are given at the end of the application. The coding portion of transcript T10888_PEA_{—}1_T6 (SEQ ID NO:6) is shown in bold; this coding portion starts at position 151 and ends at position 699. The transcript also has the following SNPs as listed in Table 14 (given according to their position on the nucleotide sequence, with the alternative nucleic acid listed; the last column indicates whether the SNP is known or not; the presence of known SNPs in variant protein T10888_PEA_{—}1_P6 (SEQ ID NO:539) sequence provides support for the deduced sequence of this variant protein according to the present invention).

TABLE 14
Nucleic acid SNPs

| SNP position on | Alternative | Previously |
|---|---|---|
| nucleotide sequence | nucleic acid | known SNP? |
| 119 | C -> T | No |
| 120 | A -> T | No |
| 189 | C -> | No |
| 276 | G -> A | Yes |
| 338 | T -> | No |
| 424 | G -> | No |
| 546 | A -> G | No |

[1073] As noted above, cluster T10888 features 8 segment(s), which were listed in Table 2 above and for which the sequence(s) are given at the end of the application. These segment(s) are portions of nucleic acid sequence(s) which are described herein separately because they are of particular interest. A description of each segment according to the present invention is now provided.

[1074] Segment cluster T10888_PEA_{—}1_node_{—}11 (SEQ ID NO:100) according to the present invention is supported by 57 libraries. The number of libraries was determined as previously described. This segment can be found in the following transcript(s): T10888_PEA_{—}1_T1 (SEQ ID NO:3) and T10888_PEA_{—}1_T5 (SEQ ID NO:5). Table 15 below describes the starting and ending position of this segment on each transcript.

TABLE 15
Segment location on transcripts

| | Segment | |
|---|---|---|
| | starting | Segment |
| Transcript name | position | ending position |
| T10888_PEA_1_T1 (SEQ ID NO: 3) | 854 | 1108 |
| T10888_PEA_1_T5 (SEQ ID NO: 5) | 854 | 1108 |

[1075] Segment cluster T10888_PEA_{—}1_node_{—}12 (SEQ ID NO:101) according to the present invention is supported by 9 libraries. The number of libraries was determined as previously described. This segment can be found in the following transcript(s): T10888_PEA_{—}1_T5 (SEQ ID NO:5). Table 16 below describes the starting and ending position of this segment on each transcript.

TABLE 16
Segment location on transcripts

| | Segment | |
|---|---|---|
| | starting | Segment |
| Transcript name | position | ending position |
| T10888_PEA_1_T5 (SEQ ID NO: 5) | 1109 | 3004 |

[1076] Segment cluster T10888_PEA_{—}1_node_{—}17 (SEQ ID NO:102) according to the present invention is supported by 160 libraries. The number of libraries was determined as previously described. This segment can be found in the following transcript(s): T10888_PEA_{—}1_T1 (SEQ ID NO:3) and T10888_PEA_{—}1_T4 (SEQ ID NO:4). Table 17 below describes the starting and ending position of this segment on each transcript.

TABLE 17
Segment location on transcripts

| | Segment | |
|---|---|---|
| | starting | Segment |
| Transcript name | position | ending position |
| T10888_PEA_1_T1 (SEQ ID NO: 3) | 1109 | 2518 |
| T10888_PEA_1_T4 (SEQ ID NO: 4) | 967 | 2376 |

[1077] Segment cluster T10888_PEA_{—}1_node_{—}4 (SEQ ID NO:103) according to the present invention is supported by 61 libraries. The number of libraries was determined as previously described. This segment can be found in the following transcript(s): T10888_PEA_{—}1_T1 (SEQ ID NO:3), T10888_PEA_{—}1_T4 (SEQ ID NO:4), T10888_PEA_{—}1_T5 (SEQ ID NO:5) and T10888_PEA_{—}1_T6 (SEQ ID NO:6). Table 18 below describes the starting and ending position of this segment on each transcript.

TABLE 18
Segment location on transcripts

| | Segment | |
|---|---|---|
| | starting | Segment |
| Transcript name | position | ending position |
| T10888_PEA_1_T1 (SEQ ID NO: 3) | 1 | 214 |
| T10888_PEA_1_T4 (SEQ ID NO: 4) | 1 | 214 |
| T10888_PEA_1_T5 (SEQ ID NO: 5) | 1 | 214 |
| T10888_PEA_1_T6 (SEQ ID NO: 6) | 1 | 214 |

[1078] Segment cluster T10888_PEA_{—}1_node_{—}6 (SEQ ID NO:104) according to the present invention is supported by 81 libraries. The number of libraries was determined as previously described. This segment can be found in the following transcript(s): T10888_PEA_{—}1_T1 (SEQ ID NO:3), T10888_PEA_{—}1_T4 (SEQ ID NO:4), T10888_PEA_{—}1_T5 (SEQ ID NO:5) and T10888_PEA_{—}1_T6 (SEQ ID NO:6). Table 19 below describes the starting and ending position of this segment on each transcript.

TABLE 19
Segment location on transcripts

| | | Segment |
|---|---|---|
| | Segment | ending |
| Transcript name | starting position | position |
| T10888_PEA_1_T1 (SEQ ID NO: 3) | 215 | 574 |
| T10888_PEA_1_T4 (SEQ ID NO: 4) | 215 | 574 |
| T10888_PEA_1_T5 (SEQ ID NO: 5) | 215 | 574 |
| T10888_PEA_1_T6 (SEQ ID NO: 6) | 215 | 574 |

[1079] Segment cluster T10888_PEA_{—}1_node_{—}7 (SEQ ID NO:105) according to the present invention is supported by 4 libraries. The number of libraries was determined as previously described. This segment can be found in the following transcript(s): T10888_PEA_{—}1_T6 (SEQ ID NO:6). Table 20 below describes the starting and ending position of this segment on each transcript.

TABLE 20
Segment location on transcripts

| | | Segment |
|---|---|---|
| | Segment | ending |
| Transcript name | starting position | position |
| T10888_PEA_1_T6 (SEQ ID NO: 6) | 575 | 1410 |

[1080] Segment cluster T10888_PEA_{—}1_node_{—}9 (SEQ ID NO:106) according to the present invention is supported by 72 libraries. The number of libraries was determined as previously described. This segment can be found in the following transcript(s): T10888_PEA_{—}1_T1 (SEQ ID NO:3), T10888_PEA_{—}1_T4 (SEQ ID NO:4) and T10888_PEA_{—}1_T5 (SEQ ID NO:5). Table 21 below describes the starting and ending position of this segment on each transcript.

TABLE 21
Segment location on transcripts

| | | Segment |
|---|---|---|
| | Segment | ending |
| Transcript name | starting position | position |
| T10888_PEA_1_T1 (SEQ ID NO: 3) | 575 | 853 |
| T10888_PEA_1_T4 (SEQ ID NO: 4) | 575 | 853 |
| T10888_PEA_1_T5 (SEQ ID NO: 5) | 575 | 853 |

[1081] According to an optional embodiment of the present invention, short segments related to the above cluster are also provided. These segments are up to about 120 bp in length, and so are included in a separate description.

[1082] Segment cluster T10888_PEA_{—}1_node_{—}15 (SEQ ID NO:107) according to the present invention is supported by 39 libraries. The number of libraries was determined as previously described. This segment can be found in the following transcript(s): T10888_PEA_{—}1_T4 (SEQ ID NO:4). Table 22 below describes the starting and ending position of this segment on each transcript.

TABLE 22
Segment location on transcripts

| | | Segment |
|---|---|---|
| | Segment | ending |
| Transcript name | starting position | position |
| T10888_PEA_1_T4 (SEQ ID NO: 4) | 854 | 966 |

### Variant Protein Alignment to the Previously Known Protein:

[chemical structure]

[chemical structure]

[chemical structure]

[chemical structure]

[chemical structure]

[chemical structure]

[chemical structure]

[chemical structure]

[chemical structure]

[chemical structure]

[chemical structure]

[chemical structure]

[chemical structure]

[chemical structure]

[chemical structure]

[chemical structure]

[chemical structure]

[chemical structure]

[chemical structure]

[chemical structure]

[chemical structure]

[chemical structure]

[chemical structure]

[chemical structure]

[chemical structure]

[chemical structure]

[chemical structure]

[chemical structure]

[chemical structure]

[chemical structure]

[chemical structure]

### Expression of CEA6_HUMAN Carcinoembryonic Antigen-Related Cell Adhesion Molecule 6 (T10888)] Transcripts which are Detectable by Amplicon as Depicted in Sequence Name [T10888 junc11-17] (SEQ ID NO: 1279) in Normal and Cancerous Colon Tissues

[1084] Expression of CEA6_HUMAN Carcinoembryonic antigen-related cell adhesion molecule 6 transcripts detectable by or according to junc11-17 [node(s)/edge], T10888 junc11-17 amplicon (SEQ ID NO: 1279) and junc11-17 primers (SEQ ID NO: 1277-1278) was measured by real time PCR. In parallel the expression of four housekeeping genes —PBGD (GenBank Accession No. BC019323 (SEQ ID NO:1576); amplicon—PBGD-amplicon, SEQ ID NO:531), HPRT1 (GenBank Accession No. NM_{—}000194 (SEQ ID NO:1577); amplicon —HPRT1-amplicon, SEQ ID NO:612), G6PD (GenBank Accession No. NM_{—}000402 (SEQ ID NO:1578); G6PD amplicon, SEQ ID NO:615), and RPS27A (GenBank Accession No. NM_{—}002954 (SEQ ID NO:1579); RPS27A amplicon, SEQ ID NO:1261), was measured similarly. For each RT sample, the expression of the above amplicon was normalized to the geometric mean of the quantities of the housekeeping genes. The normalized quantity of each RT sample was then divided by the median of the quantities of the normal post-mortem (PM) samples (Sample Nos. 41, 52, 62-67, 69-71, Table 1, “Tissue samples in testing panel”, above), to obtain a value of fold up-regulation for each sample relative to median of the normal PM samples.

[1085] FIG. 10 is a histogram showing over expression of the above-indicated CEA6_HUMAN Carcinoembryonic antigen-related cell adhesion molecule 6 transcripts in cancerous colon samples relative to the normal samples. As is evident from FIG. 10, the expression of CEA6_HUMAN Carcinoembryonic antigen-related cell adhesion molecule 6 transcripts detectable by the above amplicon(s) in cancer samples was significantly higher than in the non-cancerous samples (Sample Nos. 41, 52, 62-67, 69-71, Table 1, “Tissue samples in testing panel”, above). Notably an over-expression of at least 3 fold was found in 15 out of 36 adenocarcinoma samples

[1086] Statistical analysis was applied to verify the significance of these results, as described below.

[1087] The P value for the difference in the expression levels of CEA6_HUMAN Carcinoembryonic antigen-related cell adhesion molecule 6 transcripts detectable by the above amplicon(s) in colon cancer samples versus the normal tissue samples was determined by T test as 5.36E-03.

[1088] Threshold of 3 fold overexpression was found to differentiate between cancer and normal samples with P value of 7.41E-03 as checked by exact fisher test. The above values demonstrate statistical significance of the results.

[1089] Primer pairs are also optionally and preferably encompassed within the present invention; for example, for the above experiment, the following primer pair was used as a non-limiting illustrative example only of a suitable primer pair: T10888junc11-17F forward primer (SEQ ID NO: 1277); and T10888junc11-17R reverse primer (SEQ ID NO: 1278).

[1090] The present invention also preferably encompasses any amplicon obtained through the use of any suitable primer pair; for example, for the above experiment, the following amplicon was obtained as a non-limiting illustrative example only of a suitable amplicon: T10888junc11-17 (SEQ ID NO: 1279).

Forward:-

(SEQ ID NO: 1277)

CCAGCAATCCACACAAGAGCT
Reverse-

(SEQ ID NO: 1278)

CAGGGTCTGGTCCAATCAGAG
Amplicon-

(SEQ ID NO: 1279)

CCAGCAATCCACACAAGAGCTCTTTATCCCCAACATCACTGTGAATAATA
GCGGATCCTATATGTGCCAAGCCCATAACTCAGCCACTGGCCTCAATAGG
ACCACAGTCACGATGATCACAGTCTCTGATTGGACCAGACCCTG

### Expression of CEA6_HUMAN Carcinoembryonic Antigen-Related Cell Adhesion Molecule 6 T10888 Transcripts, which are Detectable by Amplicon as Depicted in Sequence Name T10888 junc11-17 (SEQ ID NO: 1282) in Different Normal Tissues

[1091] Expression of CEA6_HUMAN Carcinoembryonic antigen-related cell adhesion molecule 6 transcripts detectable by or according to T10888 junc11-17 amplicon (SEQ ID NO: 1282) and T10888 junc11-17F (SEQ ID NO: 1280) and T10888 junc11-17R (SEQ ID NO: 1281) was measured by real time PCR. In parallel the expression of four housekeeping genes —RPL19 (GenBank Accession No. NM_{—}000981 (SEQ ID NO:1580); RPL19 amplicon, SEQ ID NO:1264), TATA box (GenBank Accession No. NM_{—}003194 (SEQ ID NO:1581); TATA amplicon, SEQ ID NO:1267), Ubiquitin (GenBank Accession No. BC000449 (SEQ ID NO:1582); amplicon—Ubiquitin-amplicon) and SDHA (GenBank Accession No. NM_{—}004168 (SEQ ID NO:1583); amplicon—SDHA-amplicon, SEQ ID NO:1273) was measured similarly. For each RT sample, the expression of the above amplicon was normalized to the geometric mean of the quantities of the housekeeping genes. The normalized quantity of each RT sample was then divided by the median of the quantities of the ovary samples (Sample Nos. 18-20 Table 2 Tissue samples in normal panel), to obtain a value of relative expression of each sample relative to median of the ovary samples.

[1092] The results are described in FIG. 11, presenting the histogram showing the expression of T10888 transcripts, which are detectable by amplicon as depicted in sequence name T10888junc11-17 (SEQ ID NO: 1282) in different normal tissues.

Forward primer (SEQ ID NO: 1280):
CCAGCAATCCACACAAGAGCT
Reverse primer (SEQ ID NO: 1281):
CAGGGTCTGGTCCAATCAGAG
Amplicon (SEQ ID NO: 1282):
CCAGCAATCCACACAAGAGCTCTTTATCCCCAACATCACTGTGAATAATA
GCGGATCCTATATGTGCCAAGCCCATAACTCAGCCACTGGCCTCAATAGG
ACCACAGTCACGATGATCACAGTCTCTGATTGGACCAGACCCTG

### Description for Cluster H14624

[1093] Cluster H14624 features 1 transcript(s) and 15 segment(s) of interest, the names for which are given in Tables 1 and 2, respectively, the sequences themselves are given at the end of the application. The selected protein variants are given in table 3.

TABLE 1
Transcripts of interest

| Transcript Name | SEQ ID NO: |
|---|---|
| H14624_T20 | 7 |

TABLE 2
Segments of interest

| Segment Name | SEQ ID NO: |
|---|---|
| H14624_node_0 | 108 |
| H14624_node_16 | 109 |
| H14624_node_3 | 110 |
| H14624_node_10 | 111 |
| H14624_node_11 | 112 |
| H14624_node_12 | 113 |
| H14624_node_13 | 114 |
| H14624_node_14 | 115 |
| H14624_node_15 | 116 |
| H14624_node_4 | 117 |
| H14624_node_5 | 118 |
| H14624_node_6 | 119 |
| H14624_node_7 | 120 |
| H14624_node_8 | 121 |
| H14624_node_9 | 122 |

TABLE 3
Proteins of interest

| Protein Name | SEQ ID NO: |
|---|---|
| H14624_P15 | 540 |

[1094] Cluster H14624 can be used as a diagnostic marker according to overexpression of transcripts of this cluster in cancer. Expression of such transcripts in normal tissues is also given according to the previously described methods. The term “number” in the left hand column of the table and the numbers on the y-axis of the figure below refer to weighted expression of ESTs in each category, as “parts per million” (ratio of the expression of ESTs for a particular cluster to the expression of all ESTs in that category, according to parts per million).

[1095] Overall, the following results were obtained as shown with regard to the histograms in FIG. 12 and Table 4. This cluster is overexpressed (at least at a minimum level) in the following pathological conditions: colorectal cancer, epithelial malignant tumors, a mixture of malignant tumors from different tissues, lung malignant tumors and pancreas carcinoma.

TABLE 4
Normal tissue distribution

| Name of Tissue | Number |
|---|---|
| adrenal | 0 |
| bladder | 410 |
| bone | 71 |
| brain | 42 |
| colon | 6 |
| epithelial | 91 |
| general | 74 |
| head and neck | 0 |
| kidney | 0 |
| lung | 30 |
| breast | 949 |
| ovary | 7 |
| pancreas | 2 |
| prostate | 94 |
| stomach | 3 |
| Thyroid | 128 |
| uterus | 54 |

TABLE 5
P values and ratios for expression in cancerous tissue

| Name of Tissue | P1 | P2 | SP1 | R3 | SP2 | R4 |
|---|---|---|---|---|---|---|
| adrenal | 4.2e−01 | 4.6^{e}−01 | 4.6e−01 | 2.2 | 5.3e−01 | 1.9 |
| bladder | 5.4e−01 | 6.0e−01 | 1.2e−02 | 1.6 | 2.2e−01 | 1.0 |
| bone | 4.9e−01 | 8.5^{e}−01 | 1.8e−01 | 1.3 | 7.5e−01 | 0.6 |
| brain | 4.7e−01 | 7.0^{e}−01 | 6.3e−05 | 2.3 | 9.4e−03 | 1.4 |
| colon | 4.4e−02 | 9.9^{e}−02 | 4.5e−03 | 5.4 | 2.0e−02 | 3.9 |
| epithelial | 7.7e−03 | 3.6e−01 | 1.5e−11 | 2.0 | 2.9e−02 | 1.1 |
| general | 5.1e−03 | 5.9^{e}−01 | 8.3e−21 | 2.2 | 1.5e−04 | 1.2 |
| head and neck | 1.4e−01 | 2.8^{e}−01 | 4.6e−01 | 2.2 | 7.5e−01 | 1.3 |
| kidney | 6.5e−01 | 7.2^{e}−01 | 5.8e−01 | 1.7 | 7.0e−01 | 1.4 |
| lung | 6.1e−02 | 1.4e−01 | 3.3e−05 | 5.8 | 8.1e−03 | 2.9 |
| breast | 2.4e−01 | 4.1e−01 | 1 | 0.3 | 1 | 0.2 |
| ovary | 8.5e−01 | 7.3^{e}−01 | 6.8e−01 | 1.2 | 1.6e−01 | 1.6 |
| pancreas | 7.5e−03 | 4.9^{e}−02 | 1.2e−21 | 22.4 | 2.4e−16 | 15.1 |
| prostate | 8.3e−01 | 8.9e−01 | 7.2e−01 | 0.8 | 8.8e−01 | 0.6 |
| stomach | 4.6e−01 | 8.5^{e}−01 | 1.0e−03 | 2.7 | 1.1e−01 | 1.4 |
| Thyroid | 7.0e−01 | 7.0^{e}−01 | 5.9e−01 | 1.0 | 5.9e−01 | 1.0 |
| uterus | 4.1e−01 | 7.3^{e}−01 | 2.3e−01 | 1.2 | 6.2e−01 | 0.7 |

[1096] As noted above, cluster H14624 features 1 transcript(s), which were listed in Table 1 above. A description of each variant protein according to the present invention is now provided.

[1097] Variant protein H14624_P15 (SEQ ID NO:540) according to the present invention has an amino acid sequence as given at the end of the application; it is encoded by transcript(s) H14624_T20 (SEQ ID NO:7). One or more alignments to one or more previously published protein sequences are given at the end of the application. A brief description of the relationship of the variant protein according to the present invention to each such aligned protein is as follows:

[1098] Comparison Report Between H14624_P15 (SEQ ID NO:540) and Q9HAP5 (SEQ ID NO:1384) (SEQ ID NO:1384):

[1099] 1. An isolated chimeric polypeptide encoding for H14624_P15 (SEQ ID NO:540), comprising a first amino acid sequence being at least 90% homologous to MLQGPGSLLLLFLASHCCLGSARGLFLFGQPDFSYKRSNCKPIPANLQLCHGIEYQNMRLPNLLGHETMKE VLEQAGAWIPLVMKQCHPDTKKFLCSLFAPVCLDDLDETIQPCHSLCVQVKDRCAPVMSAFGFPWPDML ECDRFPQDNDLCIPLASSDHLLPATEE corresponding to amino acids 1-167 of Q9HAP5 (SEQ ID NO:1384), which also corresponds to amino acids 1-167 of H14624_P15 (SEQ ID NO:540), and a second amino acid sequence being at least 70%, optionally at least 80%, preferably at least 85%, more preferably at least 90% and most preferably at least 95% homologous to a polypeptide having the sequence GKPSLLLPHSLLG (SEQ ID NO:1486) corresponding to amino acids 168-180 of H14624_P15 (SEQ ID NO:540), wherein said first and second amino acid sequences are contiguous and in a sequential order.

[1100] 2. An isolated polypeptide encoding for a tail of H14624_P15 (SEQ ID NO:540), comprising a polypeptide being at least 70%, optionally at least about 80%, preferably at least about 85%, more preferably at least about 90% and most preferably at least about 95% homologous to the sequence GKPSLLLPHSLLG (SEQ ID NO:1486) in H14624_P15 (SEQ ID NO:540).

[1101] The location of the variant protein was determined according to results from a number of different software programs and analyses, including analyses from SignalP and other specialized programs. The variant protein is believed to be located as follows with regard to the cell: secreted. The protein localization is believed to be secreted because both signal-peptide prediction programs predict that this protein has a signal peptide, and neither trans-membrane region prediction program predicts that this protein has a trans-membrane region.

[1102] Variant protein H14624_P15 (SEQ ID NO:540) also has the following non-silent SNPs (Single Nucleotide Polymorphisms) as listed in Table 6, (given according to their position(s) on the amino acid sequence, with the alternative amino acid(s) listed; the last column indicates whether the SNP is known or not; the presence of known SNPs in variant protein H14624_P15 (SEQ ID NO:540) sequence provides support for the deduced sequence of this variant protein according to the present invention).

TABLE 6
Amino acid mutations

| SNP position(s) on | Alternative | Previously |
|---|---|---|
| amino acid sequence | amino acid(s) | known SNP? |
| 11 | L -> | No |
| 170 | P -> S | Yes |
| 28 | F -> | No |
| 29 | G -> | No |
| 38 | S -> | No |
| 45 | A -> V | Yes |
| 60 | L -> | No |

[1103] Variant protein H14624_P15 (SEQ ID NO:540) is encoded by the following transcript(s): H14624_T20 (SEQ ID NO:7), for which the sequence(s) is/are given at the end of the application. The coding portion of transcript H14624_T20 (SEQ ID NO:7) is shown in bold; this coding portion starts at position 857 and ends at position 1396. The transcript also has the following SNPs as listed in Table 7 (given according to their position on the nucleotide sequence, with the alternative nucleic acid listed; the last column indicates whether the SNP is known or not; the presence of known SNPs in variant protein H14624_P15 (SEQ ID NO:540) sequence provides support for the deduced sequence of this variant protein according to the present invention).

TABLE 7
Nucleic acid SNPs

| SNP position on | Alternative | Previously |
|---|---|---|
| nucleotide sequence | nucleic acid | known SNP? |
| 389 | A -> G | No |
| 476 | C -> T | No |
| 969 | G -> | No |
| 988 | G -> T | Yes |
| 990 | C -> T | Yes |
| 1034 | C -> | No |
| 1168 | C -> T | Yes |
| 1364 | C -> T | Yes |
| 488 | T -> C | No |
| 819 | C -> G | Yes |
| 851 | C -> | No |
| 887 | C -> | No |
| 922 | G -> A | Yes |
| 934 | C -> T | Yes |
| 938 | T -> | No |
| 943 | C -> | No |

[1104] As noted above, cluster H14624 features 15 segment(s), which were listed in Table 2 above and for which the sequence(s) are given at the end of the application. These segment(s) are portions of nucleic acid sequence(s) which are described herein separately because they are of particular interest. A description of each segment according to the present invention is now provided.

[1105] Segment cluster H14624_node_{—}0 (SEQ ID NO:108) according to the present invention is supported by 3 libraries. The number of libraries was determined as previously described. This segment can be found in the following transcript(s): H14624_T20 (SEQ ID NO:7). Table 8 below describes the starting and ending position of this segment on each transcript.

TABLE 8
Segment location on transcripts

| | Segment | Segment |
|---|---|---|
| Transcript name | starting position | ending position |
| H14624_T20 (SEQ ID NO: 7) | 1 | 573 |

[1106] Segment cluster H14624_node_{—}16 (SEQ ID NO:109) according to the present invention is supported by 3 libraries. The number of libraries was determined as previously described. This segment can be found in the following transcript(s): H14624_T20 (SEQ ID NO:7). Table 9 below describes the starting and ending position of this segment on each transcript.

TABLE 9
Segment location on transcripts

| | Segment | Segment |
|---|---|---|
| Transcript name | starting position | ending position |
| H14624_T20 (SEQ ID NO: 7) | 1359 | 1745 |

[1107] Segment cluster H14624_node_{—}3 (SEQ ID NO:110) according to the present invention is supported by 67 libraries. The number of libraries was determined as previously described. This segment can be found in the following transcript(s): H14624_T20 (SEQ ID NO:7). Table 10 below describes the starting and ending position of this segment on each transcript.

TABLE 10
Segment location on transcripts

| | Segment | Segment |
|---|---|---|
| Transcript name | starting position | ending position |
| H14624_T20 (SEQ ID NO: 7) | 574 | 822 |

[1108] According to an optional embodiment of the present invention, short segments related to the above cluster are also provided. These segments are up to about 120 bp in length, and so are included in a separate description.

[1109] Segment cluster H14624_node_{—}10 (SEQ ID NO:111) according to the present invention can be found in the following transcript(s): H14624_T20 (SEQ ID NO:7). Table 11 below describes the starting and ending position of this segment on each transcript.

TABLE 11
Segment location on transcripts

| | Segment | Segment |
|---|---|---|
| Transcript name | starting position | ending position |
| H14624_T20 (SEQ ID NO: 7) | 1070 | 1079 |

[1110] Segment cluster H14624_node_{—}11 (SEQ ID NO:112) according to the present invention is supported by 99 libraries. The number of libraries was determined as previously described. This segment can be found in the following transcript(s): H14624_T20 (SEQ ID NO:7). Table 12 below describes the starting and ending position of this segment on each transcript.

TABLE 12
Segment location on transcripts

| | Segment | Segment |
|---|---|---|
| Transcript name | starting position | ending position |
| H14624_T20 (SEQ ID NO: 7) | 1080 | 1114 |

[1111] Segment cluster H14624_node_{—}12 (SEQ ID NO:113) according to the present invention can be found in the following transcript(s): H14624_T20 (SEQ ID NO:7). Table 13 below describes the starting and ending position of this segment on each transcript.

TABLE 13
Segment location on transcripts

| | Segment | Segment |
|---|---|---|
| Transcript name | starting position | ending position |
| H14624_T20 (SEQ ID NO: 7) | 1115 | 1135 |

[1112] Segment cluster H14624_node_{—}13 (SEQ ID NO:114) according to the present invention is supported by 124 libraries. The number of libraries was determined as previously described. This segment can be found in the following transcript(s): H14624_T20 (SEQ ID NO:7). Table 14 below describes the starting and ending position of this segment on each transcript.

TABLE 14
Segment location on transcripts

| | Segment | Segment |
|---|---|---|
| Transcript name | starting position | ending position |
| H14624_T20 (SEQ ID NO: 7) | 1136 | 1227 |

[1113] Segment cluster H14624_node_{—}14 (SEQ ID NO:115) according to the present invention is supported by 114 libraries. The number of libraries was determined as previously described. This segment can be found in the following transcript(s): H14624_T20 (SEQ ID NO:7). Table 15 below describes the starting and ending position of this segment on each transcript.

TABLE 15
Segment location on transcripts

| | Segment | Segment |
|---|---|---|
| Transcript name | starting position | ending position |
| H14624_T20 (SEQ ID NO: 7) | 1228 | 1287 |

[1114] Segment cluster H14624_node_{—}15 (SEQ ID NO:115) according to the present invention is supported by 124 libraries. The number of libraries was determined as previously described. This segment can be found in the following transcript(s): H14624_T20 (SEQ ID NO:7). Table 16 below describes the starting and ending position of this segment on each transcript.

TABLE 16
Segment location on transcripts

| | Segment | Segment |
|---|---|---|
| Transcript name | starting position | ending position |
| H14624_T20 (SEQ ID NO: 7) | 1288 | 1358 |

[1115] Segment cluster H14624_node_{—}4 (SEQ ID NO:117) according to the present invention is supported by 65 libraries. The number of libraries was determined as previously described. This segment can be found in the following transcript(s): H14624_T20 (SEQ ID NO:7). Table 17 below describes the starting and ending position of this segment on each transcript.

TABLE 17
Segment location on transcripts

| | Segment | Segment |
|---|---|---|
| Transcript name | starting position | ending position |
| H14624_T20 (SEQ ID NO: 7) | 823 | 892 |

[1116] Segment cluster H14624_node_{—}5 (SEQ ID NO:118) according to the present invention can be found in the following transcript(s): H14624_T20 (SEQ ID NO:7). Table 18 below describes the starting and ending position of this segment on each transcript.

TABLE 18
Segment location on transcripts

| | Segment | Segment |
|---|---|---|
| Transcript name | starting position | ending position |
| H14624_T20 (SEQ ID NO: 7) | 893 | 903 |

[1117] Segment cluster H14624_node_{—}6 (SEQ ID NO:119) according to the present invention can be found in the following transcript(s): H14624_T20 (SEQ ID NO:7). Table 19 below describes the starting and ending position of this segment on each transcript.

TABLE 19
Segment location on transcripts

| | Segment | Segment |
|---|---|---|
| Transcript name | starting position | ending position |
| H14624_T20 (SEQ ID NO: 7) | 904 | 927 |

[1118] Segment cluster H14624_node_{—}7 (SEQ ID NO:120) according to the present invention can be found in the following transcript(s): H14624_T20 (SEQ ID NO:7). Table 20 below describes the starting and ending position of this segment on each transcript.

TABLE 20
Segment location on transcripts

| | Segment | Segment |
|---|---|---|
| Transcript name | starting position | ending position |
| H14624_T20 (SEQ ID NO: 7) | 928 | 934 |

[1119] Segment cluster H14624_node_{—}8 (SEQ ID NO:121) according to the present invention is supported by 85 libraries. The number of libraries was determined as previously described. This segment can be found in the following transcript(s): H14624_T20 (SEQ ID NO:7). Table 21 below describes the starting and ending position of this segment on each transcript.

TABLE 21
Segment location on transcripts

| | Segment | Segment |
|---|---|---|
| Transcript name | starting position | ending position |
| H14624_T20 (SEQ ID NO: 7) | 935 | 1014 |

[1120] Segment cluster H14624_node_{—}9 (SEQ ID NO:122) according to the present invention is supported by 87 libraries. The number of libraries was determined as previously described. This segment can be found in the following transcript(s): H14624_T20 (SEQ ID NO:7). Table 22 below describes the starting and ending position of this segment on each transcript.

TABLE 22
Segment location on transcripts

| | Segment | Segment |
|---|---|---|
| Transcript name | starting position | ending position |
| H14624_T20 (SEQ ID NO: 7) | 1015 | 1069 |

### Variant Protein Alignment to the Previously Known Protein:

[chemical structure]

[chemical structure]

[chemical structure]

[chemical structure]

### Description for Cluster H53626

[1122] Cluster H53626 features 2 transcript(s) and 20 segment(s) of interest, the names for which are given in Tables 1 and 2, respectively, the sequences themselves are given at the end of the application. The selected protein variants are given in table 3.

TABLE 1
Transcripts of interest

| Transcript Name | SEQ ID NO: |
|---|---|
| H53626_PEA_1_T15 | 8 |
| H53626_PEA_1_T16 | 9 |

TABLE 2
Segments of interest

| Segment Name | SEQ ID NO: |
|---|---|
| H53626_PEA_1_node_15 | 123 |
| H53626_PEA_1_node_22 | 124 |
| H53626_PEA_1_node_25 | 125 |
| H53626_PEA_1_node_26 | 126 |
| H53626_PEA_1_node_27 | 127 |
| H53626_PEA_1_node_34 | 128 |
| H53626_PEA_1_node_35 | 129 |
| H53626_PEA_1_node_36 | 130 |
| H53626_PEA_1_node_11 | 131 |
| H53626_PEA_1_node_12 | 132 |
| H53626_PEA_1_node_16 | 133 |
| H53626_PEA_1_node_19 | 134 |
| H53626_PEA_1_node_20 | 135 |
| H53626_PEA_1_node_24 | 136 |
| H53626_PEA_1_node_28 | 137 |
| H53626_PEA_1_node_29 | 138 |
| H53626_PEA_1_node_30 | 139 |
| H53626_PEA_1_node_31 | 140 |
| H53626_PEA_1_node_32 | 141 |
| H53626_PEA_1_node_33 | 142 |

TABLE 3
Proteins of interest

| Protein Name | SEQ ID NO: |
|---|---|
| H53626_PEA_1_P4 | 541 |
| H53626_PEA_1_P5 | 542 |

[1123] Cluster H53626 can be used as a diagnostic marker according to overexpression of transcripts of this cluster in cancer. Expression of such transcripts in normal tissues is also given according to the previously described methods. The term “number” in the left hand column of the table and the numbers on the y-axis of the figure below refer to weighted expression of ESTs in each category, as “parts per million” (ratio of the expression of ESTs for a particular cluster to the expression of all ESTs in that category, according to parts per million).

[1124] Overall, the following results were obtained as shown with regard to the histograms in FIG. 13 and Table 4. This cluster is overexpressed (at least at a minimum level) in the following pathological conditions: epithelial malignant tumors, a mixture of malignant tumors from different tissues and myosarcoma.

TABLE 4
Normal tissue distribution

| Name of Tissue | Number |
|---|---|
| Adrenal | 4 |
| Bone | 239 |
| Brain | 39 |
| Colon | 0 |
| Epithelial | 12 |
| General | 18 |
| head and neck | 0 |
| Kidney | 8 |
| Lung | 26 |
| Breast | 8 |
| Muscle | 0 |
| Ovary | 7 |
| Pancreas | 10 |
| Prostate | 8 |
| Skin | 0 |
| Stomach | 73 |
| Thyroid | 0 |
| Uterus | 0 |

TABLE 5
P values and ratios for expression in cancerous tissue

| Name of Tissue | P1 | P2 | SP1 | R3 | SP2 | R4 |
|---|---|---|---|---|---|---|
| adrenal | 6.4^{e}−01 | 4.2e−01 | 2.1e−01 | 3.1 | 1.3e−02 | 4.1 |
| bone | 5.8^{e}−01 | 8.1e−01 | 9.8e−01 | 0.3 | 1 | 0.3 |
| Brain | 2.8^{e}−01 | 3.3e−01 | 8.7e−01 | 0.7 | 9.4e−01 | 0.5 |
| Colon | 2.3^{e}−01 | 1.4e−01 | 1 | 1.2 | 4.6e−01 | 1.9 |
| epithelial | 7.2^{e}−02 | 3.7e−03 | 5.8e−02 | 1.6 | 1.4e−08 | 4.3 |
| general | 2.7e−03 | 1.8e−05 | 7.8e−04 | 1.6 | 8.2e−13 | 3.0 |
| Head and neck | 2.1^{e}−01 | 3.3e−01 | 0.0e+00 | 0.0 | 0.0e+00 | 0.0 |
| Kidney | 7.3e−01 | 5.8e−01 | 5.8e−01 | 1.3 | 4.0e−02 | 2.0 |
| lung | 8.4e−01 | 5.8e−01 | 7.9e−01 | 0.8 | 3.7e−02 | 2.0 |
| Breast | 6.5^{e}−01 | 2.7e−01 | 6.9e−01 | 1.2 | 7.8e−02 | 1.9 |
| Muscle | 1 | 2.9e−01 | 1 | 1.0 | 3.5e−03 | 4.1 |
| Ovary | 6.7e−01 | 5.6e−01 | 1.5e−01 | 1.7 | 7.0e−02 | 2.7 |
| pancreas | 2.3e−01 | 2.0e−01 | 3.9e−01 | 1.9 | 8.2e−02 | 2.3 |
| prostate | 9.0^{e}−01 | 9.0e−01 | 6.7e−01 | 1.1 | 1.3e−01 | 1.9 |
| skin | 1 | 4.4e−01 | 1 | 1.0 | 4.1e−01 | 2.1 |
| stomach | 9.0^{e}−01 | 3.4e−01 | 1 | 0.3 | 6.1e−01 | 0.9 |
| Thyroid | 2.4e−01 | 2.4e−01 | 1 | 1.1 | 1 | 1.1 |
| Uterus | 2.1^{e}−01 | 2.4e−01 | 2.9e−01 | 2.5 | 2.6e−01 | 2.2 |

[1125] As noted above, cluster H53626 features 2 transcript(s), which were listed in Table 1 above. A description of each variant protein according to the present invention is now provided.

[1126] Variant protein H53626_PEA_{—}1_P4 (SEQ ID NO:541) according to the present invention has an amino acid sequence as given at the end of the application; it is encoded by transcript(s) H53626_PEA_{—}1_T15 (SEQ ID NO:8). One or more alignments to one or more previously published protein sequences are given at the end of the application. A brief description of the relationship of the variant protein according to the present invention to each such aligned protein is as follows:

### Comparison Report Between H53626_PEA_{—}1_P4 (SEQ ID NO:541) and Q8N441 (SEQ ID NO:1385):

[1127] 1. An isolated chimeric polypeptide encoding for H53626_PEA_{—}1_P4 (SEQ ID NO:541), comprising a first amino acid sequence being at least 90% homologous to MTPSPLLLLLLPPLLLGAFPPAAAARGPPKMADKVVPRQVARLGRTVRLQCPVEGDPPPLTMWTKDGRTI HSGWSRFRVLPQGLKVKQVEREDAGVYVCKATNGFGSLSVNYTLVVLDDISPGKESLGPDSSSGGQEDPA SQQWARPRFTQPSKMRRRVIARPVGSSVRLKCVASGHPRPDITWMKDDQALTRPEAAEPRKKKWTLSLK NLRPEDSGKYTCRVSNRAGAINATYKVDVIQRTRSKPVLTGTHPVNTTVDFGGTTSFQCKVRSDVKPVIQ WLKRVEYGAEGRHNSTIDVGGQKFVVLPTGDVWSRPDGSYLNKLLITRARQDDAGMYICLGANTMGYSF RSAFLTVLP corresponding to amino acids 1-357 of Q8N441 (SEQ ID NO:1385), which also corresponds to amino acids 1-357 of H53626_PEA_{—}1_P4 (SEQ ID NO:541), second amino acid sequence being at least 70%, optionally at least 80%, preferably at least 85%, more preferably at least 90% and most preferably at least 95% homologous to a polypeptide having the sequence GARLPRHATPCWCPDPPPGPGVPPTGWGPTLPSRAVLARSSAEGGQPRGTVSTAPGMGLGCSPGLCVGVP LPTSFPLALA (SEQ ID NO:1487) corresponding to amino acids 358-437 of H53626_PEA_{—}1_P4 (SEQ ID NO:541), and a third amino acid sequence being at least 90% homologous to DPKPPGPPVASSSSATSLPWPVVIGIPAGAVFILGTLLLWLCQAQKKPCTPAPAPPLPGHRPPGTARDRSGD KDLPSLAALSAGPGVGLCEEHGSPAAPQHLLGPGPVAGPKLYPKLYTDIHTHTHTHSHTHSHVEGKVHQH IHYQC corresponding to amino acids 358-504 of Q8N441 (SEQ ID NO:1385), which also corresponds to amino acids 438-584 of H53626_PEA_{—}1_P4 (SEQ ID NO:541), wherein said first, second and third amino acid sequences are contiguous and in a sequential order.

[1128] 2. An isolated polypeptide encoding for an edge portion of H53626_PEA_{—}1_P4 (SEQ ID NO:541) comprising an amino acid sequence being at least 70%, optionally at least about 80%, preferably at least about 85%, more preferably at least about 90% and most preferably at least about 95% homologous to the sequence encoding for GARLPRHATPCWCPDPPPGPGVPPTGWGPTLPSRAVLARSSAEGGQPRGTVSTAPGMGLGCSPGLCVGVP LPTSFPLALA (SEQ ID NO:1487), corresponding to H53626_PEA_{—}1_P4 (SEQ ID NO:541).

[1129] The location of the variant protein was determined according to results from a number of different software programs and analyses, including analyses from SignalP and other specialized programs. The variant protein is believed to be located as follows with regard to the cell: membrane. The protein localization is believed to be membrane because although both signal-peptide prediction programs agree that this protein has a signal peptide, both trans-membrane region prediction programs predict that this protein has a trans-membrane region downstream of this signal peptide.

[1130] Variant protein H53626_PEA_{—}1_P4 (SEQ ID NO:541) also has the following non-silent SNPs (Single Nucleotide Polymorphisms) as listed in Table 6, (given according to their position(s) on the amino acid sequence, with the alternative amino acid(s) listed; the last column indicates whether the SNP is known or not; the presence of known SNPs in variant protein H53626_PEA_{—}1_P4 (SEQ ID NO:541) sequence provides support for the deduced sequence of this variant protein according to the present invention).

TABLE 6
Amino acid mutations

| SNP position(s) on amino acid | Alternative | |
|---|---|---|
| sequence | amino acid(s) | Previously known SNP? |
| 193 | R -> L | Yes |
| 300 | G -> | No |
| 319 | Y -> H | No |
| 442 | P -> Q | Yes |
| 504 | R -> L | Yes |
| 521 | G -> | No |
| 544 | P -> L | Yes |
| 573 | E -> G | No |

[1131] Variant protein H53626_PEA_{—}1_P4 (SEQ ID NO:541) is encoded by the following transcript(s): H53626_PEA_{—}1_T15 (SEQ ID NO:8), for which the sequence(s) is/are given at the end of the application. The coding portion of transcript H53626_PEA_{—}1_T15 (SEQ ID NO:8) is shown in bold; this coding portion starts at position 17 and ends at position 1768. The transcript also has the following SNPs as listed in Table 7 (given according to their position on the nucleotide sequence, with the alternative nucleic acid listed; the last column indicates whether the SNP is known or not; the presence of known SNPs in variant protein H53626_PEA_{—}1_P4 (SEQ ID NO:541) sequence provides support for the deduced sequence of this variant protein according to the present invention).

TABLE 7
Nucleic acid SNPs

| SNP position on | Alternative | Previously |
|---|---|---|
| nucleotide sequence | nucleic acid | known SNP? |
| 76 | G -> A | Yes |
| 340 | G -> T | No |
| 1647 | C -> T | Yes |
| 1734 | A -> G | No |
| 1797 | G -> | No |
| 1948 | A -> G | Yes |
| 2193 | C -> T | Yes |
| 2308 | C -> T | Yes |
| 2333 | C -> G | Yes |
| 2648 | C -> T | Yes |
| 2649 | G -> A | Yes |
| 2765 | C -> T | Yes |
| 594 | G -> T | Yes |
| 2972 | G -> A | Yes |
| 3027 | C -> G | Yes |
| 907 | T -> C | Yes |
| 916 | C -> | No |
| 971 | T -> C | No |
| 1135 | G -> A | Yes |
| 1341 | C -> A | Yes |
| 1527 | G -> T | Yes |
| 1579 | C -> | No |

[1132] Variant protein H53626_PEA_{—}1_P5 (SEQ ID NO:542) according to the present invention has an amino acid sequence as given at the end of the application; it is encoded by transcript(s) H53626_PEA_{—}1_T16 (SEQ ID NO:9). One or more alignments to one or more previously published protein sequences are given at the end of the application. A brief description of the relationship of the variant protein according to the present invention to each such aligned protein is as follows:

[1133] Comparison Report Between H53626_PEA_{—}1_P5 (SEQ ID NO:542) and Q9H4D7 (SEQ ID NO:1386):

[1134] 1. An isolated chimeric polypeptide encoding for H53626_PEA_{—}1_P5 (SEQ ID NO:542), comprising a first amino acid sequence being at least 90% homologous to MTPSPLLLLLLPPLLLGAFPPAAAARGPPKMADKVVPRQVARLGRTVRLQCPVEGDPPPLTMWTKDGRTI HSGWSRFRVLPQGLKVKQVEREDAGVYVCKATNGFGSLSVNYTLVVLDDISPGKESLGPDSSSGGQEDPA SQQWARPRFTQPSKMRRRVIARPVGSSVRLKCVASGHPRPDITWMKDDQALTRPEAAEPRKKKWTLSLK NLRPEDSGKYTCRVSNRAGAINATYKVDVIQRTRSKPVLTGTHPVNTTVDFGGTTSFQCK corresponding to amino acids 1-269 of Q9H4D7 (SEQ ID NO:1386), which also corresponds to amino acids 1-269 of H53626_PEA_{—}1_P5 (SEQ ID NO:542), and a second amino acid sequence being at least 70%, optionally at least 80%, preferably at least 85%, more preferably at least 90% and most preferably at least 95% homologous to a polypeptide having the sequence TQNRQGHLWPPRPRPLACRGPWSSASQPALSSSWAPCSCGFARPRRSRAPPRLPLPCLGTARRGRPATAAE TRTFPRWPPSALALVWGCVRSMGLRQPPSTYWAQAQLLALSCTPNSTQTSTHTHTHTLTHTHTWRARSTS TSTISARRHRICSGHGGAGQTGRLGGWRTELQTKAGDPWRGGMASTPGSLCVRHSPWTHTHRHTHYLDA CMHTHARTRAP (SEQ ID NO:1488) corresponding to amino acids 270-490 of H53626_PEA_{—}1_P5 (SEQ ID NO:542), wherein said first and second amino acid sequences are contiguous and in a sequential order.

[1135] 2. An isolated polypeptide encoding for a tail of H53626_PEA_{—}1_P5 (SEQ ID NO:542), comprising a polypeptide being at least 70%, optionally at least about 80%, preferably at least about 85%, more preferably at least about 90% and most preferably at least about 95% homologous to the sequence TQNRQGHLWPPRPRPLACRGPWSSASQPALSSSWAPCSCGFARPRRSRAPPRLPLPCLGTARRGRPATAAE TRTFPRWPPSALALVWGCVRSMGLRQPPSTYWAQAQLLALSCTPNSTQTSTHTHTHTLTHTHTWRARSTS TSTISARRHRICSGHGGAGQTGRLGGWRTELQTKAGDPWRGGMASTPGSLCVRHSPWTHTHRHTHYLDA CMHTHARTRAP (SEQ ID NO:1488) in H53626_PEA_{—}1_P5 (SEQ ID NO:542).

[1136] Comparison Report Between H53626_PEA_{—}1_P5 (SEQ ID NO:542) and Q8N441 (SEQ ID NO:1385):

[1137] 1. An isolated chimeric polypeptide encoding for H53626_PEA_{—}1_P5 (SEQ ID NO:542), comprising a first amino acid sequence being at least 90% homologous to MTPSPLLLLLLPPLLLGAFPPAAAARGPPKMADKVVPRQVARLGRTVRLQCPVEGDPPPLTMWTKDGRTI HSGWSRFRVLPQGLKVKQVEREDAGVYVCKATNGFGSLSVNYTLVVLDDISPGKESLGPDSSSGGQEDPA SQQWARPRFTQPSKMRRRVIARPVGSSVRLKCVASGHPRPDITWMKDDQALTRPEAAEPRKKKWTLSLK NLRPEDSGKYTCRVSNRAGAINATYKVDVIQRTRSKPVLTGTHPVNTTVDFGGTTSFQCK corresponding to amino acids 1-269 of Q8N441 (SEQ ID NO:1385), which also corresponds to amino acids 1-269 of H53626_PEA_{—}1_P5 (SEQ ID NO:542), and a second amino acid sequence being at least 70%, optionally at least 80%, preferably at least 85%, more preferably at least 90% and most preferably at least 95% homologous to a polypeptide having the sequence TQNRQGHLWPPRPRPLACRGPWSSASQPALSSSWAPCSCGFARPRRSRAPPRLPLPCLGTARRGRPATAAE TRTFPRWPPSALALVWGCVRSMGLRQPPSTYWAQAQLLALSCTPNSTQTSTHTHTHTLTHTHTWRARSTS TSTISARRHRICSGHGGAGQTGRLGGWRTELQTKAGDPWRGGMASTPGSLCVRHSPWTHTHRHTHYLDA CMHTHARTRAP (SEQ ID NO:1488) corresponding to amino acids 270-490 of H53626_PEA_{—}1_P5 (SEQ ID NO:542), wherein said first and second amino acid sequences are contiguous and in a sequential order.

[1138] 2. An isolated polypeptide encoding for a tail of H53626_PEA_{—}1_P5 (SEQ ID NO:542), comprising a polypeptide being at least 70%, optionally at least about 80%, preferably at least about 85%, more preferably at least about 90% and most preferably at least about 95% homologous to the sequence TQNRQGHLWPPRPRPLACRGPWSSASQPALSSSWAPCSCGFARPRRSRAPPRLPLPCLGTARRGRPATAAE TRTFPRWPPSALALVWGCVRSMGLRQPPSTYWAQAQLLALSCTPNSTQTSTHTHTHTLTHTHTWRARSTS TSTISARRHRICSGHGGAGQTGRLGGWRTELQTKAGDPWRGGMASTPGSLCVRHSPWTHTHRHTHYLDA CMHTHARTRAP (SEQ ID NO:1488) in H53626_PEA_{—}1_P5 (SEQ ID NO:542).

[1139] The location of the variant protein was determined according to results from a number of different software programs and analyses, including analyses from SignalP and other specialized programs. The variant protein is believed to be located as follows with regard to the cell: secreted. The protein localization is believed to be secreted because both signal-peptide prediction programs predict that this protein has a signal peptide, and neither trans-membrane region prediction program predicts that this protein has a trans-membrane region.

[1140] Variant protein H53626_PEA_{—}1_P5 (SEQ ID NO:542) also has the following non-silent SNPs (Single Nucleotide Polymorphisms) as listed in Table 8, (given according to their position(s) on the amino acid sequence, with the alternative amino acid(s) listed; the last column indicates whether the SNP is known or not; the presence of known SNPs in variant protein H53626_PEA_{—}1_P5 (SEQ ID NO:542) sequence provides support for the deduced sequence of this variant protein according to the present invention).

TABLE 8
Amino acid mutations

| SNP position(s) on | Alternative | Previously |
|---|---|---|
| amino acid sequence | amino acid(s) | known SNP? |
| 193 | R -> L | Yes |
| 274 | Q -> K | Yes |
| 336 | A -> S | Yes |
| 353 | A -> | No |
| 376 | Q -> * | Yes |
| 405 | R -> G | No |
| 426 | G -> | No |
| 476 | Y -> C | Yes |

[1141] Variant protein H53626_PEA_{—}1_P5 (SEQ ID NO:542) is encoded by the following transcript(s): H53626_PEA_{—}1_T16 (SEQ ID NO:9), for which the sequence(s) is/are given at the end of the application. The coding portion of transcript H53626_PEA_{—}1_T16 (SEQ ID NO:9) is shown in bold; this coding portion starts at position 17 and ends at position 1486. The transcript also has the following SNPs as listed in Table 9 (given according to their position on the nucleotide sequence, with the alternative nucleic acid listed; the last column indicates whether the SNP is known or not; the presence of known SNPs in variant protein H53626_PEA_{—}1_P5 (SEQ ID NO:542) sequence provides support for the deduced sequence of this variant protein according to the present invention).

TABLE 9
Nucleic acid SNPs

| SNP position on | Alternative | Previously |
|---|---|---|
| nucleotide sequence | nucleic acid | known SNP? |
| 76 | G -> A | Yes |
| 340 | G -> T | No |
| 1688 | C -> T | Yes |
| 1803 | C -> T | Yes |
| 1828 | C -> G | Yes |
| 2143 | C -> T | Yes |
| 2144 | G -> A | Yes |
| 2260 | C -> T | Yes |
| 2467 | G -> A | Yes |
| 2522 | C -> G | Yes |
| 594 | G -> T | Yes |
| 836 | C -> A | Yes |
| 1022 | G -> T | Yes |
| 1074 | C -> | No |
| 1142 | C -> T | Yes |
| 1229 | A -> G | No |
| 1292 | G -> | No |
| 1443 | A -> G | Yes |

[1142] As noted above, cluster H53626 features 20 segment(s), which were listed in Table 2 above and for which the sequence(s) are given at the end of the application. These segment(s) are portions of nucleic acid sequence(s) which are described herein separately because they are of particular interest. A description of each segment according to the present invention is now provided.

[1143] Segment cluster H53626_PEA_{—}1_node_{—}15 (SEQ ID NO:123) according to the present invention is supported by 25 libraries. The number of libraries was determined as previously described. This segment can be found in the following transcript(s): H53626_PEA_{—}1_T15 (SEQ ID NO:8) and H53626_PEA_{—}1_T16 (SEQ ID NO:9). Table 10 below describes the starting and ending position of this segment on each transcript.

TABLE 10
Segment location on transcripts

| | Segment | Segment |
|---|---|---|
| Transcript name | starting position | ending position |
| H53626_PEA_1_T15 (SEQ | 96 | 343 |
| ID NO: 8) | | |
| H53626_PEA_1_T16 (SEQ | 96 | 343 |
| ID NO: 9) | | |

[1144] Segment cluster H53626_PEA_{—}1_node_{—}22 (SEQ ID NO:124) according to the present invention is supported by 42 libraries. The number of libraries was determined as previously described. This segment can be found in the following transcript(s): H53626_PEA_{—}1_T15 (SEQ ID NO:8) and H53626_PEA_{—}1_T16 (SEQ ID NO:9). Table 11 below describes the starting and ending position of this segment on each transcript.

TABLE 11
Segment location on transcripts

| | Segment | Segment |
|---|---|---|
| Transcript name | starting position | ending position |
| H53626_PEA_1_T15 (SEQ ID | 450 | 734 |
| NO: 8) | | |
| H53626_PEA_1_T16 (SEQ ID | 450 | 734 |
| NO: 9) | | |

[1145] Segment cluster H53626_PEA_{—}1_node_{—}25 (SEQ ID NO:125) according to the present invention is supported by 41 libraries. The number of libraries was determined as previously described. This segment can be found in the following transcript(s): H53626_PEA_{—}1_T15 (SEQ ID NO:8). Table 12 below describes the starting and ending position of this segment on each transcript.

TABLE 12
Segment location on transcripts

| | Segment | Segment |
|---|---|---|
| Transcript name | starting position | ending position |
| H53626_PEA_1_T15 (SEQ ID | 824 | 1088 |
| NO: 8) | | |

[1146] Segment cluster H53626_PEA_{—}1_node_{—}26 (SEQ ID NO:126) according to the present invention is supported by 5 libraries. The number of libraries was determined as previously described. This segment can be found in the following transcript(s): H53626_PEA_{—}1_T15 (SEQ ID NO:8). Table 14 below describes the starting and ending position of this segment on each transcript.

TABLE 14
Segment location on transcripts

| | Segment | Segment |
|---|---|---|
| Transcript name | starting position | ending position |
| H53626_PEA_1_T15 (SEQ ID | 1089 | 1328 |
| NO: 8) | | |

[1147] Microarray (chip) data is also available for this segment as follows. As described above with regard to the cluster itself, various oligonucleotides were tested for being differentially expressed in various disease conditions, particularly cancer. The following oligonucleotides (related to colon cancer) were found to hit this segment, shown in Table 15.

TABLE 15
Oligonucleotides related to this segment

| | Overexpressed | |
|---|---|---|
| Oligonucleotide name | in cancers | Chip reference |
| H53626_0_0_8391 (SEQ ID | colorectal cancer | Colon |
| NO: 1401) | | |

[1148] Segment cluster H53626_PEA_{—}1_node_{—}27 (SEQ ID NO:127) according to the present invention is supported by 106 libraries. The number of libraries was determined as previously described. This segment can be found in the following transcript(s): H53626_PEA_{—}1_T15 (SEQ ID NO:8) and H53626_PEA_{—}1_T16 (SEQ ID NO:9). Table 16 below describes the starting and ending position of this segment on each transcript.

TABLE 16
Segment location on transcripts

| | Segment | Segment |
|---|---|---|
| Transcript name | starting position | ending position |
| H53626_PEA_1_T15 (SEQ ID | 1329 | 2228 |
| NO: 8) | | |
| H53626_PEA_1_T16 (SEQ ID | 824 | 1723 |
| NO: 9) | | |

[1149] Segment cluster H53626_PEA_{—}1_node_{—}34 (SEQ ID NO:128) according to the present invention is supported by 121 libraries. The number of libraries was determined as previously described. This segment can be found in the following transcript(s): H53626_PEA_{—}1_T15 (SEQ ID NO:8) and H53626_PEA_{—}1_T16 (SEQ ID NO:9). Table 17 below describes the starting and ending position of this segment on each transcript.

TABLE 17
Segment location on transcripts

| | Segment | Segment |
|---|---|---|
| Transcript name | starting position | ending position |
| H53626_PEA_1_T15 (SEQ ID | 2507 | 2977 |
| NO: 8) | | |
| H53626_PEA_1_T16 (SEQ ID | 2002 | 2472 |
| NO: 9) | | |

[1150] Segment cluster H53626_PEA_{—}1_node_{—}35 (SEQ ID NO:129) according to the present invention is supported by 85 libraries. The number of libraries was determined as previously described. This segment can be found in the following transcript(s): H53626_PEA_{—}1_T15 (SEQ ID NO:8) and H53626_PEA_{—}1_T16 (SEQ ID NO:9). Table 18 below describes the starting and ending position of this segment on each transcript.

TABLE 18
Segment location on transcripts

| | Segment | Segment |
|---|---|---|
| Transcript name | starting position | ending position |
| H53626_PEA_1_T15 (SEQ ID | 2978 | 3148 |
| NO: 8) | | |
| H53626_PEA_1_T16 (SEQ ID | 2473 | 2643 |
| NO: 9) | | |

[1151] Segment cluster H53626_PEA_{—}1_node_{—}36 (SEQ ID NO:130) according to the present invention is supported by 69 libraries. The number of libraries was determined as previously described. This segment can be found in the following transcript(s): H53626_PEA_{—}1_T15 (SEQ ID NO:8) and H53626_PEA_{—}1_T16 (SEQ ID NO:9). Table 19 below describes the starting and ending position of this segment on each transcript.

TABLE 19
Segment location on transcripts

| | Segment | Segment |
|---|---|---|
| Transcript name | starting position | ending position |
| H53626_PEA_1_T15 (SEQ ID | 3149 | 3322 |
| NO: 8) | | |
| H53626_PEA_1_T16 (SEQ ID | 2644 | 2817 |
| NO: 9) | | |

[1152] According to an optional embodiment of the present invention, short segments related to the above cluster are also provided. These segments are up to about 120 bp in length, and so are included in a separate description.

[1153] Segment cluster H53626_PEA_{—}1_node_{—}11 (SEQ ID NO:131) according to the present invention is supported by 12 libraries. The number of libraries was determined as previously described. This segment can be found in the following transcript(s): H53626_PEA_{—}1_T15 (SEQ ID NO:8) and H53626_PEA_{—}1_T16 (SEQ ID NO:9). Table 20 below describes the starting and ending position of this segment on each transcript.

TABLE 20
Segment location on transcripts

| | Segment | Segment |
|---|---|---|
| Transcript name | starting position | ending position |
| H53626_PEA_1_T15 (SEQ ID | 1 | 55 |
| NO: 8) | | |
| H53626_PEA_1_T16 (SEQ ID | 1 | 55 |
| NO: 9) | | |

[1154] Segment cluster H53626_PEA_{—}1_node_{—}12 (SEQ ID NO:132) according to the present invention is supported by 11 libraries. The number of libraries was determined as previously described. This segment can be found in the following transcript(s): H53626_PEA_{—}1_T15 (SEQ ID NO:8) and H53626_PEA_{—}1_T16 (SEQ ID NO:9). Table 21 below describes the starting and ending position of this segment on each transcript.

TABLE 21
Segment location on transcripts

| | Segment | Segment |
|---|---|---|
| Transcript name | starting position | ending position |
| H53626_PEA_1_T15 (SEQ ID | 56 | 95 |
| NO: 8) | | |
| H53626_PEA_1_T16 (SEQ ID | 56 | 95 |
| NO: 9) | | |

[1155] Segment cluster H53626_PEA_{—}1_node_{—}16 (SEQ ID NO:133) according to the present invention can be found in the following transcript(s): H53626_PEA_{—}1_T15 (SEQ ID NO:8) and H53626_PEA_{—}1_T16 (SEQ ID NO:9). Table 22 below describes the starting and ending position of this segment on each transcript.

TABLE 22
Segment location on transcripts

| | Segment | Segment |
|---|---|---|
| Transcript name | starting position | ending position |
| H53626_PEA_1_T15 (SEQ ID | 344 | 368 |
| NO: 8) | | |
| H53626_PEA_1_T16 (SEQ ID | 344 | 368 |
| NO: 9) | | |

[1156] Segment cluster H53626_PEA_{—}1_node_{—}19 (SEQ ID NO:134) according to the present invention is supported by 25 libraries. The number of libraries was determined as previously described. This segment can be found in the following transcript(s): H53626_PEA_{—}1_T15 (SEQ ID NO:8) and H53626_PEA_{—}1_T16 (SEQ ID NO:9). Table 23 below describes the starting and ending position of this segment on each transcript.

TABLE 23
Segment location on transcripts

| | Segment | Segment |
|---|---|---|
| | starting | ending |
| Transcript name | position | position |
| H53626_PEA_1_T15 (SEQ ID NO: 8) | 369 | 419 |
| H53626_PEA_1_T16 (SEQ ID NO: 9) | 369 | 419 |

[1157] Segment cluster H53626_PEA_{—}1_node_{—}20 (SEQ ID NO:13b) according to the present invention is supported by 27 libraries. The number of libraries was determined as previously described. This segment can be found in the following transcript(s): H53626_PEA_{—}1_T15 (SEQ ID NO:8) and H53626_PEA_{—}1_T16 (SEQ ID NO:9). Table 24 below describes the starting and ending position of this segment on each transcript.

TABLE 24
Segment location on transcripts

| | Segment | Segment |
|---|---|---|
| | starting | ending |
| Transcript name | position | position |
| H53626_PEA_1_T15 (SEQ ID NO: 8) | 420 | 449 |
| H53626_PEA_1_T16 (SEQ ID NO: 9) | 420 | 449 |

[1158] Segment cluster H53626_PEA_{—}1_node_{—}24 (SEQ ID NO:136) according to the present invention is supported by 34 libraries. The number of libraries was determined as previously described. This segment can be found in the following transcript(s): H53626_PEA_{—}1_T15 (SEQ ID NO:8) and H53626_PEA_{—}1_T16 (SEQ ID NO:9). Table 25 below describes the starting and ending position of this segment on each transcript.

TABLE 25
Segment location on transcripts

| | Segment | Segment |
|---|---|---|
| | starting | ending |
| Transcript name | position | position |
| H53626_PEA_1_T15 (SEQ ID NO: 8) | 735 | 823 |
| H53626_PEA_1_T16 (SEQ ID NO: 9) | 735 | 823 |

[1159] Segment cluster H53626_PEA_{—}1_node_{—}28 (SEQ ID NO:137) according to the present invention is supported by 66 libraries. The number of libraries was determined as previously described. This segment can be found in the following transcript(s): H53626_PEA_{—}1_T15 (SEQ ID NO:8) and H53626_PEA_{—}1_T16 (SEQ ID NO:9). Table 26 below describes the starting and ending position of this segment on each transcript.

TABLE 26
Segment location on transcripts

| | Segment | Segment |
|---|---|---|
| | starting | ending |
| Transcript name | position | position |
| H53626_PEA_1_T15 (SEQ ID NO: 8) | 2229 | 2306 |
| H53626_PEA_1_T16 (SEQ ID NO: 9) | 1724 | 1801 |

[1160] Segment cluster H53626_PEA_{—}1_node_{—}29 (SEQ ID NO:138) according to the present invention is supported by 73 libraries. The number of libraries was determined as previously described. This segment can be found in the following transcript(s): H53626_PEA_{—}1_T15 (SEQ ID NO:8) and H53626_PEA_{—}1_T16 (SEQ ID NO:9). Table 27 below describes the starting and ending position of this segment on each transcript.

TABLE 27
Segment location on transcripts

| | Segment | Segment |
|---|---|---|
| | starting | ending |
| Transcript name | position | position |
| H53626_PEA_1_T15 (SEQ ID NO: 8) | 2307 | 2396 |
| H53626_PEA_1_T16 (SEQ ID NO: 9) | 1802 | 1891 |

[1161] Segment cluster H53626_PEA_{—}1_node_{—}30 (SEQ ID NO:139) according to the present invention is supported by 71 libraries. The number of libraries was determined as previously described. This segment can be found in the following transcript(s): H53626_PEA_{—}1_T15 (SEQ ID NO:8) and H53626_PEA_{—}1_T16 (SEQ ID NO:9). Table 28 below describes the starting and ending position of this segment on each transcript.

TABLE 28
Segment location on transcripts

| | Segment | Segment |
|---|---|---|
| | starting | ending |
| Transcript name | position | position |
| H53626_PEA_1_T15 (SEQ ID NO: 8) | 2397 | 2442 |
| H53626_PEA_1_T16 (SEQ ID NO: 9) | 1892 | 1937 |

[1162] Segment cluster H53626_PEA_{—}1_node_{—}31 (SEQ ID NO:140) according to the present invention is supported by 67 libraries. The number of libraries was determined as previously described. This segment can be found in the following transcript(s): H53626_PEA_{—}1_T15 (SEQ ID NO:8) and H53626_PEA_{—}1_T16 (SEQ ID NO:9). Table 29 below describes the starting and ending position of this segment on each transcript.

TABLE 29
Segment location on transcripts

| | Segment | Segment |
|---|---|---|
| | starting | ending |
| Transcript name | position | position |
| H53626_PEA_1_T15 (SEQ ID NO: 8) | 2443 | 2469 |
| H53626_PEA_1_T16 (SEQ ID NO: 9) | 1938 | 1964 |

[1163] Segment cluster H53626_PEA_{—}1_node_{—}32 (SEQ ID NO:141) according to the present invention is supported by 65 libraries. The number of libraries was determined as previously described. This segment can be found in the following transcript(s): H53626_PEA_{—}1_T15 (SEQ ID NO:8) and H53626_PEA_{—}1_T16 (SEQ ID NO:9). Table 30 below describes the starting and ending position of this segment on each transcript.

TABLE 30
Segment location on transcripts

| | Segment | Segment |
|---|---|---|
| | starting | ending |
| Transcript name | position | position |
| H53626_PEA_1_T15 (SEQ ID NO: 8) | 2470 | 2498 |
| H53626_PEA_1_T16 (SEQ ID NO: 9) | 1965 | 1993 |

[1164] Segment cluster H53626_PEA_{—}1_node_{—}33 (SEQ ID NO:142) according to the present invention can be found in the following transcript(s): H53626_PEA_{—}1_T15 (SEQ ID NO:8) and H53626_PEA_{—}1_T16 (SEQ ID NO:9). Table 31 below describes the starting and ending position of this segment on each transcript.

TABLE 31
Segment location on transcripts

| | Segment | Segment |
|---|---|---|
| | starting | ending |
| Transcript name | position | position |
| H53626_PEA_1_T15 (SEQ ID NO: 8) | 2499 | 2506 |
| H53626_PEA_1_T16 (SEQ ID NO: 9) | 1994 | 2001 |

Expression of Homo sapiens Fibroblast Growth Factor Receptor-Like 1 (FGFRL1) H53626 Transcripts, which are Detectable by Amplicon as Depicted in Sequence Name H53626 junc24-27F1R3 (SEQ ID NO: 1285) in Normal and Cancerous Colon Tissues.

[1165] Expression of Homo sapiens fibroblast growth factor receptor-like 1 (FGFRL1) transcripts detectable by or according to junc24-27, H53626 junc24-27F1R3 amplicon (SEQ ID NO: 1285) and H53626 junc24-27F1 (SEQ ID NO: 1283) and H53626 junc24-27R3 (SEQ ID NO: 1284) primers was measured by real time PCR. In parallel the expression of four housekeeping genes —PBGD (GenBank Accession No. BC019323 (SEQ ID NO:1576); amplicon —PBGD-amplicon, SEQ ID NO:531), HPRT1 (GenBank Accession No. NM_{—}000194 (SEQ ID NO:1577); amplicon —HPRT1-amplicon, SEQ ID NO:612), and G6PD (GenBank Accession No. NM_{—}000402 (SEQ ID NO:1578); G6PD amplicon, SEQ ID NO:615), RPS27A (GenBank Accession No. NM_{—}002954 (SEQ ID NO:1579); RPS27A amplicon, SEQ ID NO:1261), was measured similarly. For each RT sample, the expression of the above amplicon was normalized to the geometric mean of the quantities of the housekeeping genes. The normalized quantity of each RT sample was then divided by the median of the quantities of the normal post-mortem (PM) samples (Sample Nos. 41, 52, 62-67, 69-71, Table 3 above, “Tissue sample in colon cancer testing panel”), to obtain a value of fold up-regulation for each sample relative to median of the normal PM samples.

[1166] FIG. 14 is a histogram showing over expression of the above-indicated Homo sapiens fibroblast growth factor receptor-like 1 (FGFRL1) transcripts in cancerous colon samples relative to the normal samples. As is evident from FIG. 14, the expression of Homo sapiens fibroblast growth factor receptor-like 1 (FGFRL1) transcripts detectable by the above amplicon in cancer samples was significantly higher than in the non-cancerous samples (Sample Nos. 41, 52, 62-67, 69-71 Table 3, “Tissue sample in colon cancer testing panel”). Notably an over-expression of at least 5 fold was found in 13 out of 36 adenocarcinoma samples.

[1167] Primer pairs are also optionally and preferably encompassed within the present invention; for example, for the above experiment, the following primer pair was used as a non-limiting illustrative example only of a suitable primer pair: H53626 junc24-27F1 forward primer (SEQ ID NO: 1283); and H53626 junc24-27R3 reverse primer (SEQ ID NO: 1284).

[1168] The present invention also preferably encompasses any amplicon obtained through the use of any suitable primer pair; for example, for the above experiment, the following amplicon was obtained as a non-limiting illustrative example only of a suitable amplicon: H53626 junc24-27F1R3 (SEQ ID NO: 1285).

Forward primer (SEQ ID NO: 1283):
GTCCTTCCAGTGCAAGACCCA
Reverse primer (SEQ ID NO: 1284):
TGGGCCTGGCAAAGCC
Amplicon (SEQ ID NO: 1285):
GTCCTTCCAGTGCAAGACCCAAAACCGCCAGGGCCACCTGTGGCCTCCTC
GTCCTCGGCCACTAGCCTGCCGTGGCCCGTGGTCATCGGCATCCCAGCCG
GCGCTGTCTTCATCCTGGGCACCCTGCTCCTGTGGCTTTGCCAGGCCCA

Expression of Homo sapiens Fibroblast Growth Factor Receptor-Like 1 (FGFRL1) H53626 Transcripts, which are Detectable by Amplicon as Depicted in Sequence Name H53626 Seg25 (SEQ ID NO: 1288) in Normal and Cancerous Colon Tissues.

[1169] Expression of Homo sapiens fibroblast growth factor receptor-like 1 (FGFRL1) transcripts detectable by or according to seg25, H53626 seg25 amplicon (SEQ ID NO: 1288) and H53626 seg25F (SEQ ID NO: 1286) and H53626 seg25R (SEQ ID NO: 1287) primers was measured by real time PCR. In parallel the expression of four housekeeping genes —PBGD (GenBank Accession No. BC019323 (SEQ ID NO:1576); amplicon—PBGD-amplicon, SEQ ID NO:531), HPRT1 (GenBank Accession No. NM_{—}000194 (SEQ ID NO:1577); amplicon —HPRT1-amplicon, SEQ ID NO:612), G6PD (GenBank Accession No. NM_{—}000402 (SEQ ID NO:1578); G6PD amplicon, SEQ ID NO:615), RPS27A (GenBank Accession No. NM_{—}002954 (SEQ ID NO:1579); RPS27A amplicon, SEQ ID NO:1261), was measured similarly. For each RT sample, the expression of the above amplicon was normalized to the geometric mean of the quantities of the housekeeping genes. The normalized quantity of each RT sample was then divided by the median of the quantities of the normal post-mortem (PM) samples (Sample Nos. 41, 52, 62-67, 69-71, Table 3 above, “Tissue samples in colon cancer testing panel”), to obtain a value of fold up-regulation for each sample relative to median of the normal PM samples.

[1170] FIG. 15 is a histogram showing over expression of the above-indicated Homo sapiens fibroblast growth factor receptor-like 1 (FGFRL1) transcripts in cancerous colon samples relative to the normal samples. As is evident from FIG. 15, the expression of Homo sapiens fibroblast growth factor receptor-like 1 (FGFRL1) transcripts detectable by the above amplicon was higher in a few cancer samples than in the non-cancerous samples (Sample Nos. 41, 52, 62-67, 69-71 Table 3, “Tissue samples in colon cancer testing panel”). Notably an over-expression of at least 5 fold was found in 6 out of 36 adenocarcinoma samples.

[1171] Primer pairs are also optionally and preferably encompassed within the present invention; for example, for the above experiment, the following primer pair was used as a non-limiting illustrative example only of a suitable primer pair: H53626 seg25F forward primer (SEQ ID NO: 1286); and H53626 seg25R reverse primer (SEQ ID NO: 1287).

[1172] The present invention also preferably encompasses any amplicon obtained through the use of any suitable primer pair; for example, for the above experiment, the following amplicon was obtained as a non-limiting illustrative example only of a suitable amplicon: H53626 seg25 (SEQ ID NO: 1288).

Forward primer (SEQ ID NO: 1286):
CCGACGGCTCCTACCTCAA
Reverse primer (SEQ ID NO: 1287):
GGAAGCTGTAGCCCATGGTGT
Amplicon (SEQ ID NO: 1288):
CCGACGGCTCCTACCTCAATAAGCTGCTCATCACCCGTGCCCGCCAGGAC
GATGCGGGCATGTACATCTGCCTTGGCGCCAACACCATGGGCTACAGCTT
CC

It should be noted that the variant expression pattern was found to be similar to the expression pattern of the wild-type (previously known) transcript. However, in some cases (as for colon cancer) overexpression of the variant (for example H53626_FGF-RL_T16 transcript) seems to be higher than that the of previously known transcript.

### Expression of Homo sapiens Fibroblast Growth Factor Receptor-Like 1 (FGFRL1) H53626 Transcripts, which are Detectable by Amplicon as Depicted in Sequence Name H53626 Seg25 (SEQ ID NO: 1288) in Different Normal Tissues.

[1173] Expression of Homo sapiens fibroblast growth factor receptor-like 1 (FGFRL1) transcripts detectable by or according to H53626 seg25 amplicon (SEQ ID NO: 1288) and H53626 seg25F (SEQ ID NO: 1286) and H53626 seg25R (SEQ ID NO: 1287) was measured by real time PCR. In parallel the expression of four housekeeping genes: RPL19 (GenBank Accession No. NM_{—}000981 (SEQ ID NO:1580); RPL19 amplicon, SEQ ID NO:1264), TATA box (GenBank Accession No. NM_{—}003194 (SEQ ID NO:1581); TATA amplicon, SEQ ID NO:1267), UBC (GenBank Accession No. BC000449 (SEQ ID NO:1582); amplicon—Ubiquitin-amplicon) and SDHA (GenBank Accession No. NM_{—}004168 (SEQ ID NO:1583); amplicon—SDHA-amplicon, SEQ ID NO:1273) was measured similarly. For each RT sample, the expression of the above amplicon was normalized to the geometric mean of the quantities of the housekeeping genes. The normalized quantity of each RT sample was then divided by the median of the quantities of the lung samples (Sample Nos. 15-17 Table 2 above, “Tissue samples in normal panel”), to obtain a value of relative expression of each sample relative to median of the lung samples.

Forward primer (SEQ ID NO: 1286):
CCGACGGCTCCTACCTCAA
Reverse primer (SEQ ID NO: 1287):
GGAAGCTGTAGCCCATGGTGT
Amplicon (SEQ ID NO: 1288):
CCGACGGCTCCTACCTCAATAAGCTGCTCATCACCCGTGCCCGCCAGGAC
GATGCGGGCATGTACATCTGCCTTGGCGCCAACACCATGGGCTACAGCTT
CC

[1174] The results are presented in FIG. 71, showing the expression of fibroblast growth factor receptor-like 1 (FGFRL1) transcripts detectable by or according to H53626 seg25 amplicon(s) (SEQ ID NO: 1288) and H53626 seg25F (SEQ ID NO: 1286) and H53626 seg25R (SEQ ID NO: 1287) in different normal tissues.

### Expression of Homo sapiens Fibroblast Growth Factor Receptor-Like 1 (FGFRL1) H53626 Transcripts which are Detectable by Amplicon as Depicted in Sequence Name H53626 junc24-27F1R3 (SEQ ID NO: 1285) in Different Normal Tissues

[1175] Expression of Homo sapiens fibroblast growth factor receptor-like 1 (FGFRL1) transcripts detectable by or according to H53626 junc24-27F1R3 amplicon (SEQ ID NO:1285) and H53626 junc24-27F1 (SEQ ID NO:1283) and H53626 junc24-27R3 (SEQ ID NO:1284) was measured by real time PCR. In parallel the expression of four housekeeping genes —RPL19 (GenBank Accession No. NM_{—}000981 (SEQ ID NO:1580); RPL19 amplicon, SEQ ID NO:1264), TATA box (GenBank Accession No. NM_{—}003194 (SEQ ID NO:1581); TATA amplicon, SEQ ID NO:1267), UBC (GenBank Accession No. BC000449 (SEQ ID NO:1582); amplicon-Ubiquitin-amplicon) and SDHA (GenBank Accession No. NM_{—}004168 (SEQ ID NO:1583); amplicon—SDHA-amplicon, SEQ ID NO:1273) was measured similarly. For each RT sample, the expression of the above amplicon was normalized to the geometric mean of the quantities of the housekeeping genes. The normalized quantity of each RT sample was then divided by the median of the quantities of the lung samples (Sample Nos. 15-17 Table 2 above, “Tissue samples in normal panel”), to obtain a value of relative expression of each sample relative to median of the lung samples.

Forward primer (SEQ ID NO: 1283):
GTCCTTCCAGTGCAAGACCCA
Reverse primer (SEQ ID NO: 1284):
TGGGCCTGGCAAAGCC
Amplicon (SEQ ID NO: 1285):
GTCCTTCCAGTGCAAGACCCAAAACCGCCAGGGCCACCTGTGGCCTCCTC
GTCCTCGGCCACTAGCCTGCCGTGGCCCGTGGTCATCGGCATCCCAGCCG
GCGCTGTCTTCATCCTGGGCACCCTGCTCCTGTGGCTTTGCCAGGCCCA

[1176] The results are presented in FIG. 72, showing the expression of fibroblast growth factor receptor-like 1 (FGFRL1) transcripts detectable by or according to H53626 seg25 (SEQ ID NO: 1285) amplicon(s) and H53626 seg25F (SEQ ID NO: 1283) and H53626 junc24-27F1R3 (SEQ ID NO: 1284) in different normal tissues.

### Variant Protein Alignment to the Previously Known Protein:

[chemical structure]

[chemical structure]

[chemical structure]

[chemical structure]

[chemical structure]

[chemical structure]

[chemical structure]

[chemical structure]

[chemical structure]

[chemical structure]

[chemical structure]

[chemical structure]

[chemical structure]

[chemical structure]

[chemical structure]

[chemical structure]

[chemical structure]

[chemical structure]

[chemical structure]

[chemical structure]

[chemical structure]

[chemical structure]

[chemical structure]

[chemical structure]

### Description for Cluster HSENA78

[1178] Cluster HSENA78 features 1 transcript(s) and 7 segment(s) of interest, the names for which are given in Tables 1 and 2, respectively, the sequences themselves are given at the end of the application. The selected protein variants are given in table 3.

TABLE 1
Transcripts of interest

| Transcript Name | SEQ ID NO: |
|---|---|
| HSENA78_T5 | 10 |

TABLE 2
Segments of interest

| Segment Name | SEQ ID NO: |
|---|---|
| HSENA78_node_0 | 143 |
| HSENA78_node_2 | 144 |
| HSENA78_node_6 | 145 |
| HSENA78_node_9 | 146 |
| HSENA78_node_3 | 147 |
| HSENA78_node_4 | 148 |
| HSENA78_node_8 | 149 |

TABLE 3
Proteins of interest

| Protein Name | SEQ ID NO: |
|---|---|
| HSENA78_P2 | 543 |

[1179] These sequences are variants of the known protein Small inducible cytokine B5 precursor (SwissProt accession identifier SZ05_HUMAN; known also according to the synonyms CXCL5; Epithelial-derived neutrophil activating protein 78; Neutrophil-activating peptide ENA-78), SEQ ID NO: 618, referred to herein as the previously known protein.

[1180] Protein Small inducible cytokine B5 precursor (SEQ ID NO:618) is known or believed to have the following function(s): Involved in neutrophil activation. The sequence for protein Small inducible cytokine B5 precursor is given at the end of the application, as “Small inducible cytokine B5 precursor amino acid sequence”. Protein Small inducible cytokine B5 precursor localization is believed to be Secreted.

[1181] The following GO Annotation(s) apply to the previously known protein. The following annotation(s) were found: chemotaxis; signal transduction; cell-cell signaling; positive control of cell proliferation, which are annotation(s) related to Biological Process; and chemokine, which are annotation(s) related to Molecular Function.

[1182] The GO assignment relies on information from one or more of the SwissProt/TremB1 Protein knowledgebase, available from <http://www.expasy.ch/sprot/>; or Locuslink, available from <http://www.ncbi.nlm.nih.gov/projects/LocusLink/>.

[1183] Cluster HSENA78 can be used as a diagnostic marker according to overexpression of transcripts of this cluster in cancer. Expression of such transcripts in normal tissues is also given according to the previously described methods. The term “number” in the left hand column of the table and the numbers on the y-axis of the figure below refer to weighted expression of ESTs in each category, as “parts per million” (ratio of the expression of ESTs for a particular cluster to the expression of all ESTs in that category, according to parts per million).

[1184] Overall, the following results were obtained as shown with regard to the histograms in FIG. 16 and Table 4. This cluster is overexpressed (at least at a minimum level) in the following pathological conditions: epithelial malignant tumors and lung malignant tumors.

TABLE 4
Normal tissue distribution

| Name of Tissue | Number |
|---|---|
| colon | 0 |
| epithelial | 2 |
| general | 38 |
| kidney | 0 |
| lung | 3 |
| breast | 8 |
| skin | 0 |
| stomach | 36 |
| uterus | 4 |

TABLE 5
P values and ratios for expression in cancerous tissue

| Name of Tissue | P1 | P2 | SP1 | R3 | SP2 | R4 |
|---|---|---|---|---|---|---|
| colon | 2.6e−01 | 3.3e−01 | 1.7e−01 | 2.7 | 2.7e−01 | 2.2 |
| epithelial | 2.5e−01 | 9.0e−02 | 3.2e−03 | 4.1 | 8.5e−07 | 5.5 |
| general | 8.4e−01 | 7.2e−01 | 1 | 0.3 | 1 | 0.4 |
| kidney | 1 | 7.2e−01 | 1 | 1.0 | 1.7e−01 | 1.9 |
| lung | 8.5e−01 | 4.8e−01 | 4.1e−01 | 1.9 | 4.0e−05 | 3.8 |
| breast | 9.5e−01 | 8.7e−01 | 1 | 0.8 | 6.8e−01 | 1.2 |
| skin | 2.9e−01 | 4.7e−01 | 1.4e−01 | 7.0 | 6.4e−01 | 1.6 |
| stomach | 5.0e−01 | 4.3e−01 | 7.5e−01 | 1.0 | 4.3e−01 | 1.3 |
| uterus | 7.1e−01 | 8.5e−01 | 6.6e−01 | 1.3 | 8.0e−01 | 1.0 |

[1185] As noted above, cluster HSENA78 features 1 transcript(s), which were listed in Table 1 above. These transcript(s) encode for protein(s) which are variant(s) of protein Small inducible cytokine B5 precursor (SEQ ID NO:618). A description of each variant protein according to the present invention is now provided.

[1186] Variant protein HSENA78_P2 (SEQ ID NO:543) according to the present invention has an amino acid sequence as given at the end of the application; it is encoded by transcript(s) HSENA78_T5 (SEQ ID NO:10). An alignment is given to the known protein (Small inducible cytokine B5 precursor (SEQ ID NO:618)) at the end of the application. One or more alignments to one or more previously published protein sequences are given at the end of the application. A brief description of the relationship of the variant protein according to the present invention to each such aligned protein is as follows:

[1187] Comparison Report Between HSENA78_P2 (SEQ ID NO:543) and SZ05_HUMAN (SEQ ID NO:618):

[1188] 1. An isolated chimeric polypeptide encoding for HSENA78_P2 (SEQ ID NO:543), comprising a first amino acid sequence being at least 90% homologous to MSLLSSRAARVPGPSSSLCALLVLLLLLTQPGPIASAGPAAAVLRELRCVCLQTTQGVHPKMISNLQVFAIG PQCSKVEVV corresponding to amino acids 1-81 of SZ05_HUMAN (SEQ ID NO:618), which also corresponds to amino acids 1-81 of HSENA78_P2 (SEQ ID NO:543).

[1189] The location of the variant protein was determined according to results from a number of different software programs and analyses, including analyses from SignalP and other specialized programs. The variant protein is believed to be located as follows with regard to the cell: secreted. The protein localization is believed to be secreted because both signal-peptide prediction programs predict that this protein has a signal peptide, and neither trans-membrane region prediction program predicts that this protein has a trans-membrane region.

[1190] Variant protein HSENA78_P2 (SEQ ID NO:543) also has the following non-silent SNPs (Single Nucleotide Polymorphisms) as listed in Table 6, (given according to their position(s) on the amino acid sequence, with the alternative amino acid(s) listed; the last column indicates whether the SNP is known or not; the presence of known SNPs in variant protein HSENA78_P2 (SEQ ID NO:543) sequence provides support for the deduced sequence of this variant protein according to the present invention).

TABLE 6
Amino acid mutations

| SNP position(s) on amino acid | Alternative | Previously |
|---|---|---|
| sequence | amino acid(s) | known SNP? |
| 80 | V -> | No |
| 81 | V -> | No |

[1191] Variant protein HSENA78_P2 (SEQ ID NO:543) is encoded by the following transcript(s): HSENA78_T5 (SEQ ID NO:10), for which the sequence(s) is/are given at the end of the application. The coding portion of transcript HSENA78_T5 (SEQ ID NO:10) is shown in bold; this coding portion starts at position 149 and ends at position 391. The transcript also has the following SNPs as listed in Table 7 (given according to their position on the nucleotide sequence, with the alternative nucleic acid listed; the last column indicates whether the SNP is known or not; the presence of known SNPs in variant protein HSENA78_P2 (SEQ ID NO:543) sequence provides support for the deduced sequence of this variant protein according to the present invention).

TABLE 7
Nucleic acid SNPs

| SNP position on nucleotide | Alternative | Previously |
|---|---|---|
| sequence | nucleic acid | known SNP? |
| 92 | C -> T | Yes |
| 144 | C -> T | No |
| 1151 | A -> T | Yes |
| 1389 | T -> C | No |
| 1867 | C -> G | Yes |
| 145 | C -> T | No |
| 181 | C -> T | Yes |
| 316 | G -> A | Yes |
| 388 | G -> | No |
| 390 | T -> | No |
| 605 | T -> | No |
| 972 | C -> T | Yes |
| 1105 | A -> G | Yes |

[1192] As noted above, cluster HSENA78 features 7 segment(s), which were listed in Table 2 above and for which the sequence(s) are given at the end of the application. These segment(s) are portions of nucleic acid sequence(s) which are described herein separately because they are of particular interest. A description of each segment according to the present invention is now provided.

[1193] Segment cluster HSENA78_node_{—}0 (SEQ ID NO:143) according to the present invention is supported by 24 libraries. The number of libraries was determined as previously described. This segment can be found in the following transcript(s): HSENA78_T5 (SEQ ID NO:10). Table 8 below describes the starting and ending position of this segment on each transcript.

TABLE 8
Segment location on transcripts

| | | Segment |
|---|---|---|
| Transcript name | Segment starting position | ending position |
| HSENA78_T5 (SEQ ID | 1 | 257 |
| NO: 10) | | |

[1194] Segment cluster HSENA78_node_{—}2 (SEQ ID NO:144) according to the present invention is supported by 22 libraries. The number of libraries was determined as previously described. This segment can be found in the following transcript(s): HSENA78_T5 (SEQ ID NO:10). Table 9 below describes the starting and ending position of this segment on each transcript.

TABLE 9
Segment location on transcripts

| Transcript name | Segment starting position | Segment ending position |
|---|---|---|
| HSENA78_T5 | 258 | 390 |
| (SEQ ID NO: 10) | | |

[1195] Segment cluster HSENA78_node_{—}6 (SEQ ID NO:145) according to the present invention is supported by 68 libraries. The number of libraries was determined as previously described. This segment can be found in the following transcript(s): HSENA78_T5 (SEQ ID NO:10). Table 10 below describes the starting and ending position of this segment on each transcript.

TABLE 10
Segment location on transcripts

| | Segment | |
|---|---|---|
| | starting | |
| Transcript name | position | Segment ending position |
| HSENA78_T5 (SEQ ID NO: 10) | 585 | 2370 |

[1196] Segment cluster HSENA78_node_{—}9 (SEQ ID NO:146) according to the present invention is supported by 28 libraries. The number of libraries was determined as previously described. This segment can be found in the following transcript(s): HSENA78_T5 (SEQ ID NO:10). Table 11 below describes the starting and ending position of this segment on each transcript.

TABLE 11
Segment location on transcripts

| | Segment | |
|---|---|---|
| | starting | |
| Transcript name | position | Segment ending position |
| HSENA78_T5 (SEQ ID NO: 10) | 2394 | 2546 |

[1197] According to an optional embodiment of the present invention, short segments related to the above cluster are also provided. These segments are up to about 120 bp in length, and so are included in a separate description.

[1198] Segment cluster HSENA78_node_{—}3 (SEQ ID NO:147) according to the present invention is supported by 1 libraries. The number of libraries was determined as previously described. This segment can be found in the following transcript(s): HSENA78_T5 (SEQ ID NO:10). Table 12 below describes the starting and ending position of this segment on each transcript.

TABLE 12
Segment location on transcripts

| | Segment | |
|---|---|---|
| | starting | |
| Transcript name | position | Segment ending position |
| HSENA78_T5 (SEQ ID NO: 10) | 391 | 500 |

[1199] Segment cluster HSENA78_node_{—}4 (SEQ ID NO:148) according to the present invention is supported by 17 libraries. The number of libraries was determined as previously described. This segment can be found in the following transcript(s): HSENA78_T5 (SEQ ID NO:10). Table 13 below describes the starting and ending position of this segment on each transcript.

TABLE 13
Segment location on transcripts

| | Segment | |
|---|---|---|
| | starting | |
| Transcript name | position | Segment ending position |
| HSENA78_T5 (SEQ ID NO: 10) | 501 | 584 |

[1200] Segment cluster HSENA78_node_{—}8 (SEQ ID NO:149) according to the present invention can be found in the following transcript(s): HSENA78_T5 (SEQ ID NO:10). Table 14 below describes the starting and ending position of this segment on each transcript.

TABLE 14
Segment location on transcripts

| | Segment | |
|---|---|---|
| | starting | |
| Transcript name | position | Segment ending position |
| HSENA78_T5 (SEQ ID NO: 10) | 2371 | 2393 |

[1201] Microarray (chip) data is also available for this gene as follows. As described above with regard to the cluster itself, various oligonucleotides were tested for being differentially expressed in various disease conditions, particularly cancer. The following oligonucleotides were found to hit this segment with regard to colon cancer, shown in Table 15.

TABLE 15
Oligonucleotides related to this gene

| | Overexpressed | Chip |
|---|---|---|
| Oligonucleotide name | in cancers | reference |
| HSENA78_0_1_0 (SEQ ID NO: 1402) | Colon cancer | Colon |

### Variant Protein Alignment to the Previously Known Protein:

[chemical structure]

[chemical structure]

### Description for Cluster HUMGROG5

[1203] Cluster HUMGROG5 features 4 transcript(s) and 18 segment(s) of interest, the names for which are given in Tables 1 and 2, respectively, the sequences themselves are given at the end of the application. The selected protein variants are given in table 3.

TABLE 1
Transcripts of interest

| Transcript Name | SEQ ID NO: |
|---|---|
| HUMGROG5_PEA_1_T3 | 11 |
| HUMGROG5_PEA_1_T4 | 12 |
| HUMGROG5_PEA_1_T6 | 13 |
| HUMGROG5_PEA_1_T9 | 14 |

TABLE 2
Segments of interest

| Segment Name | SEQ ID NO: |
|---|---|
| HUMGROG5_PEA_1_node_18 | 150 |
| HUMGROG5_PEA_1_node_19 | 151 |
| HUMGROG5_PEA_1_node_21 | 152 |
| HUMGROG5_PEA_1_node_23 | 153 |
| HUMGROG5_PEA_1_node_6 | 154 |
| HUMGROG5_PEA_1_node_10 | 155 |
| HUMGROG5_PEA_1_node_11 | 156 |
| HUMGROG5_PEA_1_node_12 | 157 |
| HUMGROG5_PEA_1_node_13 | 158 |
| HUMGROG5_PEA_1_node_14 | 159 |
| HUMGROG5_PEA_1_node_15 | 160 |
| HUMGROG5_PEA_1_node_16 | 161 |
| HUMGROG5_PEA_1_node_17 | 162 |
| HUMGROG5_PEA_1_node_20 | 163 |
| HUMGROG5_PEA_1_node_22 | 164 |
| HUMGROG5_PEA_1_node_7 | 165 |
| HUMGROG5_PEA_1_node_8 | 166 |
| HUMGROG5_PEA_1_node_9 | 167 |

TABLE 3
Proteins of interest

| Protein Name | SEQ ID NO: |
|---|---|
| HUMGROG5_PEA_1_P2 | 544 |
| HUMGROG5_PEA_1_P3 | 545 |
| HUMGROG5_PEA_1_P7 | 546 |
| HUMGROG5_PEA_1_P12 | 547 |

[1204] These sequences are variants of the known protein Macrophage inflammatory protein-2-beta precursor (SwissProt accession identifier MI2B_HUMAN; known also according to the synonyms MIP2-beta; CXCL3; Growth regulated protein gamma; GRO-gamma), SEQ ID NO: 619, referred to herein as the previously known protein.

[1205] Protein Macrophage inflammatory protein-2-beta precursor (SEQ ID NO:619) is known or believed to have the following function(s): May play a role in inflammation and exert its effects on endothelial cells in an autocrine fashion. The sequence for protein Macrophage inflammatory protein-2-beta precursor is given at the end of the application, as “Macrophage inflammatory protein-2-beta precursor amino acid sequence”. Known polymorphisms for this sequence are as shown in Table 4.

TABLE 4
Amino acid mutations for Known Protein

| SNP position(s) on amino | |
|---|---|
| acid sequence | Comment |
| 27-28 | AA -> G |

[1206] Protein Macrophage inflammatory protein-2-beta precursor (SEQ ID NO:619) localization is believed to be Secreted.

[1207] The following GO Annotation(s) apply to the previously known protein. The following annotation(s) were found: chemokine, which are annotation(s) related to Molecular Function; and extracellular space, which are annotation(s) related to Cellular Component.

[1208] The GO assignment relies on information from one or more of the SwissProt/TremB1 Protein knowledgebase, available from <http://www.expasy.ch/sprot/>; or Locuslink, available from <http://www.ncbi.nlm.nih.gov/projects/LocusLink/>.

[1209] As noted above, cluster HUMGROG5 features 4 transcript(s), which were listed in Table 1 above. These transcript(s) encode for protein(s) which are variant(s) of protein Macrophage inflammatory protein-2-beta precursor (SEQ ID NO:619). A description of each variant protein according to the present invention is now provided.

[1210] Variant protein HUMGROG5_PEA_{—}1_P2 (SEQ ID NO:544) according to the present invention has an amino acid sequence as given at the end of the application; it is encoded by transcript(s) HUMGROG5_PEA_{—}1_T3 (SEQ ID NO:11). An alignment is given to the known protein (Macrophage inflammatory protein-2-beta precursor (SEQ ID NO:619)) at the end of the application. One or more alignments to one or more previously published protein sequences are given at the end of the application. A brief description of the relationship of the variant protein according to the present invention to each such aligned protein is as follows:

[1211] Comparison Report Between HUMGROG5_PEA_{—}1_P2 (SEQ ID NO:544) and MI2B_HUMAN (SEQ ID NO:619):

[1212] 1. An isolated chimeric polypeptide encoding for HUMGROG5_PEA_{—}1_P2 (SEQ ID NO:544), comprising a first amino acid sequence being at least 90% homologous to MAHATLSAAPSNPRLLRVALLLLLLVAASRRAAGASVVTELRCQCLQTLQGIHLKNIQSVNVRSPGPHCA QTEV corresponding to amino acids 1-74 of MI2B_HUMAN (SEQ ID NO:619), which also corresponds to amino acids 1-74 of HUMGROG5_PEA_{—}1_P2 (SEQ ID NO:544).

[1213] The location of the variant protein was determined according to results from a number of different software programs and analyses, including analyses from SignalP and other specialized programs. The variant protein is believed to be located as follows with regard to the cell: secreted. The protein localization is believed to be secreted because both signal-peptide prediction programs predict that this protein has a signal peptide, and neither trans-membrane region prediction program predicts that this protein has a trans-membrane region.

[1214] Variant protein HUMGROG5_PEA_{—}1_P2 (SEQ ID NO:544) also has the following non-silent SNPs (Single Nucleotide Polymorphisms) as listed in Table 5, (given according to their position(s) on the amino acid sequence, with the alternative amino acid(s) listed; the last column indicates whether the SNP is known or not; the presence of known SNPs in variant protein HUMGROG5_PEA_{—}1_P2 (SEQ ID NO:544) sequence provides support for the deduced sequence of this variant protein according to the present invention).

TABLE 5
Amino acid mutations

| SNP position(s) on amino | Alternative | |
|---|---|---|
| acid sequence | amino acid(s) | Previously known SNP? |
| 3 | H -> R | Yes |
| 33 | A -> | No |

[1215] Variant protein HUMGROG5_PEA_{—}1_P2 (SEQ ID NO:544) is encoded by the following transcript(s): HUMGROG5_PEA_{—}1_T3 (SEQ ID NO:11), for which the sequence(s) is/are given at the end of the application. The coding portion of transcript HUMGROG5_PEA_{—}1_T3 (SEQ ID NO:11) is shown in bold; this coding portion starts at position 196 and ends at position 420. The transcript also has the following SNPs as listed in Table 6 (given according to their position on the nucleotide sequence, with the alternative nucleic acid listed; the last column indicates whether the SNP is known or not; the presence of known SNPs in variant protein HUMGROG5_PEA_{—}1_P2 (SEQ ID NO:544) sequence provides support for the deduced sequence of this variant protein according to the present invention).

TABLE 6
Nucleic acid SNPs

| SNP position on nucleotide | | Previously |
|---|---|---|
| sequence | Alternative nucleic acid | known SNP? |
| 203 | A -> G | Yes |
| 292 | G -> | No |
| 1062 | A -> G | Yes |
| 1294 | A -> G | Yes |
| 1764 | A -> G | Yes |
| 1901 | A -> T | Yes |

[1216] Variant protein HUMGROG5_PEA_{—}1_P3 (SEQ ID NO:545) according to the present invention has an amino acid sequence as given at the end of the application; it is encoded by transcript(s) HUMGROG5_PEA_{—}1_T4 (SEQ ID NO:12). An alignment is given to the known protein (Macrophage inflammatory protein-2-beta precursor (SEQ ID NO:619)) at the end of the application. One or more alignments to one or more previously published protein sequences are given at the end of the application. A brief description of the relationship of the variant protein according to the present invention to each such aligned protein is as follows:

[1217] Comparison Report Between HUMGROG5_PEA_{—}1_P3 (SEQ ID NO:545) and MI2B_HUMAN (SEQ ID NO:619):

[1218] 1. An isolated chimeric polypeptide encoding for HUMGROG5_PEA_{—}1_P3 (SEQ ID NO:545), comprising a first amino acid sequence being at least 90% homologous to MAHATLSAAPSNPRLLRVALLLLLLVAASRRAAGASVVTELRCQCLQTLQGIHLKNIQSVNVRSPGPHCA QTEVIATLKNGKKACLNPASPMVQKIIEKILNK corresponding to amino acids 1-103 of MI2B_HUMAN (SEQ ID NO:619), which also corresponds to amino acids 1-103 of HUMGROG5_PEA_{—}1_P3 (SEQ ID NO:545). The location of the variant protein was determined according to results from a number of different software programs and analyses, including analyses from SignalP and other specialized programs. The variant protein is believed to be located as follows with regard to the cell: secreted. The protein localization is believed to be secreted because both signal-peptide prediction programs predict that this protein has a signal peptide, and neither trans-membrane region prediction program predicts that this protein has a trans-membrane region.

[1219] Variant protein HUMGROG5_PEA_{—}1_P3 (SEQ ID NO:545) also has the following non-silent SNPs (Single Nucleotide Polymorphisms) as listed in Table 7, (given according to their position(s) on the amino acid sequence, with the alternative amino acid(s) listed; the last column indicates whether the SNP is known or not; the presence of known SNPs in variant protein HUMGROG5_PEA_{—}1_P3 (SEQ ID NO:545) sequence provides support for the deduced sequence of this variant protein according to the present invention).

TABLE 7
Amino acid mutations

| SNP position(s) on amino acid | Alternative | |
|---|---|---|
| sequence | amino acid(s) | Previously known SNP? |
| 3 | H -> R | Yes |
| 33 | A -> | No |

[1220] Variant protein HUMGROG5_PEA_{—}1_P3 (SEQ ID NO:545) is encoded by the following transcript(s): HUMGROG5_PEA_{—}1_T4 (SEQ ID NO:12), for which the sequence(s) is/are given at the end of the application. The coding portion of transcript HUMGROG5_PEA_{—}1_T4 (SEQ ID NO:12) is shown in bold; this coding portion starts at position 196 and ends at position 504. The transcript also has the following SNPs as listed in Table 8 (given according to their position on the nucleotide sequence, with the alternative nucleic acid listed; the last column indicates whether the SNP is known or not; the presence of known SNPs in variant protein HUMGROG5_PEA_{—}1_P3 (SEQ ID NO:545) sequence provides support for the deduced sequence of this variant protein according to the present invention).

TABLE 8
Nucleic acid SNPs

| SNP position on nucleotide | Alternative | Previously |
|---|---|---|
| sequence | nucleic acid | known SNP? |
| 203 | A -> G | Yes |
| 292 | G -> | No |
| 949 | A -> G | Yes |
| 1181 | A -> G | Yes |
| 1651 | A -> G | Yes |
| 1788 | A -> T | Yes |

[1221] Variant protein HUMGROG5_PEA_{—}1_P7 (SEQ ID NO:546) according to the present invention has an amino acid sequence as given at the end of the application; it is encoded by transcript(s) HUMGROG5_PEA_{—}1_T9 (SEQ ID NO:14). An alignment is given to the known protein (Macrophage inflammatory protein-2-beta precursor (SEQ ID NO:619)) at the end of the application. One or more alignments to one or more previously published protein sequences are given at the end of the application. A brief description of the relationship of the variant protein according to the present invention to each such aligned protein is as follows:

[1222] Comparison Report Between HUMGROG5_PEA_{—}1_P7 (SEQ ID NO:546) and MI2B_HUMAN (SEQ ID NO:619):

[1223] 1. An isolated chimeric polypeptide encoding for HUMGROG5_PEA_{—}1_P7 (SEQ ID NO:546), comprising a first amino acid sequence being at least 90% homologous to MAHATLSAAPSNPRLLRVALLLLLLVAASRRAAGASVVTELRCQCLQTLQGIHLKNIQSVN corresponding to amino acids 1-61 of MI2B_HUMAN (SEQ ID NO:619), which also corresponds to amino acids 1-61 of HUMGROG5_PEA_{—}1_P7 (SEQ ID NO:546), and a second amino acid sequence being at least 70%, optionally at least 80%, preferably at least 85%, more preferably at least 90% and most preferably at least 95% homologous to a polypeptide having the sequence SHTQEWEESLSQPRIPHGSENHRKDTEQGEHQLTGEK (SEQ ID NO:1489) corresponding to amino acids 62-98 of HUMGROG5_PEA_{—}1_P7 (SEQ ID NO:546), wherein said first and second amino acid sequences are contiguous and in a sequential order.

[1224] 2. An isolated polypeptide encoding for a tail of HUMGROG5_PEA_{—}1_P7 (SEQ ID NO:546), comprising a polypeptide being at least 70%, optionally at least about 80%, preferably at least about 85%, more preferably at least about 90% and most preferably at least about 95% homologous to the sequence SHTQEWEESLSQPRIPHGSENHRKDTEQGEHQLTGEK (SEQ ID NO:1489) in HUMGROG5_PEA_{—}1_P7 (SEQ ID NO:546).

[1225] The location of the variant protein was determined according to results from a number of different software programs and analyses, including analyses from SignalP and other specialized programs. The variant protein is believed to be located as follows with regard to the cell: secreted. The protein localization is believed to be secreted because both signal-peptide prediction programs predict that this protein has a signal peptide, and neither trans-membrane region prediction program predicts that this protein has a trans-membrane region.

[1226] Variant protein HUMGROG5_PEA_{—}1_P7 (SEQ ID NO:546) also has the following non-silent SNPs (Single Nucleotide Polymorphisms) as listed in Table 9, (given according to their position(s) on the amino acid sequence, with the alternative amino acid(s) listed; the last column indicates whether the SNP is known or not; the presence of known SNPs in variant protein HUMGROG5_PEA_{—}1_P7 (SEQ ID NO:546) sequence provides support for the deduced sequence of this variant protein according to the present invention).

TABLE 9
Amino acid mutations

| SNP position(s) on amino acid | Alternative | |
|---|---|---|
| sequence | amino acid(s) | Previously known SNP? |
| 3 | H -> R | Yes |
| 33 | A -> | No |

[1227] Variant protein HUMGROG5_PEA_{—}1_P7 (SEQ ID NO:546) is encoded by the following transcript(s): HUMGROG5_PEA_{—}1_T9 (SEQ ID NO:14), for which the sequence(s) is/are given at the end of the application. The coding portion of transcript HUMGROG5_PEA_{—}1_T9 (SEQ ID NO:14) is shown in bold; this coding portion starts at position 196 and ends at position 489. The transcript also has the following SNPs as listed in Table 10 (given according to their position on the nucleotide sequence, with the alternative nucleic acid listed; the last column indicates whether the SNP is known or not; the presence of known SNPs in variant protein HUMGROG5_PEA_{—}1_P7 (SEQ ID NO:546) sequence provides support for the deduced sequence of this variant protein according to the present invention).

TABLE 10
Nucleic acid SNPs

| SNP position on nucleotide | Alternative | Previously |
|---|---|---|
| sequence | nucleic acid | known SNP? |
| 203 | A -> G | Yes |
| 292 | G -> | No |
| 793 | A -> G | Yes |
| 930 | A -> T | Yes |

[1228] Variant protein HUMGROG5_PEA_{—}1_P12 (SEQ ID NO:547) according to the present invention has an amino acid sequence as given at the end of the application; it is encoded by transcript(s) HUMGROG5_PEA_{—}1_T6 (SEQ ID NO:13). An alignment is given to the known protein (Macrophage inflammatory protein-2-beta precursor (SEQ ID NO:619)) at the end of the application. One or more alignments to one or more previously published protein sequences are given at the end of the application. A brief description of the relationship of the variant protein according to the present invention to each such aligned protein is as follows:

[1229] Comparison Report Between HUMGROG5_PEA_{—}1_P12 (SEQ ID NO:547) and MI2B_HUMAN (SEQ ID NO:619):

[1230] 1. An isolated chimeric polypeptide encoding for HUMGROG5_PEA_{—}1_P12 (SEQ ID NO:547) comprising a first amino acid sequence being at least 70%, optionally at least 80%, preferably at least 85%, more preferably at least 90% and most preferably at least 95% homologous to a polypeptide having the sequence MHKKGSPILGSHTARVAGTSPPALPLLAQLPDASAEPHGPRHALRRPQQSPAPAGGAAAPAPGGRQPARS RWVPAPWGPRAGRGWGGRPAPTAPLNQRVYSSL (SEQ ID NO:1490) corresponding to amino acids 1-103 of HUMGROG5_PEA_{—}1_P12 (SEQ ID NO:547), and a second amino acid sequence being at least 90% homologous to GASVVTELRCQCLQTLQGIHLKNIQSVNVRSPGPHCAQTEVIATLKNGKKACLNPASPMVQKIIEKILNKGS TN corresponding to amino acids 34-107 of MI2B_HUMAN (SEQ ID NO:619), which also corresponds to amino acids 104-177 of HUMGROG5_PEA_{—}1_P12 (SEQ ID NO:547), wherein said first and second amino acid sequences are contiguous and in a sequential order.

[1231] 2. An isolated polypeptide encoding for a head of HUMGROG5_PEA_{—}1_P12 (SEQ ID NO:547) comprising a polypeptide being at least 70%, optionally at least about 80%, preferably at least about 85%, more preferably at least about 90% and most preferably at least about 95% homologous to the sequence MHKKGSPILGSHTARVAGTSPPALPLLAQLPDASAEPHGPRHALRRPQQSPAPAGGAAAPAPGGRQPARS RWVPAPWGPRAGRGWGGRPAPTAPLNQRVYSSL (SEQ ID NO:1490) of HUMGROG5_PEA_{—}1_P12 (SEQ ID NO:547).

[1232] The location of the variant protein was determined according to results from a number of different software programs and analyses, including analyses from SignalP and other specialized programs. The variant protein is believed to be located as follows with regard to the cell: secreted. The protein localization is believed to be secreted because one of the two signal-peptide prediction programs (HMM:Signal peptide,NN:NO) predicts that this protein has a signal peptide.

[1233] Variant protein HUMGROG5_PEA_{—}1_P12 (SEQ ID NO:547) also has the following non-silent SNPs (Single Nucleotide Polymorphisms) as listed in Table 11, (given according to their position(s) on the amino acid sequence, with the alternative amino acid(s) listed; the last column indicates whether the SNP is known or not; the presence of known SNPs in variant protein HUMGROG5_PEA_{—}1_P12 (SEQ ID NO:547) sequence provides support for the deduced sequence of this variant protein according to the present invention).

TABLE 11
Amino acid mutations

| SNP position(s) on amino acid | Alternative | Previously |
|---|---|---|
| sequence | amino acid(s) | known SNP? |
| 70 | S -> | No |

[1234] Variant protein HUMGROG5_PEA_{—}1_P12 (SEQ ID NO:547) is encoded by the following transcript(s): HUMGROG5_PEA_{—}1_T6 (SEQ ID NO:13), for which the sequence(s) is/are given at the end of the application. The coding portion of transcript HUMGROG5_PEA_{—}1_T6 (SEQ ID NO:13) is shown in bold; this coding portion starts at position 84 and ends at position 614. The transcript also has the following SNPs as listed in Table 12 (given according to their position on the nucleotide sequence, with the alternative nucleic acid listed; the last column indicates whether the SNP is known or not; the presence of known SNPs in variant protein HUMGROG5_PEA_{—}1_P12 (SEQ ID NO:547) sequence provides support for the deduced sequence of this variant protein according to the present invention).

TABLE 12
Nucleic acid SNPs

| SNP position on nucleotide | Alternative | Previously |
|---|---|---|
| sequence | nucleic acid | known SNP? |
| 203 | A -> G | Yes |
| 292 | G -> | No |
| 932 | A -> G | Yes |
| 1069 | A -> T | Yes |

[1235] As noted above, cluster HUMGROG5 features 18 segment(s), which were listed in Table 2 above and for which the sequence(s) are given at the end of the application. These segment(s) are portions of nucleic acid sequence(s) which are described herein separately because they are of particular interest. A description of each segment according to the present invention is now provided.

[1236] Segment cluster HUMGROG5_PEA_{—}1_node_{—}18 (SEQ ID NO:150) according to the present invention is supported by 23 libraries. The number of libraries was determined as previously described. This segment can be found in the following transcript(s): HUMGROG5_PEA_{—}1_T3 (SEQ ID NO:11) and HUMGROG5_PEA_{—}1_T4 (SEQ ID NO:12). Table 13 below describes the starting and ending position of this segment on each transcript.

TABLE 13
Segment location on transcripts

| | Segment | Segment |
|---|---|---|
| | starting | ending |
| Transcript name | position | position |
| HUMGROG5_PEA_1_T3 (SEQ ID NO: 11) | 617 | 1433 |
| HUMGROG5_PEA_1_T4 (SEQ ID NO: 12) | 504 | 1320 |

[1237] Microarray (chip) data is also available for this segment as follows. As described above with regard to the cluster itself, various oligonucleotides were tested for being differentially expressed in various disease conditions, particularly cancer. The following oligonucleotides were found to hit this segment with regard to colon cancer, shown in Table 14.

TABLE 14
Oligonucleotides related to this segment

| Oligonucleotide name | Overexpressed in cancers | Chip reference |
|---|---|---|
| HUMGROG5_0_0_16626 | colorectal cancer | Colon |
| (SEQ ID NO: 1403) | | |

[1238] Segment cluster HUMGROG5_PEA_{—}1_node_{—}19 (SEQ ID NO:151) according to the present invention is supported by 40 libraries. The number of libraries was determined as previously described. This segment can be found in the following transcript(s): HUMGROG5_PEA_{—}1_T3 (SEQ ID NO:11), HUMGROG5_PEA_{—}1_T4 (SEQ ID NO:12), HUMGROG5_PEA_{—}1_T6 (SEQ ID NO:13) and HUMGROG5_PEA_{—}1_T9 (SEQ ID NO:14). Table 15 below describes the starting and ending position of this segment on each transcript.

TABLE 15
Segment location on transcripts

| | Segment | Segment |
|---|---|---|
| | starting | ending |
| Transcript name | position | position |
| HUMGROG5_PEA_1_T3 (SEQ ID NO: 11) | 1434 | 1593 |
| HUMGROG5_PEA_1_T4 (SEQ ID NO: 12) | 1321 | 1480 |
| HUMGROG5_PEA_1_T6 (SEQ ID NO: 13) | 602 | 761 |
| HUMGROG5_PEA_1_T9 (SEQ ID NO: 14) | 463 | 622 |

[1239] Segment cluster HUMGROG5_PEA_{—}1_node_{—}21 (SEQ ID NO:152) according to the present invention is supported by 45 libraries. The number of libraries was determined as previously described. This segment can be found in the following transcript(s): HUMGROG5_PEA_{—}1_T3 (SEQ ID NO:11), HUMGROG5_PEA_{—}1_T4 (SEQ ID NO:12), HUMGROG5_PEA_{—}1_T6 (SEQ ID NO:13) and HUMGROG5_PEA_{—}1_T9 (SEQ ID NO:14). Table 16 below describes the starting and ending position of this segment on each transcript.

TABLE 16
Segment location on transcripts

| | Segment | Segment |
|---|---|---|
| | starting | ending |
| Transcript name | position | position |
| HUMGROG5_PEA_1_T3 (SEQ ID NO: 11) | 1607 | 1782 |
| HUMGROG5_PEA_1_T4 (SEQ ID NO: 12) | 1494 | 1669 |
| HUMGROG5_PEA_1_T6 (SEQ ID NO: 13) | 775 | 950 |
| HUMGROG5_PEA_1_T9 (SEQ ID NO: 14) | 636 | 811 |

[1240] Segment cluster HUMGROG5_PEA_{—}1_node_{—}23 (SEQ ID NO:153) according to the present invention is supported by 60 libraries. The number of libraries was determined as previously described. This segment can be found in the following transcript(s): HUMGROG5_PEA_{—}1_T3 (SEQ ID NO:11), HUMGROG5_PEA_{—}1_T4 (SEQ ID NO:12), HUMGROG5_PEA_{—}1_T6 (SEQ ID NO:13) and HUMGROG5_PEA_{—}1_T9 (SEQ ID NO:14). Table 17 below describes the starting and ending position of this segment on each transcript.

TABLE 17
Segment location on transcripts

| | Segment | Segment |
|---|---|---|
| | starting | ending |
| Transcript name | position | position |
| HUMGROG5_PEA_1_T3 (SEQ ID NO: 11) | 1796 | 2131 |
| HUMGROG5_PEA_1_T4 (SEQ ID NO: 12) | 1683 | 2018 |
| HUMGROG5_PEA_1_T6 (SEQ ID NO: 13) | 964 | 1299 |
| HUMGROG5_PEA_1_T9 (SEQ ID NO: 14) | 825 | 1160 |

[1241] Segment cluster HUMGROG5_PEA_{—}1_node_{—}6 (SEQ ID NO:154) according to the present invention is supported by 22 libraries. The number of libraries was determined as previously described. This segment can be found in the following transcript(s): HUMGROG5_PEA_{—}1_T3 (SEQ ID NO:11), HUMGROG5_PEA_{—}1_T4 (SEQ ID NO:12), HUMGROG5_PEA_{—}1_T6 (SEQ ID NO:13) and HUMGROG5_PEA_{—}1_T9 (SEQ ID NO:14). Table 18 below describes the starting and ending position of this segment on each transcript.

TABLE 18
Segment location on transcripts

| | Segment | Segment |
|---|---|---|
| | starting | ending |
| Transcript name | position | position |
| HUMGROG5_PEA_1_T3 (SEQ ID NO: 11) | 1 | 222 |
| HUMGROG5_PEA_1_T4 (SEQ ID NO: 12) | 1 | 222 |
| HUMGROG5_PEA_1_T6 (SEQ ID NO: 13) | 1 | 222 |
| HUMGROG5_PEA_1_T9 (SEQ ID NO: 14) | 1 | 222 |

[1242] According to an optional embodiment of the present invention, short segments related to the above cluster are also provided. These segments are up to about 120 bp in length, and so are included in a separate description.

[1243] Segment cluster HUMGROG5_PEA_{—}1_node_{—}10 (SEQ ID NO:155) according to the present invention can be found in the following transcript(s): HUMGROG5_PEA_{—}1_T3 (SEQ ID NO:11), HUMGROG5_PEA_{—}1_T4 (SEQ ID NO:12), HUMGROG5_PEA_{—}1_T6 (SEQ ID NO:13) and HUMGROG5_PEA_{—}1_T9 (SEQ ID NO:14). Table 19 below describes the starting and ending position of this segment on each transcript.

TABLE 19
Segment location on transcripts

| | Segment | Segment |
|---|---|---|
| | starting | ending |
| Transcript name | position | position |
| HUMGROG5_PEA_1_T3 (SEQ ID NO: 11) | 296 | 315 |
| HUMGROG5_PEA_1_T4 (SEQ ID NO: 12) | 296 | 315 |
| HUMGROG5_PEA_1_T6 (SEQ ID NO: 13) | 394 | 413 |
| HUMGROG5_PEA_1_T9 (SEQ ID NO: 14) | 296 | 315 |

[1244] Segment cluster HUMGROG5_PEA_{—}1_node_{—}11 (SEQ ID NO:156) according to the present invention is supported by 33 libraries. The number of libraries was determined as previously described. This segment can be found in the following transcript(s): HUMGROG5_PEA_{—}1_T3 (SEQ ID NO:11), HUMGROG5_PEA_{—}1_T4 (SEQ ID NO:12), HUMGROG5_PEA_{—}1_T6 (SEQ ID NO:13) and HUMGROG5_PEA_{—}1_T9 (SEQ ID NO:14). Table 20 below describes the starting and ending position of this segment on each transcript.

TABLE 20
Segment location on transcripts

| | Segment | Segment |
|---|---|---|
| | starting | ending |
| Transcript name | position | position |
| HUMGROG5_PEA_1_T3 (SEQ ID NO: 11) | 316 | 378 |
| HUMGROG5_PEA_1_T4 (SEQ ID NO: 12) | 316 | 378 |
| HUMGROG5_PEA_1_T6 (SEQ ID NO: 13) | 414 | 476 |
| HUMGROG5_PEA_1_T9 (SEQ ID NO: 14) | 316 | 378 |

[1245] Segment cluster HUMGROG5_PEA_{—}1_node_{—}12 (SEQ ID NO:157) according to the present invention can be found in the following transcript(s): HUMGROG5_PEA_{—}1_T3 (SEQ ID NO:11), HUMGROG5_PEA_{—}1_T4 (SEQ ID NO:12) and HUMGROG5_PEA_{—}1_T6 (SEQ ID NO:13). Table 21 below describes the starting and ending position of this segment on each transcript.

TABLE 21
Segment location on transcripts

| | Segment | Segment |
|---|---|---|
| | starting | ending |
| Transcript name | position | position |
| HUMGROG5_PEA_1_T3 (SEQ ID NO: 11) | 379 | 399 |
| HUMGROG5_PEA_1_T4 (SEQ ID NO: 12) | 379 | 399 |
| HUMGROG5_PEA_1_T6 (SEQ ID NO: 13) | 477 | 497 |

[1246] Segment cluster HUMGROG5_PEA_{—}1_node_{—}13 (SEQ ID NO:158) according to the present invention can be found in the following transcript(s): HUMGROG5_PEA_{—}1_T3 (SEQ ID NO:11), HUMGROG5_PEA_{—}1_T4 (SEQ ID NO:12) and HUMGROG5_PEA_{—}1_T6 (SEQ ID NO:13). Table 22 below describes the starting and ending position of this segment on each transcript.

TABLE 22
Segment location on transcripts

| | Segment | Segment |
|---|---|---|
| | starting | ending |
| Transcript name | position | position |
| HUMGROG5_PEA_1_T3 (SEQ ID NO: 11) | 400 | 419 |
| HUMGROG5_PEA_1_T4 (SEQ ID NO: 12) | 400 | 419 |
| HUMGROG5_PEA_1_T6 (SEQ ID NO: 13) | 498 | 517 |

[1247] Segment cluster HUMGROG5_PEA_{—}1_node_{—}14 (SEQ ID NO:159) according to the present invention is supported by 8 libraries. The number of libraries was determined as previously described. This segment can be found in the following transcript(s): HUMGROG5_PEA_{—}1_T3 (SEQ ID NO:11). Table 23 below describes the starting and ending position of this segment on each transcript.

TABLE 23
Segment location on transcripts

| | Segment | Segment |
|---|---|---|
| | starting | ending |
| Transcript name | position | position |
| HUMGROG5_PEA_1_T3 (SEQ ID NO: 11) | 420 | 451 |

[1248] Segment cluster HUMGROG5_PEA_{—}1_node_{—}15 (SEQ ID NO:160) according to the present invention is supported by 7 libraries. The number of libraries was determined as previously described. This segment can be found in the following transcript(s): HUMGROG5_PEA_{—}1_T3 (SEQ ID NO:11). Table 24 below describes the starting and ending position of this segment on each transcript.

TABLE 24
Segment location on transcripts

| | Segment | Segment |
|---|---|---|
| | starting | ending |
| Transcript name | position | position |
| HUMGROG5_PEA_1_T3 (SEQ ID NO: 11) | 452 | 499 |

[1249] Segment cluster HUMGROG5_PEA_{—}1_node_{—}16 (SEQ ID NO:161) according to the present invention is supported by 6 libraries. The number of libraries was determined as previously described. This segment can be found in the following transcript(s): HUMGROG5_PEA_{—}1_T3 (SEQ ID NO:11). Table. 25 below describes the starting and ending position of this segment on each transcript.

TABLE 25
Segment location on transcripts

| | Segment | Segment |
|---|---|---|
| | starting | ending |
| Transcript name | position | position |
| HUMGROG5_PEA_1_T3 (SEQ ID NO: 11) | 500 | 532 |

[1250] Segment cluster HUMGROG5_PEA_{—}1_node_{—}17 (SEQ ID NO:162) according to the present invention is supported by 29 libraries. The number of libraries was determined as previously described. This segment can be found in the following transcript(s): HUMGROG5_PEA_{—}1_T3 (SEQ ID NO:11), HUMGROG5_PEA_{—}1_T4 (SEQ ID NO:12), HUMGROG5_PEA_{—}1_T6 (SEQ ID NO:13) and HUMGROG5_PEA_{—}1_T9 (SEQ ID NO:14). Table 26 below describes the starting and ending position of this segment on each transcript.

TABLE 26
Segment location on transcripts

| | Segment | Segment |
|---|---|---|
| | starting | ending |
| Transcript name | position | position |
| HUMGROG5_PEA_1_T3 (SEQ ID NO: 11) | 533 | 616 |
| HUMGROG5_PEA_1_T4 (SEQ ID NO: 12) | 420 | 503 |
| HUMGROG5_PEA_1_T6 (SEQ ID NO: 13) | 518 | 601 |
| HUMGROG5_PEA_1_T9 (SEQ ID NO: 14) | 379 | 462 |

[1251] Segment cluster HUMGROG5_PEA_{—}1_node_{—}20 (SEQ ID NO:163) according to the present invention can be found in the following transcript(s): HUMGROG5_PEA_{—}1_T3 (SEQ ID NO:11), HUMGROG5_PEA_{—}1_T4 (SEQ ID NO:12), HUMGROG5_PEA_{—}1_T6 (SEQ ID NO:13) and HUMGROG5_PEA_{—}1_T9 (SEQ ID NO:14). Table 27 below describes the starting and ending position of this segment on each transcript.

TABLE 27
Segment location on transcripts

| | Segment | Segment |
|---|---|---|
| | starting | ending |
| Transcript name | position | position |
| HUMGROG5_PEA_1_T3 (SEQ ID NO: 11) | 1594 | 1606 |
| HUMGROG5_PEA_1_T4 (SEQ ID NO: 12) | 1481 | 1493 |
| HUMGROG5_PEA_1_T6 (SEQ ID NO: 13) | 762 | 774 |
| HUMGROG5_PEA_1_T9 (SEQ ID NO: 14) | 623 | 635 |

[1252] Segment cluster HUMGROG5_PEA_{—}1_node_{—}22 (SEQ ID NO:164) according to the present invention can be found in the following transcript(s): HUMGROG5_PEA_{—}1_T3 (SEQ ID NO:11), HUMGROG5_PEA_{—}1_T4 (SEQ ID NO:12), HUMGROG5_PEA_{—}1_T6 (SEQ ID NO:13) and HUMGROG5_PEA_{—}1_T9 (SEQ ID NO:14). Table 28 below describes the starting and ending position of this segment on each transcript.

TABLE 28
Segment location on transcripts

| | Segment | Segment |
|---|---|---|
| | starting | ending |
| Transcript name | position | position |
| HUMGROG5_PEA_1_T3 (SEQ ID NO: 11) | 1783 | 1795 |
| HUMGROG5_PEA_1_T4 (SEQ ID NO: 12) | 1670 | 1682 |
| HUMGROG5_PEA_1_T6 (SEQ ID NO: 13) | 951 | 963 |
| HUMGROG5_PEA_1_T9 (SEQ ID NO: 14) | 812 | 824 |

[1253] Segment cluster HUMGROG5_PEA_{—}1_node_{—}7 (SEQ ID NO:165) according to the present invention is supported by 23 libraries. The number of libraries was determined as previously described. This segment can be found in the following transcript(s): HUMGROG5_PEA_{—}1_T3 (SEQ ID NO:11), HUMGROG5_PEA_{—}1_T4 (SEQ ID NO:12), HUMGROG5_PEA_{—}1_T6 (SEQ ID NO:13) and HUMGROG5_PEA_{—}1_T9 (SEQ ID NO:14). Table 29 below describes the starting and ending position of this segment on each transcript.

TABLE 29
Segment location on transcripts

| | Segment | Segment |
|---|---|---|
| | starting | ending |
| Transcript name | position | position |
| HUMGROG5_PEA_1_T3 (SEQ ID NO: 11) | 223 | 270 |
| HUMGROG5_PEA_1_T4 (SEQ ID NO: 12) | 223 | 270 |
| HUMGROG5_PEA_1_T6 (SEQ ID NO: 13) | 223 | 270 |
| HUMGROG5_PEA_1_T9 (SEQ ID NO: 14) | 223 | 270 |

[1254] Segment cluster HUMGROG5_PEA_{—}1_node_{—}8 (SEQ ID NO:166) according to the present invention can be found in the following transcript(s): HUMGROG5_PEA_{—}1_T3 (SEQ ID NO:11), HUMGROG5_PEA_{—}1_T4 (SEQ ID NO:12), HUMGROG5_PEA_{—}1_T6 (SEQ ID NO:13) and HUMGROG5_PEA_{—}1_T9 (SEQ ID NO:14). Table 30 below describes the starting and ending position of this segment on each transcript.

TABLE 30
Segment location on transcripts

| | Segment | Segment |
|---|---|---|
| | starting | ending |
| Transcript name | position | position |
| HUMGROG5_PEA_1_T3 (SEQ ID NO: 11) | 271 | 295 |
| HUMGROG5_PEA_1_T4 (SEQ ID NO: 12) | 271 | 295 |
| HUMGROG5_PEA_1_T6 (SEQ ID NO: 13) | 271 | 295 |
| HUMGROG5_PEA_1_T9 (SEQ ID NO: 14) | 271 | 295 |

[1255] Segment cluster HUMGROG5_PEA_{—}1_node_{—}9 (SEQ ID NO:167) according to the present invention is supported by 3 libraries. The number of libraries was determined as previously described. This segment can be found in the following transcript(s): HUMGROG5_PEA_{—}1_T6 (SEQ ID NO:13). Table 31 below describes the starting and ending position of this segment on each transcript.

TABLE 31
Segment location on transcripts

| | Segment | Segment |
|---|---|---|
| Transcript name | starting position | ending position |
| HUMGROG5_PEA_1_T6 (SEQ ID | 296 | 393 |
| NO: 13) | | |

### Variant Protein Alignment to the Previously Known Protein:

[chemical structure]

[chemical structure]

[chemical structure]

[chemical structure]

[chemical structure]

[chemical structure]

[chemical structure]

[chemical structure]

[chemical structure]

### Description for Cluster HUMODCA

[1257] Cluster HUMODCA features 1 transcript(s) and 17 segment(s) of interest, the names for which are given in Tables 1 and 2, respectively, the sequences themselves are given at the end of the application. The selected protein variants are given in table 3.

TABLE 1
Transcripts of interest

| Transcript Name | SEQ ID NO: |
|---|---|
| HUMODCA_T17 | 15 |

TABLE 2
Segments of interest

| Segment Name | SEQ ID NO: |
|---|---|
| HUMODCA_node_1 | 168 |
| HUMODCA_node_25 | 169 |
| HUMODCA_node_32 | 170 |
| HUMODCA_node_36 | 171 |
| HUMODCA_node_39 | 172 |
| HUMODCA_node_41 | 173 |
| HUMODCA_node_0 | 174 |
| HUMODCA_node_10 | 175 |
| HUMODCA_node_12 | 176 |
| HUMODCA_node_13 | 177 |
| HUMODCA_node_2 | 178 |
| HUMODCA_node_27 | 179 |
| HUMODCA_node_3 | 180 |
| HUMODCA_node_30 | 181 |
| HUMODCA_node_34 | 182 |
| HUMODCA_node_38 | 183 |
| HUMODCA_node_40 | 184 |

TABLE 3
Proteins of interest

| Protein Name | SEQ ID NO: |
|---|---|
| HUMODCA_P9 | 548 |

[1258] These sequences are variants of the known protein Ornithine decarboxylase (SwissProt accession identifier DCOR_HUMAN; known also according to the synonyms EC 4.1.1.17; ODC), SEQ ID NO: 620, referred to herein as the previously known protein.

[1259] Protein Ornithine decarboxylase (SEQ ID NO:620) is known or believed to have the following function(s): Polyamine biosynthesis; first (rate-limiting) step. The sequence for protein Ornithine decarboxylase is given at the end of the application, as “Ornithine decarboxylase amino acid sequence”. Known polymorphisms for this sequence are as shown in Table 4.

TABLE 4
Amino acid mutations for Known Protein

| SNP position(s) on amino | |
|---|---|
| acid sequence | Comment |
| 415 | Q -> E |

[1260] The following GO Annotation(s) apply to the previously known protein. The following annotation(s) were found: polyamine biosynthesis, which are annotation(s) related to Biological Process; and ornithine decarboxylase; lyase, which are annotation(s) related to Molecular Function.

[1261] The GO assignment relies on information from one or more of the SwissProt/TremB1 Protein knowledgebase, available from <http://www.expasy.ch/sprot/>; or Locuslink, available from <http://www.ncbi.nlm.nih.gov/projects/LocusLink/>.

[1262] Cluster HUMODCA can be used as a diagnostic marker according to overexpression of transcripts of this cluster in cancer. Expression of such transcripts in normal tissues is also given according to the previously described methods. The term “number” in the left hand column of the table and the numbers on the y-axis of the figure below refer to weighted expression of ESTs in each category, as “parts per million” (ratio of the expression of ESTs for a particular cluster to the expression of all ESTs in that category, according to parts per million).

[1263] Overall, the following results were obtained as shown with regard to the histograms in FIG. 17 and Table 5. This cluster is overexpressed (at least at a minimum level) in the following pathological conditions: brain malignant tumors, colorectal cancer, epithelial malignant tumors and a mixture of malignant tumors from different tissues.

TABLE 5
Normal tissue distribution

| Name of Tissue | Number |
|---|---|
| Adrenal | 120 |
| Bladder | 82 |
| Bone | 161 |
| Brain | 53 |
| colon | 0 |
| epithelial | 107 |
| general | 94 |
| head and neck | 10 |
| kidney | 114 |
| liver | 107 |
| lung | 120 |
| lymph nodes | 165 |
| breast | 61 |
| bone marrow | 156 |
| muscle | 55 |
| ovary | 36 |
| pancreas | 102 |
| prostate | 140 |
| skin | 188 |
| stomach | 109 |
| T cells | 278 |
| Thyroid | 128 |
| uterus | 118 |

TABLE 6
P values and ratios for expression in cancerous tissue

| Name of Tissue | P1 | P2 | SP1 | R3 | SP2 | R4 |
|---|---|---|---|---|---|---|
| adrenal | 8.3e−01 | 7.8e−01 | 1 | 0.2 | 8.5e−01 | 0.7 |
| bladder | 5.4e−01 | 5.1e−01 | 6.2e−01 | 1.1 | 5.0e−01 | 1.1 |
| bone | 8.3e−01 | 3.2e−01 | 1 | 0.2 | 8.4e−01 | 0.7 |
| brain | 2.6e−01 | 3.8e−02 | 6.5e−04 | 2.8 | 8.7e−10 | 3.6 |
| colon | 2.2e−02 | 5.8e−03 | 1.5e−03 | 6.9 | 6.7e−05 | 9.9 |
| epithelial | 6.4e−02 | 2.7e−03 | 1.4e−03 | 1.5 | 1.6e−12 | 2.1 |
| general | 1.3e−03 | 5.4e−08 | 1.9e−08 | 1.7 | 1.4e−39 | 2.6 |
| head and neck | 1.7e−01 | 1.7e−01 | 1 | 1.2 | 7.5e−01 | 1.3 |
| kidney | 7.7e−01 | 7.6e−01 | 7.1e−01 | 0.8 | 6.6e−01 | 0.9 |
| liver | 7.3e−01 | 5.7e−01 | 1 | 0.3 | 2.4e−01 | 1.2 |
| lung | 7.8e−01 | 5.8e−01 | 7.6e−01 | 0.6 | 7.3e−04 | 1.7 |
| lymph nodes | 3.9e−01 | 2.5e−01 | 1.8e−01 | 1.1 | 1.4e−04 | 2.1 |
| breast | 7.8e−01 | 4.7e−01 | 7.7e−01 | 0.8 | 6.4e−01 | 1.0 |
| bone marrow | 3.4e−01 | 2.6e−01 | 2.8e−01 | 2.1 | 1.6e−01 | 1.2 |
| muscle | 8.5e−01 | 6.1e−01 | 1 | 0.2 | 7.1e−05 | 1.0 |
| ovary | 1.7e−01 | 9.3e−02 | 3.8e−01 | 1.7 | 2.2e−02 | 2.6 |
| pancreas | 2.2e−01 | 3.2e−01 | 5.7e−02 | 1.6 | 6.6e−03 | 1.5 |
| prostate | 5.0e−01 | 4.9e−01 | 3.8e−02 | 1.9 | 4.5e−02 | 1.7 |
| skin | 6.2e−01 | 5.8e−01 | 5.4e−02 | 0.9 | 1.5e−02 | 0.5 |
| stomach | 4.2e−01 | 2.6e−01 | 3.7e−01 | 0.7 | 7.3e−03 | 2.3 |
| T cells | 1 | 1 | 5.5e−01 | 1.5 | 8.1e−01 | 0.9 |
| Thyroid | 8.3e−02 | 8.3e−02 | 5.9e−01 | 1.3 | 5.9e−01 | 1.3 |
| uterus | 4.2e−01 | 2.4e−01 | 1.6e−01 | 1.2 | 4.9e−02 | 1.7 |

[1264] As noted above, cluster HUMODCA features 1 transcript(s), which were listed in Table 1 above. These transcript(s) encode for protein(s) which are variant(s) of protein Ornithine decarboxylase (SEQ ID NO:620). A description of each variant protein according to the present invention is now provided.

[1265] Variant protein HUMODCA_P9 (SEQ ID NO:548) according to the present invention has an amino acid sequence as given at the end of the application; it is encoded by transcript(s) HUMODCA_T17 (SEQ ID NO:15). An alignment is given to the known protein (Ornithine decarboxylase (SEQ ID NO:620)) at the end of the application. One or more alignments to one or more previously published protein sequences are given at the end of the application. A brief description of the relationship of the variant protein according to the present invention to each such aligned protein is as follows:

[1266] Comparison Report Between HUMODCA_P9 (SEQ ID NO:548) and DCOR_HUMAN (SEQ ID NO:620):

[1267] 1. An isolated chimeric polypeptide encoding for HUMODCA_P9 (SEQ ID NO:548), comprising a first amino acid sequence being at least 70%, optionally at least 80%, preferably at least 85%, more preferably at least 90% and most preferably at least 95% homologous to a polypeptide having the sequence MKSLTATSSMKVLLPRTFWTRKLMKFLLL (SEQ ID NO:1491) corresponding to amino acids 1-29 of HUMODCA_P9 (SEQ ID NO:548), and a second amino acid sequence being at least 90% homologous to LVLRIATDDSKAVCRLSVKFGATLRTSRLLLERAKELNIDVVGVSFHVGSGCTDPETFVQAISDARCVFDM GAEVGFSMYLLDIGGGFPGSEDVKLKFEEITGVINPALDKYFPSDSGVRIIAEPGRYYVASAFTLAVNIIAKK IVLKEQTGSDDEDESSEQTFMYYVNDGVYGSFNCILYDHAHVKPLLQKRPKPDEKYYSSSIWGPTCDGLD RIVERCDLPEMHVGDWMLFENMGAYTVAAASTFNGFQRPTIYYVMSGPAWQLMQQFQNPDFPPEVEEQ DASTLPVSCAWESGMKRHRAACASASINV corresponding to amino acids 151-461 of DCOR_HUMAN (SEQ ID NO:620), which also corresponds to amino acids 30-340 of HUMODCA_P9 (SEQ ID NO:548), wherein said first and second amino acid sequences are contiguous and in a sequential order.

[1268] 2. An isolated polypeptide encoding for a head of HUMODCA_P9 (SEQ ID NO:548), comprising a polypeptide being at least 70%, optionally at least about 80%, preferably at least about 85%, more preferably at least about 90% and most preferably at least about 95% homologous to the sequence MKSLTATSSMKVLLPRTFWTRKLMKFLLL (SEQ ID NO:1491) of HUMODCA_P9 (SEQ ID NO:548).

[1269] Comparison Report Between HUMODCA_P9 (SEQ ID NO:548) and AAA59968 (SEQ ID NO:1387):

[1270] 1. An isolated chimeric polypeptide encoding for HUMODCA_P9 (SEQ ID NO:548), comprising a first amino acid sequence being at least 70%, optionally at least 80%, preferably at least 85%, more preferably at least 90% and most preferably at least 95% homologous to a polypeptide having the sequence MKSLTATSSMKVLLPRTFWTRKLMKFLLL (SEQ ID NO:1491) corresponding to amino acids 1-29 of HUMODCA_P9 (SEQ ID NO:548), and a second amino acid sequence being at least 90% homologous to LVLRIATDDSKAVCRLSVKFGATLRTSRLLLERAKELNIDVVGVSFHVGSGCTDPETFVQAISDARCVFDM GAEVGFSMYLLDIGGGFPGSEDVKLKFEEITGVINPALDKYFPSDSGVRIIAEPGRYYVASAFTLAVNIIAKK IVLKEQTGSDDEDESSEQTFMYYVNDGVYGSFNCILYDHAHVKPLLQKRPKPDEKYYSSSIWGPTCDGLD RIVERCDLPEMHVGDWMLFENMGAYTVAAASTFNGFQRPTIYYVMSGPAWQLMQQFQNPDFPPEVEEQ DASTLPVSCAWESGMKRHRAACASASINV corresponding to amino acids 40-350 of AAA59968 (SEQ ID NO:1387), which also corresponds to amino acids 30-340 of HUMODCA_P9 (SEQ ID NO:548), wherein said first and second amino acid sequences are contiguous and in a sequential order.

[1271] 2. An isolated polypeptide encoding for a head of HUMODCA_P9 (SEQ ID NO:548), comprising a polypeptide being at least 70%, optionally at least about 80%, preferably at least about 85%, more preferably at least about 90% and most preferably at least about 95% homologous to the sequence MKSLTATSSMKVLLPRTFWTRKLMKFLLL (SEQ ID NO:1491) of HUMODCA_P9 (SEQ ID NO:548).

[1272] Comparison Report Between HUMODCA_P9 (SEQ ID NO:548) and AAH14562 (SEQ ID NO:1388):

[1273] 1. An isolated chimeric polypeptide encoding for HUMODCA_P9 (SEQ ID NO:548), comprising a first amino acid sequence being at least 70%, optionally at least 80%, preferably at least 85%, more preferably at least 90% and most preferably at least 95% homologous to a polypeptide having the sequence MKSLTATSSMKVLLPRTFWTRKLMKFLLL (SEQ ID NO:1491) corresponding to amino acids 1-29 of HUMODCA_P9 (SEQ ID NO:548), and a second amino acid sequence being at least 90% homologous to LVLRIATDDSKAVCRLSVKFGATLRTSRLLLERAKELNIDVVGVSFHVGSGCTDPETFVQAISDARCVFDM GAEVGFSMYLLDIGGGFPGSEDVKLKFEEITGVINPALDKYFPSDSGVRIIAEPGRYYVASAFTLAVNIIAKK IVLKEQTGSDDEDESSEQTFMYYVNDGVYGSFNCILYDHAHVKPLLQKRPKPDEKYYSSSIWGPTCDGLD RIVERCDLPEMHVGDWMLFENMGAYTVAAASTFNGFQRPTIYYVMSGPAWQLMQQFQNPDFPPEVEEQ DASTLPVSCAWESGMKRHRAACASASINV corresponding to amino acids 86-396 of AAH14562 (SEQ ID NO:1388), which also corresponds to amino acids 30-340 of HUMODCA_P9 (SEQ ID NO:548), wherein said first and second amino acid sequences are contiguous and in a sequential order.

[1274] 2. An isolated polypeptide encoding for a head of HUMODCA_P9 (SEQ ID NO:548), comprising a polypeptide being at least 70%, optionally at least about 80%, preferably at least about 85%, more preferably at least about 90% and most preferably at least about 95% homologous to the sequence MKSLTATSSMKVLLPRTFWTRKLMKFLLL (SEQ ID NO:1491) of HUMODCA_P9 (SEQ ID NO:548).

[1275] The location of the variant protein was determined according to results from a number of different software programs and analyses, including analyses from SignalP and other specialized programs. The variant protein is believed to be located as follows with regard to the cell: secreted. The protein localization is believed to be secreted because both signal-peptide prediction programs predict that this protein has a signal peptide, and neither trans-membrane region prediction program predicts that this protein has a trans-membrane region.

[1276] Variant protein HUMODCA_P9 (SEQ ID NO:548) also has the following non-silent SNPs (Single Nucleotide Polymorphisms) as listed in Table 7, (given according to their position(s) on the amino acid sequence, with the alternative amino acid(s) listed; the last column indicates whether the SNP is known or not; the presence of known SNPs in variant protein HUMODCA_P9 (SEQ ID NO:548) sequence provides support for the deduced sequence of this variant protein according to the present invention).

TABLE 7
Amino acid mutations

| SNP position(s) on amino | Alternative | Previously |
|---|---|---|
| acid sequence | amino acid(s) | known SNP? |
| 150 | I -> S | No |
| 150 | I -> V | No |
| 262 | F -> L | No |
| 263 | E -> | No |
| 263 | E -> G | No |
| 30 | L -> | No |
| 301 | N -> | No |
| 301 | N -> K | No |
| 309 | E -> K | No |
| 312 | D -> N | No |
| 323 | E -> K | No |
| 329 | H -> P | No |
| 174 | I -> | No |
| 34 | I -> | No |
| 59 | L -> | No |
| 70 | V -> | No |
| 86 | T -> | No |
| 86 | T -> N | No |
| 90 | A -> | No |
| 94 | A -> | No |
| 97 | V -> | No |
| 97 | V -> G | No |
| 198 | N -> D | No |
| 200 | G -> | No |
| 3 | S -> | No |
| 207 | C -> G | No |
| 207 | C -> R | No |
| 223 | P -> | No |
| 262 | F -> | No |

[1277] Variant protein HUMODCA_P9 (SEQ ID NO:548) is encoded by the following transcript(s): HUMODCA_T17 (SEQ ID NO:15), for which the sequence(s) is/are given at the end of the application. The coding portion of transcript HUMODCA_T17 (SEQ ID NO:15) is shown in bold; this coding portion starts at position 528 and ends at position 1547. The transcript also has the following SNPs as listed in Table 8 (given according to their position on the nucleotide sequence, with the alternative nucleic acid listed; the last column indicates whether the SNP is known or not; the presence of known SNPs in variant protein HUMODCA_P9 (SEQ ID NO:548) sequence provides support for the deduced sequence of this variant protein according to the present invention).

TABLE 8
Nucleic acid SNPs

| SNP position on | Alternative | Previously |
|---|---|---|
| nucleotide sequence | nucleic acid | known SNP? |
| 28 | C -> G | Yes |
| 210 | C -> | No |
| 536 | T -> | No |
| 615 | T -> | No |
| 628 | T -> | No |
| 703 | T -> | No |
| 736 | T -> | No |
| 784 | C -> | No |
| 784 | C -> A | No |
| 797 | A -> | No |
| 797 | A -> T | No |
| 808 | C -> | No |
| 217 | C -> | No |
| 817 | T -> | No |
| 817 | T -> G | No |
| 869 | C -> T | Yes |
| 975 | A -> G | No |
| 976 | T -> G | No |
| 1048 | T -> | No |
| 1119 | A -> G | No |
| 1127 | C -> | No |
| 1127 | C -> G | No |
| 1146 | T -> C | No |
| 366 | G -> C | No |
| 1146 | T -> G | No |
| 1194 | C -> | No |
| 1283 | T -> C | Yes |
| 1311 | T -> | No |
| 1311 | T -> C | No |
| 1315 | A -> | No |
| 1315 | A -> G | No |
| 1430 | C -> | No |
| 1430 | C -> A | No |
| 1433 | C -> G | No |
| 366 | G -> T | No |
| 1433 | C -> T | Yes |
| 1452 | G -> A | No |
| 1461 | G -> A | No |
| 1494 | G -> A | No |
| 1513 | A -> C | No |
| 1632 | T -> | No |
| 1673 | C -> | No |
| 1739 | T -> | No |
| 1739 | T -> G | No |
| 1742 | T -> C | No |
| 447 | G -> A | Yes |
| 1786 | C -> | No |
| 1786 | C -> G | No |
| 1832 | T -> C | Yes |
| 1877 | C -> T | No |
| 464 | T -> G | Yes |
| 473 | A -> G | Yes |
| 506 | G -> A | Yes |
| 521 | T -> | No |

[1278] As noted above, cluster HUMODCA features 17 segment(s), which were listed in Table 2 above and for which the sequence(s) are given at the end of the application. These segment(s) are portions of nucleic acid sequence(s) which are described herein separately because they are of particular interest. A description of each segment according to the present invention is now provided.

[1279] Segment cluster HUMODCA_node_{—}1 (SEQ ID NO:168) according to the present invention is supported by 76 libraries. The number of libraries was determined as previously described. This segment can be found in the following transcript(s): HUMODCA_T17 (SEQ ID NO:15). Table 9 below describes the starting and ending position of this segment on each transcript.

TABLE 9
Segment location on transcripts

| | Segment | Segment |
|---|---|---|
| Transcript name | starting position | ending position |
| HUMODCA_T17 (SEQ ID NO: 15) | 118 | 256 |

[1280] Segment cluster HUMODCA_node_{—}25 (SEQ ID NO:169) according to the present invention is supported by 190 libraries. The number of libraries was determined as previously described. This segment can be found in the following transcript(s): HUMODCA_T17 (SEQ ID NO:15). Table 10 below describes the starting and ending position of this segment on each transcript.

TABLE 10
Segment location on transcripts

| | Segment | Segment |
|---|---|---|
| Transcript name | starting position | ending position |
| HUMODCA_T17 (SEQ ID NO: 15) | 614 | 748 |

[1281] Segment cluster HUMODCA_node_{—}32 (SEQ ID NO:170) according to the present invention is supported by 249 libraries. The number of libraries was determined as previously described. This segment can be found in the following transcript(s): HUMODCA_T17 (SEQ ID NO:15). Table 11 below describes the starting and ending position of this segment on each transcript.

TABLE 11
Segment location on transcripts

| | Segment | Segment |
|---|---|---|
| Transcript name | starting position | ending position |
| HUMODCA_T17 (SEQ ID NO: 15) | 915 | 1077 |

[1282] Segment cluster HUMODCA_node_{—}36 (SEQ ID NO:171) according to the present invention is supported by 348 libraries. The number of libraries was determined as previously described. This segment can be found in the following transcript(s): HUMODCA_T17 (SEQ ID NO:15). Table 12 below describes the starting and ending position of this segment on each transcript.

TABLE 12
Segment location on transcripts

| | Segment | Segment |
|---|---|---|
| Transcript name | starting position | ending position |
| HUMODCA_T17 (SEQ ID NO: 15) | 1191 | 1405 |

[1283] Segment cluster HUMODCA_node_{—}39 (SEQ ID NO:172) according to the present invention is supported by 297 libraries. The number of libraries was determined as previously described. This segment can be found in the following transcript(s): HUMODCA_T17 (SEQ ID NO:15). Table 13 below describes the starting and ending position of this segment on each transcript.

TABLE 13
Segment location on transcripts

| | Segment | Segment |
|---|---|---|
| Transcript name | starting position | ending position |
| HUMODCA_T17 (SEQ ID NO: 15) | 1461 | 1633 |

[1284] Segment cluster HUMODCA_node_{—}41 (SEQ ID NO:173) according to the present invention is supported by 230 libraries. The number of libraries was determined as previously described. This segment can be found in the following transcript(s): HUMODCA_T17 (SEQ ID NO:15). Table 14 below describes the starting and ending position of this segment on each transcript.

TABLE 14
Segment location on transcripts

| | Segment | Segment |
|---|---|---|
| Transcript name | starting position | ending position |
| HUMODCA_T17 (SEQ ID NO: 15) | 1728 | 1893 |

[1285] According to an optional embodiment of the present invention, short segments related to the above cluster are also provided. These segments are up to about 120 bp in length, and so are included in a separate description.

[1286] Segment cluster HUMODCA_node_{—}0 (SEQ ID NO:174) according to the present invention is supported by 9 libraries. The number of libraries was determined as previously described. This segment can be found in the following transcript(s): HUMODCA_T17 (SEQ ID NO:15). Table 15 below describes the starting and ending position of this segment on each transcript.

TABLE 15
Segment location on transcripts

| | Segment | Segment |
|---|---|---|
| Transcript name | starting position | ending position |
| HUMODCA_T17 (SEQ ID NO: 15) | 1 | 117 |

[1287] Segment cluster HUMODCA_node_{—}10 (SEQ ID NO:175) according to the present invention is supported by 107 libraries. The number of libraries was determined as previously described. This segment can be found in the following transcript(s): HUMODCA_T17 (SEQ ID NO:15). Table 16 below describes the starting and ending position of this segment on each transcript.

TABLE 16
Segment location on transcripts

| | Segment | Segment |
|---|---|---|
| Transcript name | starting position | ending position |
| HUMODCA_T17 (SEQ ID NO: 15) | 385 | 494 |

[1288] Segment cluster HUMODCA_node_{—}12 (SEQ ID NO:176) according to the present invention is supported by 132 libraries. The number of libraries was determined as previously described. This segment can be found in the following transcript(s): HUMODCA_T17 (SEQ ID NO:15). Table 17 below describes the starting and ending position of this segment on each transcript.

TABLE 17
Segment location on transcripts

| | Segment | Segment |
|---|---|---|
| Transcript name | starting position | ending position |
| HUMODCA_T17 (SEQ ID NO: 15) | 495 | 586 |

[1289] Segment cluster HUMODCA_node_{—}13 (SEQ ID NO:177) according to the present invention is supported by 126 libraries. The number of libraries was determined as previously described. This segment can be found in the following transcript(s): HUMODCA_T17 (SEQ ID NO:15). Table 18 below describes the starting and ending position of this segment on each transcript.

TABLE 18
Segment location on transcripts

| | Segment | Segment |
|---|---|---|
| Transcript name | starting position | ending position |
| HUMODCA_T17 (SEQ ID NO: 15) | 587 | 613 |

[1290] Segment cluster HUMODCA_node_{—}2 (SEQ ID NO:178) according to the present invention is supported by 81 libraries. The number of libraries was determined as previously described. This segment can be found in the following transcript(s): HUMODCA_T17 (SEQ ID NO:15). Table 19 below describes the starting and ending position of this segment on each transcript.

TABLE 19
Segment location on transcripts

| | Segment | Segment |
|---|---|---|
| Transcript name | starting position | ending position |
| HUMODCA_T17 (SEQ ID NO: 15) | 257 | 328 |

[1291] Segment cluster HUMODCA_node_{—}27 (SEQ ID NO:179) according to the present invention is supported by 185 libraries. The number of libraries was determined as previously described. This segment can be found in the following transcript(s): HUMODCA_T17 (SEQ ID NO:15). Table 20 below describes the starting and ending position of this segment on each transcript.

TABLE 20
Segment location on transcripts

| | Segment | Segment |
|---|---|---|
| Transcript name | starting position | ending position |
| HUMODCA_T17 (SEQ ID NO: 15) | 749 | 830 |

[1292] Segment cluster HUMODCA_node_{—}3 (SEQ ID NO:180) according to the present invention is supported by 85 libraries. The number of libraries was determined as previously described. This segment can be found in the following transcript(s): HUMODCA_T17 (SEQ ID NO:15). Table 21 below describes the starting and ending position of this segment on each transcript.

TABLE 21
Segment location on transcripts

| | Segment | Segment |
|---|---|---|
| Transcript name | starting position | ending position |
| HUMODCA_T17 (SEQ ID NO: 15) | 329 | 384 |

[1293] Segment cluster HUMODCA_node_{—}30 (SEQ ID NO:181) according to the present invention is supported by 196 libraries. The number of libraries was determined as previously described. This segment can be found in the following transcript(s): HUMODCA_T17 (SEQ ID NO:15). Table 22 below describes the starting and ending position of this segment on each transcript.

TABLE 22
Segment location on transcripts

| | Segment | Segment |
|---|---|---|
| Transcript name | starting position | ending position |
| HUMODCA_T17 (SEQ ID NO: 15) | 831 | 914 |

[1294] Segment cluster HUMODCA_node_{—}34 (SEQ ID NO:182) according to the present invention is supported by 259 libraries. The number of libraries was determined as previously described. This segment can be found in the following transcript(s): HUMODCA_T17 (SEQ ID NO:15). Table 23 below describes the starting and ending position of this segment on each transcript.

TABLE 23
Segment location on transcripts

| | Segment | Segment |
|---|---|---|
| Transcript name | starting position | ending position |
| HUMODCA_T17 (SEQ ID NO: 15) | 1078 | 1190 |

[1295] Segment cluster HUMODCA_node_{—}38 (SEQ ID NO:183) according to the present invention is supported by 272 libraries. The number of libraries was determined as previously described. This segment can be found in the following transcript(s): HUMODCA_T17 (SEQ ID NO:15). Table 24 below describes the starting and ending position of this segment on each transcript.

TABLE 24
Segment location on transcripts

| | Segment | Segment |
|---|---|---|
| Transcript name | starting position | ending position |
| HUMODCA_T17 (SEQ ID NO: 15) | 1406 | 1460 |

[1296] Segment cluster HUMODCA_node_{—}40 (SEQ ID NO:184) according to the present invention is supported by 239 libraries. The number of libraries was determined as previously described. This segment can be found in the following transcript(s): HUMODCA_T17 (SEQ ID NO:15). Table 25 below describes the starting and ending position of this segment on each transcript.

TABLE 25
Segment location on transcripts

| | Segment | Segment |
|---|---|---|
| Transcript name | starting position | ending position |
| HUMODCA_T17 (SEQ ID NO: 15) | 1634 | 1727 |

### Variant Protein Alignment to the Previously Known Protein:

[chemical structure]

[chemical structure]

[chemical structure]

[chemical structure]

[chemical structure]

[chemical structure]

[chemical structure]

[chemical structure]

[chemical structure]

[chemical structure]

[chemical structure]

[chemical structure]

[chemical structure]

[chemical structure]

[chemical structure]

[chemical structure]

[chemical structure]

[chemical structure]

[chemical structure]

[chemical structure]

[chemical structure]

### Description for Cluster R00299

[1298] Cluster R00299 features 1 transcript(s) and 12 segment(s) of interest, the names for which are given in Tables 1 and 2, respectively, the sequences themselves are given at the end of the application. The selected protein variants are given in table 3.

TABLE 1
Transcripts of interest

| Transcript Name | SEQ ID NO: |
|---|---|
| R00299_T2 | 16 |

TABLE 2
Segments of interest

| Segment Name | SEQ ID NO: |
|---|---|
| R00299_node_2 | 185 |
| R00299_node_30 | 186 |
| R00299_node_10 | 187 |
| R00299_node_14 | 188 |
| R00299_node_15 | 189 |
| R00299_node_20 | 190 |
| R00299_node_23 | 191 |
| R00299_node_25 | 192 |
| R00299_node_28 | 193 |
| R00299_node_31 | 194 |
| R00299_node_5 | 195 |
| R00299_node_9 | 196 |

TABLE 3
Proteins of interest

| Protein Name | SEQ ID NO: |
|---|---|
| R00299_P3 | 549 |

[1299] These sequences are variants of the known protein Tescalcin (SwissProt accession identifier TESC_HUMAN; known also according to the synonyms TSC), SEQ ID NO: 621, referred to herein as the previously known protein.

[1300] Protein Tescalcin is known or believed to have the following function: Binds calcium. The sequence for protein Tescalcin (SEQ ID NO:621) is given at the end of the application, as “Tescalcin amino acid sequence”.

[1301] The following GO Annotation(s) apply to the previously known protein. The following annotation(s) were found: calcium binding, which are annotation(s) related to Molecular Function.

[1302] The GO assignment relies on information from one or more of the SwissProt/TremB1 Protein knowledgebase, available from <http://www.expasy.ch/sprot/>; or Locuslink, available from <http://www.ncbi.nlm.nih.gov/projects/LocusLink/>.

[1303] Cluster R00299 can be used as a diagnostic marker according to overexpression of transcripts of this cluster in cancer. Expression of such transcripts in normal tissues is also given according to the previously described methods. The term “number” in the left hand column of the table and the numbers on the y-axis of the figure below refer to weighted expression of ESTs in each category, as “parts per million” (ratio of the expression of ESTs for a particular cluster to the expression of all ESTs in that category, according to parts per million).

[1304] Overall, the following results were obtained as shown with regard to the histograms in FIG. 18 and Table 4. This cluster is overexpressed (at least at a minimum level) in the following pathological conditions: lung malignant tumors.

TABLE 4
Normal tissue distribution

| Name of Tissue | Number |
|---|---|
| bone | 0 |
| Colon | 0 |
| epithelial | 11 |
| general | 11 |
| Liver | 0 |
| lung | 10 |
| lymph nodes | 22 |
| bone marrow | 31 |
| ovary | 0 |
| pancreas | 14 |
| prostate | 16 |
| stomach | 76 |
| T cells | 0 |
| Thyroid | 0 |

TABLE 5
P values and ratios for expression in cancerous tissue

| Name of Tissue | P1 | P2 | SP1 | R3 | SP2 | R4 |
|---|---|---|---|---|---|---|
| bone | 1 | 6.7e−01 | 1 | 1.0 | 7.0e−01 | 1.4 |
| colon | 5.0e−02 | 5.3e−02 | 2.4e−01 | 2.8 | 2.1e−01 | 2.8 |
| epithelial | 7.7e−02 | 9.5e−02 | 4.0e−01 | 1.3 | 6.1e−03 | 1.9 |
| general | 2.3e−01 | 2.6e−01 | 5.3e−01 | 1.0 | 2.6e−04 | 1.9 |
| liver | 1 | 4.5e−01 | 1 | 1.0 | 6.9e−01 | 1.5 |
| lung | 4.9e−01 | 2.7e−01 | 6.5e−01 | 1.7 | 5.6e−04 | 3.8 |
| lymph nodes | 8.5e−01 | 8.7e−01 | 1 | 0.5 | 2.0e−01 | 1.1 |
| bone marrow | 8.6e−01 | 8.5e−01 | 1 | 0.5 | 2.3e−01 | 1.4 |
| ovary | 4.0e−01 | 4.4e−01 | 1 | 1.1 | 1 | 1.1 |
| pancreas | 7.2e−01 | 6.9e−01 | 6.7e−01 | 1.0 | 3.5e−01 | 1.5 |
| prostate | 8.7e−01 | 9.1e−01 | 6.7e−01 | 1.0 | 7.5e−01 | 0.9 |
| stomach | 6.6e−01 | 7.5e−01 | 1 | 0.4 | 6.7e−01 | 0.7 |
| T cells | 1 | 6.7e−01 | 1 | 1.0 | 5.2e−01 | 1.8 |
| Thyroid | 1.8e−01 | 1.8e−01 | 6.7e−01 | 1.6 | 6.7e−01 | 1.6 |

[1305] As noted above, cluster R00299 features 1 transcript(s), which were listed in Table 1 above. These transcript(s) encode for protein(s) which are variant(s) of protein Tescalcin (SEQ ID NO:621). A description of each variant protein according to the present invention is now provided.

[1306] Variant protein R00299_P3 (SEQ ID NO:549) according to the present invention has an amino acid sequence as given at the end of the application; it is encoded by transcript(s) R00299_T2 (SEQ ID NO:16). An alignment is given to the known protein (Tescalcin (SEQ ID NO:621)) at the end of the application. One or more alignments to one or more previously published protein sequences are given at the end of the application. A brief description of the relationship of the variant protein according to the present invention to each such aligned protein is as follows:

[1307] Comparison Report Between R00299_P3 (SEQ ID NO:549) and Q9NWT9 (SEQ ID NO:1389):

[1308] 1. An isolated chimeric polypeptide encoding for R00299_P3 (SEQ ID NO:549), comprising a first amino acid sequence being at least 70%, optionally at least 80%, preferably at least 85%, more preferably at least 90% and most preferably at least 95% homologous to a polypeptide having the sequence MAEKALLCPSSAGLGTWPWVLNSAWPVLPLAVDQGVDWRPRGPV (SEQ ID NO:1492) corresponding to amino acids 1-44 of R00299_P3 (SEQ ID NO:549), second amino acid sequence being at least 90% homologous to SSDQIEQLHRRFKQLSGDQPTIRKENFNNVPDLELNPIRSKIVRAFFDNRNLRKGPSGLADEINFEDFLTIMS YFRPIDTTMDEEQVELSRKEKLRFLFHMYDSDSDGRITLEEYRNV corresponding to amino acids 74-191 of Q9NWT9 (SEQ ID NO:1389), which also corresponds to amino acids 45-162 of R00299_P3 (SEQ ID NO:549), and a third amino acid sequence being at least 70%, optionally at least 80%, preferably at least 85%, more preferably at least 90% and most preferably at least 95% homologous to a polypeptide having the sequence VEELLSGNPHIEKESARSIADGAMMEAASVCMGQMEPDQVYEGITFEDFLKIWQGIDIETKMHVRFLNME TMALCH (SEQ ID NO:1493) corresponding to amino acids 163-238 of R00299_P3 (SEQ ID NO:549), wherein said first, second and third amino acid sequences are contiguous and in a sequential order.

[1309] 2. An isolated polypeptide encoding for a head of R00299_P3 (SEQ ID NO:549), comprising a polypeptide being at least 70%, optionally at least about 80%, preferably at least about 85%, more preferably at least about 90% and most preferably at least about 95% homologous to the sequence MAEKALLCPSSAGLGTWPWVLNSAWPVLPLAVDQGVDWRPRGPV (SEQ ID NO:1492) of R00299_P3 (SEQ ID NO:549).

[1310] 3. An isolated polypeptide encoding for a tail of R00299_P3 (SEQ ID NO:549), comprising a polypeptide being at least 70%, optionally at least about 80%, preferably at least about 85%, more preferably at least about 90% and most preferably at least about 95% homologous to the sequence VEELLSGNPHIEKESARSIADGAMMEAASVCMGQMEPDQVYEGITFEDFLKIWQGIDIETKMHVRFLNME TMALCH (SEQ ID NO:1493) in R00299_P3 (SEQ ID NO:549).

[1311] Comparison Report Between R00299_P3 (SEQ ID NO:549) and TESC_HUMAN (SEQ ID NO:621):

[1312] 1. An isolated chimeric polypeptide encoding for R00299_P3 (SEQ ID NO:549), comprising a first amino acid sequence being at least 70%, optionally at least 80%, preferably at least 85%, more preferably at least 90% and most preferably at least 95% homologous to a polypeptide having the sequence MAEKALLCPSSAGLGTWPWVLNSAWPVLPLAVDQGVDWRPRGPV (SEQ ID NO:1492) corresponding to amino acids 1-44 of R00299_P3 (SEQ ID NO:549), and a second amino acid sequence being at least 90% homologous to SSDQIEQLHRRFKQLSGDQPTIRKENFNNVPDLELNPIRSKIVRAFFDNRNLRKGPSGLADEINFEDFLTIMS YFRPIDTTMDEEQVELSRKEKLRFLFHMYDSDSDGRITLEEYRNVVEELLSGNPHIEKESARSIADGAMME AASVCMGQMEPDQVYEGITFEDFLKIWQGIDIETKMHVRFLNMETMALCH corresponding to amino acids 21-214 of TESC_HUMAN (SEQ ID NO:621), which also corresponds to amino acids 45-238 of R00299_P3 (SEQ ID NO:549), wherein said first and second amino acid sequences are contiguous and in a sequential order.

[1313] 2. An isolated polypeptide encoding for a head of R00299_P3 (SEQ ID NO:549), comprising a polypeptide being at least 70%, optionally at least about 80%, preferably at least about 85%, more preferably at least about 90% and most preferably at least about 95% homologous to the sequence MAEKALLCPSSAGLGTWPWVLNSAWPVLPLAVDQGVDWRPRGPV (SEQ ID NO:1492) of R00299_P3 (SEQ ID NO:549).

[1314] The location of the variant protein was determined according to results from a number of different software programs and analyses, including analyses from SignalP and other specialized programs. The variant protein is believed to be located as follows with regard to the cell: secreted. The protein localization is believed to be secreted because one of the two signal-peptide prediction programs (HMM:Signal peptide,NN:NO) predicts that this protein has a signal peptide.

[1315] Variant protein R00299_P3 (SEQ ID NO:549) also has the following non-silent SNPs (Single Nucleotide Polymorphisms) as listed in Table 6, (given according to their position(s) on the amino acid sequence, with the alternative amino acid(s) listed; the last column indicates whether the SNP is known or not; the presence of known SNPs in variant protein R00299_P3 (SEQ ID NO:549) sequence provides support for the deduced sequence of this variant protein according to the present invention).

TABLE 6
Amino acid mutations

| SNP position(s) on amino acid | | Previously |
|---|---|---|
| sequence | Alternative amino acid(s) | known SNP? |
| 120 | R -> G | No |
| 120 | R -> W | No |

[1316] Variant protein R00299_P3 (SEQ ID NO:549) is encoded by the following transcript(s): R00299_T2 (SEQ ID NO:16), for which the sequence(s) is/are given at the end of the application. The coding portion of transcript

[1317] R00299_T2 (SEQ ID NO:16) is shown in bold; this coding portion starts at position 142 and ends at position 855. The transcript also has the following SNPs as listed in Table 7 (given according to their position on the nucleotide sequence, with the alternative nucleic acid listed; the last column indicates whether the SNP is known or not; the presence of known SNPs in variant protein R00299_P3 (SEQ ID NO:549) sequence provides support for the deduced sequence of this variant protein according to the present invention).

TABLE 7
Nucleic acid SNPs

| SNP position on | | |
|---|---|---|
| nucleotide sequence | Alternative nucleic acid | Previously known SNP? |
| 177 | C -> A | Yes |
| 499 | C -> G | No |
| 499 | C -> T | No |
| 900 | G -> T | Yes |
| 916 | G -> | No |
| 969 | G -> | No |
| 969 | G -> A | No |
| 987 | A -> C | No |

[1318] As noted above, cluster R00299 features 12 segment(s), which were listed in Table 2 above and for which the sequence(s) are given at the end of the application. These segment(s) are portions of nucleic acid sequence(s) which are described herein separately because they are of particular interest. A description of each segment according to the present invention is now provided.

[1319] Segment cluster R00299_node_{—}2 (SEQ ID NO:185) according to the present invention is supported by 3 libraries. The number of libraries was determined as previously described. This segment can be found in the following transcript(s): R00299_T2 (SEQ ID NO:16). Table 8 below describes the starting and ending position of this segment on each transcript.

TABLE 8
Segment location on transcripts

| | Segment | Segment |
|---|---|---|
| Transcript name | starting position | ending position |
| R00299_T2 (SEQ ID NO: 16) | 1 | 271 |

[1320] Segment cluster R00299_node_{—}30 (SEQ ID NO:186) according to the present invention is supported by 75 libraries. The number of libraries was determined as previously described. This segment can be found in the following transcript(s): R00299_T2 (SEQ ID NO:16). Table 9 below describes the starting and ending position of this segment on each transcript.

TABLE 9
Segment location on transcripts

| | Segment | Segment |
|---|---|---|
| Transcript name | starting position | ending position |
| R00299_T2 (SEQ ID NO: 16) | 790 | 961 |

[1321] According to an optional embodiment of the present invention, short segments related to the above cluster are also provided. These segments are up to about 120 bp in length, and so are included in a separate description.

[1322] Segment cluster R00299_node_{—}10 (SEQ ID NO:187) according to the present invention is supported by 46 libraries. The number of libraries was determined as previously described. This segment can be found in the following transcript(s): R00299_T2 (SEQ ID NO:16). Table 10 below describes the starting and ending position of this segment on each transcript.

TABLE 10
Segment location on transcripts

| | Segment | Segment |
|---|---|---|
| Transcript name | starting position | ending position |
| R00299_T2 (SEQ ID NO: 16) | 346 | 422 |

[1323] Segment cluster R00299_node_{—}14 (SEQ ID NO:188) according to the present invention is supported by 61 libraries. The number of libraries was determined as previously described. This segment can be found in the following transcript(s): R00299_T2 (SEQ ID NO:16). Table 11 below describes the starting and ending position of this segment on each transcript.

TABLE 11
Segment location on transcripts

| | Segment | Segment |
|---|---|---|
| Transcript name | starting position | ending position |
| R00299_T2 (SEQ ID NO: 16) | 423 | 537 |

[1324] Segment cluster R00299_node_{—}15 (SEQ ID NO:189) according to the present invention can be found in the following transcript(s): R00299_T2 (SEQ ID NO:16). Table 12 below describes the starting and ending position of this segment on each transcript.

TABLE 12
Segment location on transcripts

| | Segment | Segment |
|---|---|---|
| Transcript name | starting position | ending position |
| R00299_T2 (SEQ ID NO: 16) | 538 | 562 |

[1325] Segment cluster R00299_node_{—}20 (SEQ ID NO:190) according to the present invention is supported by 66 libraries. The number of libraries was determined as previously described. This segment can be found in the following transcript(s): R00299_T2 (SEQ ID NO:16). Table 13 below describes the starting and ending position of this segment on each transcript.

TABLE 13
Segment location on transcripts

| | Segment | Segment |
|---|---|---|
| Transcript name | starting position | ending position |
| R00299_T2 (SEQ ID NO: 16) | 563 | 624 |

[1326] Segment cluster R00299_node_{—}23 (SEQ ID NO:191) according to the present invention is supported by 71 libraries. The number of libraries was determined as previously described. This segment can be found in the following transcript(s): R00299_T2 (SEQ ID NO:16). Table 14 below describes the starting and ending position of this segment on each transcript.

TABLE 14
Segment location on transcripts

| | Segment | Segment |
|---|---|---|
| Transcript name | starting position | ending position |
| R00299_T2 (SEQ ID NO: 16) | 625 | 732 |

[1327] Segment cluster R00299_node_{—}25 (SEQ ID NO:192) according to the present invention is supported by 62 libraries. The number of libraries was determined as previously described. This segment can be found in the following transcript(s): R00299_T2 (SEQ ID NO:16). Table 15 below describes the starting and ending position of this segment on each transcript.

TABLE 15
Segment location on transcripts

| | Segment | Segment |
|---|---|---|
| Transcript name | starting position | ending position |
| R00299_T2 (SEQ ID NO: 16) | 733 | 780 |

[1328] Segment cluster R00299_node_{—}28 (SEQ ID NO:193) according to the present invention can be found in the following transcript(s): R00299_T2 (SEQ ID NO:16). Table 16 below describes the starting and ending position of this segment on each transcript.

TABLE 16
Segment location on transcripts

| | Segment | Segment |
|---|---|---|
| Transcript name | starting position | ending position |
| R00299_T2 (SEQ ID NO: 16) | 781 | 789 |

[1329] Segment cluster R00299_node_{—}31 (SEQ ID NO:194) according to the present invention is supported by 48 libraries. The number of libraries was determined as previously described. This segment can be found in the following transcript(s): R00299_T2 (SEQ ID NO:16). Table 17 below describes the starting and ending position of this segment on each transcript.

TABLE 17
Segment location on transcripts

| | Segment | Segment |
|---|---|---|
| Transcript name | starting position | ending position |
| R00299_T2 (SEQ ID NO: 16) | 962 | 1069 |

[1330] Segment cluster R00299_node_{—}5 (SEQ ID NO:195) according to the present invention is supported by 45 libraries. The number of libraries was determined as previously described. This segment can be found in the following transcript(s): R00299_T2 (SEQ ID NO:16). Table 18 below describes the starting and ending position of this segment on each transcript.

TABLE 18
Segment location on transcripts

| | Segment | Segment |
|---|---|---|
| Transcript name | starting position | ending position |
| R00299_T2 (SEQ ID NO: 16) | 272 | 341 |

[1331] Segment cluster R00299_node_{—}9 (SEQ ID NO:196) according to the present invention can be found in the following transcript(s): R00299_T2 (SEQ ID NO:16). Table 19 below describes the starting and ending position of this segment on each transcript.

TABLE 19
Segment location on transcripts

| | Segment | Segment |
|---|---|---|
| Transcript name | starting position | ending position |
| R00299_T2 (SEQ ID NO: 16) | 342 | 345 |

[1332] Microarray (chip) data is also available for this gene as follows. As described above with regard to the cluster itself, various oligonucleotides were tested for being differentially expressed in various disease conditions, particularly cancer. The following oligonucleotide was found to hit this segment with regard to colon cancer, shown in Table 20.

TABLE 20
Oligonucleotide related to this gene

| | Overexpressed | |
|---|---|---|
| Oligonucleotide name | in cancers | Chip reference |
| R00299_0_8_0 (SEQ ID NO: 1404) | Colon cancer | Colon |

### Variant Protein Alignment to the Previously Known Protein:

[chemical structure]

[chemical structure]

[chemical structure]

[chemical structure]

[chemical structure]

[chemical structure]

[chemical structure]

### Description for Cluster Z19178

[1334] Cluster Z19178 features 2 transcript(s) and 15 segment(s) of interest, the names for which are given in Tables 1 and 2, respectively, the sequences themselves are given at the end of the application. The selected protein variants are given in table 3.

TABLE 1
Transcripts of interest

| Transcript Name | SEQ ID NO: |
|---|---|
| Z19178_PEA_1_T5 | 17 |
| Z19178_PEA_1_T9 | 18 |

TABLE 2
Segments of interest

| Segment Name | SEQ ID NO: |
|---|---|
| Z19178_PEA_1_node_15 | 197 |
| Z19178_PEA_1_node_17 | 198 |
| Z19178_PEA_1_node_2 | 199 |
| Z19178_PEA_1_node_22 | 200 |
| Z19178_PEA_1_node_23 | 201 |
| Z19178_PEA_1_node_24 | 202 |
| Z19178_PEA_1_node_10 | 203 |
| Z19178_PEA_1_node_11 | 204 |
| Z19178_PEA_1_node_14 | 205 |
| Z19178_PEA_1_node_18 | 206 |
| Z19178_PEA_1_node_19 | 207 |
| Z19178_PEA_1_node_3 | 208 |
| Z19178_PEA_1_node_4 | 209 |
| Z19178_PEA_1_node_5 | 210 |
| Z19178_PEA_1_node_9 | 211 |

TABLE 3
Proteins of interest

| Protein Name | SEQ ID NO: |
|---|---|
| Z19178_PEA_1_P5 | 550 |
| Z19178_PEA_1_P6 | 551 |

[1335] These sequences are variants of the known protein Skeletal muscle LIM-protein 2 (SwissProt accession identifier SLI2_HUMAN; known also according to the synonyms SLIM 2; Four and a half LIM domains protein 3; FHL-3), SEQ ID NO: 622, referred to herein as the previously known protein.

[1336] The sequence for protein Skeletal muscle LIM-protein 2 is given at the end of the application, as “Skeletal muscle LIM-protein 2 amino acid sequence” (SEQ ID NO: 622).

[1337] The following GO Annotation(s) apply to the previously known protein. The following annotation(s) were found: muscle development, which are annotation(s) related to Biological Process.

[1338] The GO assignment relies on information from one or more of the SwissProt/TremB1 Protein knowledgebase, available from <http://www.expasy.chlsprot/>; or Locuslink, available from <http://www.ncbi.nlm.nih.gov/projects/LocusLink/>.

[1339] As noted above, cluster Z19178 features 2 transcript(s), which were listed in Table 1 above. These transcript(s) encode for protein(s) which are variant(s) of protein Skeletal muscle LIM-protein 2 (SEQ ID NO:622). A description of each variant protein according to the present invention is now provided.

[1340] Variant protein Z19178_PEA_{—}1_P5 (SEQ ID NO:550) according to the present invention has an amino acid sequence as given at the end of the application; it is encoded by transcript(s) Z19178_PEA_{—}1_T5 (SEQ ID NO:17). An alignment is given to the known protein (Skeletal muscle LIM-protein 2 (SEQ ID NO:622)) at the end of the application. One or more alignments to one or more previously published protein sequences are given at the end of the application. A brief description of the relationship of the variant protein according to the present invention to each such aligned protein is as follows:

### Comparison Report Between Z19178_PEA_{—}1_P5 (SEQ ID NO:550) and Q96C98 (SEQ ID NO:1390):

[1341] 1. An isolated chimeric polypeptide encoding for Z19178_PEA_{—}1_P5 (SEQ ID NO:550), comprising a first amino acid sequence being at least 70%, optionally at least 80%, preferably at least 85%, more preferably at least 90% and most preferably at least 95% homologous to a polypeptide having the sequence GGGGRADWRPKGRWGRGLAPAAGWGAGVRGPGGAGPRSLPRGGVGAALPLAHTVRLQSAASPAARSA PAWPGPQELFYEDRHFHEGCFRCCRCQRSLADEPFTCQDSELLCNDCYCSAFSSQCSACGETV (SEQ ID NO:1494) corresponding to amino acids 1-130 of Z19178_PEA_{—}1_P5 (SEQ ID NO:550), and a second amino acid sequence being at least 90% homologous to MPGSRKLEYGGQTWHEHCFLCSGCEQPLGSRSFVPDKGAHYCVPCYENKFAPRCARCSKTLTQGGVTYR DQPWHRECLVCTGCQTPLAGQQFTSRDEDPYCVACFGELFAPKCSSCKRPIVGLGGGKYVSFEDRHWHH NCFSCARCSTSLVGQGFVPDGDQVLCQGCSQAGP corresponding to amino acids 1-172 of Q96C98 (SEQ ID NO:1390), which also corresponds to amino acids 131-302 of Z19178_PEA_{—}1_P5 (SEQ ID NO:550), wherein said first and second amino acid sequences are contiguous and in a sequential order.

[1342] 2. An isolated polypeptide encoding for a head of Z19178_PEA_{—}1_P5 (SEQ ID NO:550), comprising a polypeptide being at least 70%, optionally at least about 80%, preferably at least about 85%, more preferably at least about 90% and most preferably at least about 95% homologous to the sequence GGGGRADWRPKGRWGRGLAPAAGWGAGVRGPGGAGPRSLPRGGVGAALPLAHTVRLQSAASPAARSA PAWPGPQELFYEDRHFHEGCFRCCRCQRSLADEPFTCQDSELLCNDCYCSAFSSQCSACGETV (SEQ ID NO:1494) of Z19178_PEA_{—}1_P5 (SEQ ID NO:550).

[1343] Comparison Report Between Z19178_PEA_{—}1_P5 (SEQ ID NO:550) and Q9BVA2 (SEQ ID NO:1391):

[1344] 1. An isolated chimeric polypeptide encoding for Z19178_PEA_L_P5 (SEQ ID NO:550), comprising a first amino acid sequence being at least 70%, optionally at least 80%, preferably at least 85%, more preferably at least 90% and most preferably at least 95% homologous to a polypeptide having the sequence GGGGRADWRPKGRWGRGLAPAAGWGAGVRGPGGAGPRSLPRGGVGAALPLAHTVRLQSAASPAARSA PAWPGPQ corresponding to amino acids 1-74 of Z19178_PEA_{—}1_P5 (SEQ ID NO:550), and a second amino acid sequence being at least 90% homologous to ELFYEDRHFHEGCFRCCRCQRSLADEPFTCQDSELLCNDCYCSAFSSQCSACGETVMPGSRKLEYGGQTW HEHCFLCSGCEQPLGSRSFVPDKGAHYCVPCYENKFAPRCARCSKTLTQGGVTYRDQPWHRECLVCTGC QTPLAGQQFTSRDEDPYCVACFGELFAPKCSSCKRPIVGLGGGKYVSFEDRHWHHNCFSCARCSTSLVGQ GFVPDGDQVLCQGCSQAGP corresponding to amino acids 53-280 of Q9BVA2 (SEQ ID NO:1391), which also corresponds to amino acids 75-302 of Z19178_PEA_{—}1_P5 (SEQ ID NO:550), wherein said first and second amino acid sequences are contiguous and in a sequential order.

[1345] 2. An isolated polypeptide encoding for a head of Z19178_PEA_{—}1_P5 (SEQ ID NO:550), comprising a polypeptide being at least 70%, optionally at least about 80%, preferably at least about 85%, more preferably at least about 90% and most preferably at least about 95% homologous to the sequence GGGGRADWRPKGRWGRGLAPAAGWGAGVRGPGGAGPRSLPRGGVGAALPLAHTVRLQSAASPAARSA PAWPGPQ of Z19178_PEA_{—}1_P5 (SEQ ID NO:550).

[1346] The location of the variant protein was determined according to results from a number of different software programs and analyses, including analyses from SignalP and other specialized programs. The variant protein is believed to be located as follows with regard to the cell: secreted. The protein localization is believed to be secreted because one of the two signal-peptide prediction programs (HMM:Signal peptide,NN:NO) predicts that this protein has a signal peptide.

[1347] Variant protein Z19178_PEA_{—}1_P5 (SEQ ID NO:550) also has the following non-silent SNPs (Single Nucleotide Polymorphisms) as listed in Table 4, (given according to their position(s) on the amino acid sequence, with the alternative amino acid(s) listed; the last column indicates whether the SNP is known or not; the presence of known SNPs in variant protein Z19178_PEA_{—}1_P5 (SEQ ID NO:550) sequence provides support for the deduced sequence of this variant protein according to the present invention).

TABLE 4
Amino acid mutations

| SNP position(s) on amino | Alternative | Previously |
|---|---|---|
| acid sequence | amino acid(s) | known SNP? |
| 247 | K -> | No |
| 278 | T -> N | No |

[1348] Variant protein Z19178_PEA_{—}1_P5 (SEQ ID NO:550) is encoded by the following transcript(s): Z19178_PEA_{—}1_T5 (SEQ ID NO:17), for which the sequence(s) is/are given at the end of the application. The coding portion of transcript Z19178_PEA_{—}1_T5 (SEQ ID NO:17) is shown in bold; this coding portion starts at position 1 and ends at position 907. The transcript also has the following SNPs as listed in Table 5 (given according to their position on the nucleotide sequence, with the alternative nucleic acid listed; the last column indicates whether the SNP is known or not; the presence of known SNPs in variant protein Z19178_PEA_{—}1_P5 (SEQ ID NO:550) sequence provides support for the deduced sequence of this variant protein according to the present invention).

TABLE 5
Nucleic acid SNPs

| SNP position on | Alternative | Previously |
|---|---|---|
| nucleotide sequence | nucleic acid | known SNP? |
| 607 | G -> A | Yes |
| 742 | G -> | No |
| 834 | C -> A | No |
| 1082 | C -> G | Yes |
| 1089 | T -> A | Yes |
| 1110 | C -> T | Yes |
| 1236 | C -> T | Yes |
| 1326 | C -> T | No |
| 1450 | C -> T | No |
| 1523 | C -> T | No |

[1349] Variant protein Z19178_PEA_{—}1_P6 (SEQ ID NO:551) according to the present invention has an amino acid sequence as given at the end of the application; it is encoded by transcript(s) Z19178_PEA_{—}1_T9 (SEQ ID NO:18). An alignment is given to the known protein (Skeletal muscle LIM-protein 2 (SEQ ID NO:622)) at the end of the application. One or more alignments to one or more previously published protein sequences are given at the end of the application. A brief description of the relationship of the variant protein according to the present invention to each such aligned protein is as follows:

[1350] Comparison Report Between Z19178_PEA_{—}1_P6 (SEQ ID NO:551) and Q96C98 (SEQ ID NO:1390):

[1351] 1. An isolated chimeric polypeptide encoding for Z19178_PEA_{—}1_P6 (SEQ ID NO:551), comprising a first amino acid sequence being at least 70%, optionally at least 80%, preferably at least 85%, more preferably at least 90% and most preferably at least 95% homologous to a polypeptide having the sequence MNPSPARTVSCSAMTATAVRFPRSAPLVGRLSCL (SEQ ID NO:1495) corresponding to amino acids 1-34 of Z19178_PEA_{—}1_P6 (SEQ ID NO:551), and a second amino acid sequence being at least 90% homologous to TLTQGGVTYRDQPWHRECLVCTGCQTPLAGQQFTSRDEDPYCVACFGELFAPKCSSCKRPIVGLGGGKYV SFEDRHWHHNCFSCARCSTSLVGQGFVPDGDQVLCQGCSQAGP corresponding to amino acids 60-172 of Q96C98 (SEQ ID NO:1390), which also corresponds to amino acids 35-147 of Z19178_PEA_{—}1_P6 (SEQ ID NO:551), wherein said first and second amino acid sequences are contiguous and in a sequential order.

[1352] 2. An isolated polypeptide encoding for a head of Z19178_PEA_{—}1_P6 (SEQ ID NO:551), comprising a polypeptide being at least 70%, optionally at least about 80%, preferably at least about 85%, more preferably at least about 90% and most preferably at least about 95% homologous to the sequence MNPSPARTVSCSAMTATAVRFPRSAPLVGRLSCL (SEQ ID NO:1495) of Z19178_PEA_{—}6 (SEQ ID NO:551).

[1353] Comparison Report Between Z19178_PEA_{—}1_P6 (SEQ ID NO:551) and Q9BVA2 (SEQ ID NO:1391):

[1354] 1. An isolated chimeric polypeptide encoding for Z19178_PEA_{—}1_P6 (SEQ ID NO:551), comprising a first amino acid sequence being at least 70%, optionally at least 80%, preferably at least 85%, more preferably at least 90% and most preferably at least 95% homologous to a polypeptide having the sequence MNPSPARTVSCSAMTATAVRFPRSAPLVGRLSCL (SEQ ID NO:1495) corresponding to amino acids 1-34 of Z19178_PEA_{—}1_P6 (SEQ ID NO:551), and a second amino acid sequence being at least 90% homologous to TLTQGGVTYRDQPWHRECLVCTGCQTPLAGQQFTSRDEDPYCVACFGELFAPKCSSCKRPIVGLGGGKYV SFEDRHWHHNCFSCARCSTSLVGQGFVPDGDQVLCQGCSQAGP corresponding to amino acids 168-280 of Q9BVA2 (SEQ ID NO:1391), which also corresponds to amino acids 35-147 of Z19178_PEA_{—}1_P6 (SEQ ID NO:551), wherein said first and second amino acid sequences are contiguous and in a sequential order.

[1355] 2. An isolated polypeptide encoding for a head of Z19178_PEA_{—}1_P6 (SEQ ID NO:551), comprising a polypeptide being at least 70%, optionally at least about 80%, preferably at least about 85%, more preferably at least about 90% and most preferably at least about 95% homologous to the sequence MNPSPARTVSCSAMTATAVRFPRSAPLVGRLSCL (SEQ ID NO:1495) of Z19178_PEA_{—}1_P6 (SEQ ID NO:551).

[1356] The location of the variant protein was determined according to results from a number of different software programs and analyses, including analyses from SignalP and other specialized programs. The variant protein is believed to be located as follows with regard to the cell: secreted. The protein localization is believed to be secreted because one of the two signal-peptide prediction programs (HMM:Signal peptide,NN:NO) predicts that this protein has a signal peptide.

[1357] Variant protein Z19178_PEA_{—}1_P6 (SEQ ID NO:551) also has the following non-silent SNPs (Single Nucleotide Polymorphisms) as listed in Table 6, (given according to their position(s) on the amino acid sequence, with the alternative amino acid(s) listed; the last column indicates whether the SNP is known or not; the presence of known SNPs in variant protein Z19178_PEA_{—}1_P6 (SEQ ID NO:551) sequence provides support for the deduced sequence of this variant protein according to the present invention).

TABLE 6
Amino acid mutations

| SNP position(s) on amino | Alternative | Previously |
|---|---|---|
| acid sequence | amino acid(s) | known SNP? |
| 123 | T -> N | No |
| 92 | K -> | No |

[1358] Variant protein Z19178_PEA_{—}1_P6 (SEQ ID NO:551) is encoded by the following transcript(s): Z19178_PEA_{—}1_T9 (SEQ ID NO:18), for which the sequence(s) is/are given at the end of the application. The coding portion of transcript Z19178_PEA_{—}1_T9 (SEQ ID NO:18) is shown in bold; this coding portion starts at position 379 and ends at position 819. The transcript also has the following SNPs as listed in Table 7 (given according to their position on the nucleotide sequence, with the alternative nucleic acid listed; the last column indicates whether the SNP is known or not; the presence of known SNPs in variant protein Z19178_PEA_{—}1_P6 (SEQ ID NO:551) sequence provides support for the deduced sequence of this variant protein according to the present invention).

TABLE 7
Nucleic acid SNPs

| SNP position on | Alternative | Previously |
|---|---|---|
| nucleotide sequence | nucleic acid | known SNP? |
| 519 | G -> A | Yes |
| 654 | G -> | No |
| 746 | C -> A | No |
| 994 | C -> G | Yes |
| 1001 | T -> A | Yes |
| 1022 | C -> T | Yes |
| 1148 | C -> T | Yes |
| 1238 | C -> T | No |
| 1362 | C -> T | No |
| 1435 | C -> T | No |

[1359] As noted above, cluster Z19178 features 15 segment(s), which were listed in Table 2 above and for which the sequence(s) are given at the end of the application. These segment(s) are portions of nucleic acid sequence(s) which are described herein separately because they are of particular interest. A description of each segment according to the present invention is now provided.

[1360] Segment cluster Z19178_PEA_{—}1_node_{—}15 (SEQ ID NO:197) according to the present invention is supported by 50 libraries. The number of libraries was determined as previously described. This segment can be found in the following transcript(s): Z19178_PEA_{—}1_T5 (SEQ ID NO:17). Table 8 below describes the starting and ending position of this segment on each transcript.

TABLE 8
Segment location on transcripts

| | Segment | |
|---|---|---|
| | starting | Segment |
| Transcript name | position | ending position |
| Z19178_PEA_1_T5 (SEQ ID NO: 17) | 449 | 568 |

[1361] Segment cluster Z19178_PEA_{—}1_node_{—}17 (SEQ ID NO:198) according to the present invention is supported by 50 libraries. The number of libraries was determined as previously described. This segment can be found in the following transcript(s): Z19178_PEA_{—}1_T5 (SEQ ID NO:17) and Z19178_PEA_{—}1_T19 (SEQ ID NO:18). Table 9 below describes the starting and ending position of this segment on each transcript.

TABLE 9
Segment location on transcripts

| | Segment | Segment |
|---|---|---|
| | starting | ending |
| Transcript name | position | position |
| Z19178_PEA_1_T5 (SEQ ID NO: 17) | 569 | 699 |
| Z19178_PEA_1_T9 (SEQ ID NO: 18) | 481 | 611 |

[1362] Segment cluster Z19178_PEA_{—}1_node_{—}2 (SEQ ID NO:199) according to the present invention is supported by 43 libraries. The number of libraries was determined as previously described. This segment can be found in the following transcript(s): Z19178_PEA_{—}1_T5 (SEQ ID NO:17) and Z19178_PEA_{—}1_T9 (SEQ ID NO:18). Table 10 below describes the starting and ending position of this segment on each transcript.

TABLE 10
Segment location on transcripts

| | Segment | Segment |
|---|---|---|
| | starting | ending |
| Transcript name | position | position |
| Z19178_PEA_1_T5 (SEQ ID NO: 17) | 1 | 217 |
| Z19178_PEA_1_T9 (SEQ ID NO: 18) | 1 | 217 |

[1363] Segment cluster Z19178_PEA_{—}1_node_{—}22 (SEQ ID NO:200) according to the present invention is supported by 61 libraries. The number of libraries was determined as previously described. This segment can be found in the following transcript(s): Z19178_PEA_{—}1_T5 (SEQ ID NO:17) and Z19178_PEA_{—}1_T9 (SEQ ID NO:18). Table 11 below describes the starting and ending position of this segment on each transcript.

TABLE 11
Segment location on transcripts

| | Segment | Segment |
|---|---|---|
| | starting | ending |
| Transcript name | position | position |
| Z19178_PEA_1_T5 (SEQ ID NO: 17) | 756 | 1000 |
| Z19178_PEA_1_T9 (SEQ ID NO: 18) | 668 | 912 |

[1364] Segment cluster Z19178_PEA_{—}1_node_{—}23 (SEQ ID NO:201) according to the present invention is supported by 81 libraries. The number of libraries was determined as previously described. This segment can be found in the following transcript(s): Z19178_PEA_{—}1_T5 (SEQ ID NO:17) and Z19178_PEA_{—}1_T19 (SEQ ID NO:18). Table 12 below describes the starting and ending position of this segment on each transcript.

TABLE 12
Segment location on transcripts

| | Segment | Segment |
|---|---|---|
| | starting | ending |
| Transcript name | position | position |
| Z19178_PEA_1_T5 (SEQ ID NO: 17) | 1001 | 1404 |
| Z19178_PEA_1_T9 (SEQ ID NO: 18) | 913 | 1316 |

[1365] Segment cluster Z19178_PEA_{—}1_node_{—}24 (SEQ ID NO:202) according to the present invention is supported by 58 libraries. The number of libraries was determined as previously described. This segment can be found in the following transcript(s): Z19178_PEA_{—}1_T5 (SEQ ID NO:17) and Z19178_PEA_{—}1_T9 (SEQ ID NO:18). Table 13 below describes the starting and ending position of this segment on each transcript.

TABLE 13
Segment location on transcripts

| | Segment | Segment |
|---|---|---|
| | starting | ending |
| Transcript name | position | position |
| Z19178_PEA_1_T5 (SEQ ID NO: 17) | 1405 | 1554 |
| Z19178_PEA_1_T9 (SEQ ID NO: 18) | 1317 | 1466 |

[1366] According to an optional embodiment of the present invention, short segments related to the above cluster are also provided. These segments are up to about 120 bp in length, and so are included in a separate description.

[1367] Segment cluster Z19178_PEA_{—}1_node_{—}10 (SEQ ID NO:203) according to the present invention is supported by 60 libraries. The number of libraries was determined as previously described. This segment can be found in the following transcript(s): Z19178_PEA_{—}1_T5 (SEQ ID NO:17) and Z19178_PEA_{—}1_T19 (SEQ ID NO:18). Table 14 below describes the starting and ending position of this segment on each transcript.

TABLE 14
Segment location on transcripts

| | Segment | Segment |
|---|---|---|
| | starting | ending |
| Transcript name | position | position |
| Z19178_PEA_1_T5 (SEQ ID NO: 17) | 277 | 325 |
| Z19178_PEA_1_T9 (SEQ ID NO: 18) | 359 | 407 |

[1368] Segment cluster Z19178_PEA_{—}1_node_{—}11 (SEQ ID NO:204) according to the present invention is supported by 56 libraries. The number of libraries was determined as previously described. This segment can be found in the following transcript(s): Z19178_PEA_{—}1_T5 (SEQ ID NO:17) and Z19178_PEA_{—}1_T19 (SEQ ID NO:18). Table 15 below describes the starting and ending position of this segment on each transcript.

TABLE 15
Segment location on transcripts

| | Segment | Segment |
|---|---|---|
| | starting | ending |
| Transcript name | position | position |
| Z19178_PEA_1_T5 (SEQ ID NO: 17) | 326 | 398 |
| Z19178_PEA_1_T9 (SEQ ID NO: 18) | 408 | 480 |

[1369] Segment cluster Z19178_PEA_{—}1_node_{—}14 (SEQ ID NO:205) according to the present invention is supported by 53 libraries. The number of libraries was determined as previously described. This segment can be found in the following transcript(s): Z19178_PEA_{—}1_T5 (SEQ ID NO:17). Table 16 below describes the starting and ending position of this segment on each transcript.

TABLE 16
Segment location on transcripts

| | Segment | Segment |
|---|---|---|
| | starting | ending |
| Transcript name | position | position |
| Z19178_PEA_1_T5 (SEQ ID NO: 17) | 399 | 448 |

[1370] Segment cluster Z19178_PEA_{—}1_node_{—}18 (SEQ ID NO:206) according to the present invention is supported by 47 libraries. The number of libraries was determined as previously described. This segment can be found in the following transcript(s): Z19178_PEA_{—}1_T5 (SEQ ID NO:17) and Z19178_PEA_{—}1_T9 (SEQ ID NO:18). Table 17 below describes the starting and ending position of this segment on each transcript.

TABLE 17
Segment location on transcripts

| | Segment | Segment |
|---|---|---|
| | starting | ending |
| Transcript name | position | position |
| Z19178_PEA_1_T5 (SEQ ID NO: 17) | 700 | 751 |
| Z19178_PEA_1_T9 (SEQ ID NO: 18) | 612 | 663 |

[1371] Segment cluster Z19178_PEA_{—}1_node_{—}19 (SEQ ID NO:207) according to the present invention can be found in the following transcript(s): Z19178_PEA_{—}1_T5 (SEQ ID NO:17) and Z19178_PEA_{—}1_T19 (SEQ ID NO:18). Table 18 below describes the starting and ending position of this segment on each transcript.

TABLE 18
Segment location on transcripts

| | Segment | Segment |
|---|---|---|
| | starting | ending |
| Transcript name | position | position |
| Z19178_PEA_1_T5 (SEQ ID NO: 17) | 752 | 755 |
| Z19178_PEA_1_T9 (SEQ ID NO: 18) | 664 | 667 |

[1372] Segment cluster Z19178_PEA_{—}1_node_{—}3 (SEQ ID NO:208) according to the present invention can be found in the following transcript(s): Z19178_PEA_{—}1_T5 (SEQ ID NO:17) and Z19178_PEA_{—}1_T9 (SEQ ID NO:18). Table 19 below describes the starting and ending position of this segment on each transcript.

TABLE 19
Segment location on transcripts

| | Segment | Segment |
|---|---|---|
| | starting | ending |
| Transcript name | position | position |
| Z19178_PEA_1_T5 (SEQ ID NO: 17) | 218 | 223 |
| Z19178_PEA_1_T9 (SEQ ID NO: 18) | 218 | 223 |

[1373] Segment cluster Z19178_PEA_{—}1_node_{—}4 (SEQ ID NO:209) according to the present invention is supported by 29 libraries. The number of libraries was determined as previously described. This segment can be found in the following transcript(s): Z19178_PEA_{—}1_T9 (SEQ ID NO:18). Table 20 below describes the starting and ending position of this segment on each transcript.

TABLE 20
Segment location on transcripts

| | Segment | Segment |
|---|---|---|
| | starting | ending |
| Transcript name | position | position |
| Z19178_PEA_1_T9 (SEQ ID NO: 18) | 224 | 266 |

[1374] Segment cluster Z19178_PEA_{—}1_node_{—}5 (SEQ ID NO:210) according to the present invention is supported by 31 libraries. The number of libraries was determined as previously described. This segment can be found in the following transcript(s): Z19178_PEA_{—}1_T9 (SEQ ID NO:18). Table 21 below describes the starting and ending position of this segment on each transcript.

TABLE 21
Segment location on transcripts

| | Segment | Segment |
|---|---|---|
| | starting | ending |
| Transcript name | position | position |
| Z19178_PEA_1_T9 (SEQ ID NO: 18) | 267 | 305 |

[1375] Segment cluster Z19178_PEA_{—}1_node_{—}9 (SEQ ID NO:211) according to the present invention is supported by 58 libraries. The number of libraries was determined as previously described. This segment can be found in the following transcript(s): Z19178_PEA_{—}1_T5 (SEQ ID NO:17) and Z19178_PEA_{—}1_T9 (SEQ ID NO:18). Table 22 below describes the starting and ending position of this segment on each transcript.

TABLE 22
Segment location on transcripts

| | Segment | Segment |
|---|---|---|
| | starting | ending |
| Transcript name | position | position |
| Z19178_PEA_1_T5 (SEQ ID NO: 17) | 224 | 276 |
| Z19178_PEA_1_T9 (SEQ ID NO: 18) | 306 | 358 |

### Variant Protein Alignment to the Previously Known Protein:

[chemical structure]

[chemical structure]

[chemical structure]

[chemical structure]

[chemical structure]

[chemical structure]

[chemical structure]

[chemical structure]

[chemical structure]

[chemical structure]

[chemical structure]

[chemical structure]

[chemical structure]

[chemical structure]

[chemical structure]

[chemical structure]

[chemical structure]

[chemical structure]

[chemical structure]

[chemical structure]

[chemical structure]

[chemical structure]

[chemical structure]

### Description for Cluster S67314

[1377] Cluster S67314 features 4 transcript(s) and 8 segment(s) of interest, the names for which are given in Tables 1 and 2, respectively, the sequences themselves are given at the end of the application. The selected protein variants are given in table 3.

TABLE 1
Transcripts of interest

| Transcript Name | SEQ ID NO: |
|---|---|
| S67314_PEA_1_T4 | 19 |
| S67314_PEA_1_T5 | 20 |
| S67314_PEA_1_T6 | 21 |
| S67314_PEA_1_T7 | 22 |

TABLE 2
Segments of interest

| Segment Name | SEQ ID NO: |
|---|---|
| S67314_PEA_1_node_0 | 212 |
| S67314_PEA_1_node_11 | 213 |
| S67314_PEA_1_node_13 | 214 |
| S67314_PEA_1_node_15 | 215 |
| S67314_PEA_1_node_17 | 216 |
| S67314_PEA_1_node_4 | 217 |
| S67314_PEA_1_node_10 | 218 |
| S67314_PEA_1_node_3 | 219 |

TABLE 3
Proteins of interest

| Protein Name | SEQ ID NO: |
|---|---|
| S67314_PEA_1_P4 | 552 |
| S67314_PEA_1_P5 | 553 |
| S67314_PEA_1_P6 | 554 |
| S67314_PEA_1_P7 | 555 |

[1378] These sequences are variants of the known protein Fatty acid-binding protein, heart (SwissProt accession identifier FABH_HUMAN; known also according to the synonyms H-FABP; Muscle fatty acid-binding protein; M-FABP; Mammary-derived growth inhibitor; MDGI), SEQ ID NO: 623, referred to herein as the previously known protein.

[1379] Protein Fatty acid-binding protein (SEQ ID NO:623), heart is known or believed to have the following function(s): FABP are thought to play a role in the intracellular transport of long-chain fatty acids and their acyl-CoA esters. The sequence for protein Fatty acid-binding protein, heart is given at the end of the application, as “Fatty acid-binding protein, heart amino acid sequence”. Known polymorphisms for this sequence are as shown in Table 4.

TABLE 4
Amino acid mutations for Known Protein

| SNP position(s) on amino | |
|---|---|
| acid sequence | Comment |
| 1 | V -> A |
| 104 | L -> K |
| 124 | C -> S |
| 129 | E -> Q |

[1380] Protein Fatty acid-binding protein (SEQ ID NO:623), heart localization is believed to be Cytoplasmic.

[1381] The following GO Annotation(s) apply to the previously known protein. The following annotation(s) were found: negative control of cell proliferation, which are annotation(s) related to Biological Process; and lipid binding, which are annotation(s) related to Molecular Function.

[1382] The GO assignment relies on information from one or more of the SwissProt/TremB1 Protein knowledgebase, available from <http://www.expasy.ch/sprot/>; or Locuslink, available from <http://www.ncbi.nlm.nih.gov/projects/LocusLink/>.

[1383] As noted above, cluster S67314 features 4 transcript(s), which were listed in Table 1 above. These transcript(s) encode for protein(s) which are variant(s) of protein Fatty acid-binding protein (SEQ ID NO:623), heart. A description of each variant protein according to the present invention is now provided.

[1384] Variant protein S67314_PEA_{—}1_P4 (SEQ ID NO:552) according to the present invention has an amino acid sequence as given at the end of the application; it is encoded by transcript(s) S67314_PEA_{—}1_T4 (SEQ ID NO:19).

[1385] An alignment is given to the known protein (Fatty acid-binding protein (SEQ ID NO:623), heart) at the end of the application. One or more alignments to one or more previously published protein sequences are given at the end of the application. A brief description of the relationship of the variant protein according to the present invention to each such aligned protein is as follows:

[1386] Comparison Report Between S67314_PEA_{—}1_P4 (SEQ ID NO:552) and FABH_HUMAN (SEQ ID NO:623):

[1387] 1. An isolated chimeric polypeptide encoding for S67314_PEA_{—}1_P4 (SEQ ID NO:552), comprising a first amino acid sequence being at least 70%, optionally at least 80%, preferably at least 85%, more preferably at least 90% and most preferably at least 95% homologous to a polypeptide having the sequence MVDAFLGTWKLVDSKNFDDYMKSLGVGFATRQVASMTKPTTIIEKNGDILTLKTHSTFKNTEISFKLGVEF DETTADDRKVKSIVTLDGGKLVHLQKWDGQETTLVRELIDGKLIL corresponding to amino acids 1-116 of FABH_HUMAN (SEQ ID NO:623), which also corresponds to amino acids 1-116 of S67314_PEA_{—}1_P4 (SEQ ID NO:552), and a second amino acid sequence being at least 70%, optionally at least 80%, preferably at least 85%, more preferably at least 90% and most preferably at least 95% homologous to a polypeptide having the sequence VRWATLELYLIGYYYCSFSQACSKKPSPPLRAVEAGTREWLWVRVVSGGNFLCSGFGLTQAGTQILPYRL HDCGQITFSKCNCKTGINNTNLVGLLGSL (SEQ ID NO:1496) corresponding to amino acids 117-215 of S67314_PEA_{—}1_P4 (SEQ ID NO:552), wherein said first and second amino acid sequences are contiguous and in a sequential order.

[1388] 2. An isolated polypeptide encoding for a tail of S67314_PEA_{—}1_P4 (SEQ ID NO:552), comprising a polypeptide being at least 70%, optionally at least about 80%, preferably at least about 85%, more preferably at least about 90% and most preferably at least about 95% homologous to the sequence VRWATLELYLIGYYYCSFSQACSKKPSPPLRAVEAGTREWLWVRVVSGGNFLCSGFGLTQAGTQILPYRL HDCGQITFSKCNCKTGINNTNLVGLLGSL (SEQ ID NO:1496) in S67314_PEA_{—}1_P4 (SEQ ID NO:552).

[1389] Comparison Report Between S67314_PEA_{—}1_P4 (SEQ ID NO:552) and AAP35373 (SEQ ID NO:1392):

[1390] 1. An isolated chimeric polypeptide encoding for S67314_PEA_{—}1_P4 (SEQ ID NO:552), comprising a first amino acid sequence being at least 90% homologous to MVDAFLGTWKLVDSKNFDDYMKSLGVGFATRQVASMTKPTTIIEKNGDILTLKTHSTFKNTEISFKLGVEF DETTADDRKVKSIVTLDGGKLVHLQKWDGQETTLVRELIDGKLIL corresponding to amino acids 1-116 of AAP35373 (SEQ ID NO:1392), which also corresponds to amino acids 1-116 of S67314_PEA_{—}1_P4 (SEQ ID NO:552), and a second amino acid sequence being at least 70%, optionally at least 80%, preferably at least 85%, more preferably at least 90% and most preferably at least 95% homologous to a polypeptide having the sequence VRWATLELYLIGYYYCSFSQACSKKPSPPLRAVEAGTREWLWVRVVSGGNFLCSGFGLTQAGTQILPYRL HDCGQITFSKCNCKTGINNTNLVGLLGSL (SEQ ID NO:1496) corresponding to amino acids 117-215 of S67314_PEA_{—}1_P4 (SEQ ID NO:552), wherein said first and second amino acid sequences are contiguous and in a sequential order.

[1391] 2. An isolated polypeptide encoding for a tail of S67314_PEA_{—}1_P4 (SEQ ID NO:552), comprising a polypeptide being at least 70%, optionally at least about 80%, preferably at least about 85%, more preferably at least about 90% and most preferably at least about 95% homologous to the sequence VRWATLELYLIGYYYCSFSQACSKKPSPPLRAVEAGTREWLWVRVVSGGNFLCSGFGLTQAGTQILPYRL HDCGQITFSKCNCKTGINNTNLVGLLGSL (SEQ ID NO:1496) in S67314_PEA_{—}1_P4 (SEQ ID NO:552).

[1392] The location of the variant protein was determined according to results from a number of different software programs and analyses, including analyses from SignalP and other specialized programs. The variant protein is believed to be located as follows with regard to the cell: intracellularly. The protein localization is believed to be intracellular because neither of the trans-membrane region prediction programs predicted a trans-membrane region for this protein. In addition both signal-peptide prediction programs predict that this protein is a non-secreted protein.

[1393] Variant protein S67314_PEA_{—}1_P4 (SEQ ID NO:552) also has the following non-silent SNPs (Single Nucleotide Polymorphisms) as listed in Table 5, (given according to their position(s) on the amino acid sequence, with the alternative amino acid(s) listed; the last column indicates whether the SNP is known or not; the presence of known SNPs in variant protein S67314_PEA_{—}1_P4 (SEQ ID NO:552) sequence provides support for the deduced sequence of this variant protein according to the present invention).

TABLE 5
Amino acid mutations

| SNP position(s) on | Alternative | Previously |
|---|---|---|
| amino acid sequence | amino acid(s) | known SNP? |
| 53 | K -> R | Yes |

[1394] Variant protein S67314_PEA_{—}1_P4 (SEQ ID NO:552) is encoded by the following transcript(s): S67314_PEA_{—}1_T4 (SEQ ID NO:19), for which the sequence(s) is/are given at the end of the application. The coding portion of transcript S67314_PEA_{—}1_T4 (SEQ ID NO:19) is shown in bold; this coding portion starts at position 925 and ends at position 1569. The transcript also has the following SNPs as listed in Table 6 (given according to their position on the nucleotide sequence, with the alternative nucleic acid listed; the last column indicates whether the SNP is known or not; the presence of known SNPs in variant protein S67314_PEA_{—}1_P4 (SEQ ID NO:552) sequence provides support for the deduced sequence of this variant protein according to the present invention).

TABLE 6
Nucleic acid SNPs

| SNP position on | Alternative | Previously |
|---|---|---|
| nucleotide sequence | nucleic acid | known SNP? |
| 580 | T -> C | Yes |
| 1082 | A -> G | Yes |
| 1670 | A -> C | Yes |

[1395] Variant protein S67314_PEA_{—}1_P5 (SEQ ID NO:553) according to the present invention has an amino acid sequence as given at the end of the application; it is encoded by transcript(s) S67314_PEA_{—}1_T5 (SEQ ID NO:20). An alignment is given to the known protein (Fatty acid-binding protein (SEQ ID NO:623), heart) at the end of the application. One or more alignments to one or more previously published protein sequences are given at the end of the application. A brief description of the relationship of the variant protein according to the present invention to each such aligned protein is as follows:

[1396] Comparison Report Between S67314_PEA_{—}1_P5 (SEQ ID NO:553) and FABH_HUMAN (SEQ ID NO:623):

[1397] 1. An isolated chimeric polypeptide encoding for S67314_PEA_{—}1_P5 (SEQ ID NO:553), comprising a first amino acid sequence being at least 70%, optionally at least 80%, preferably at least 85%, more preferably at least 90% and most preferably at least 95% homologous to a polypeptide having the sequence MVDAFLGTWKLVDSKNFDDYMKSLGVGFATRQVASMTKPTTIIEKNGDILTLKTHSTFKNTEISFKLGVEF DETTADDRKVKSIVTLDGGKLVHLQKWDGQETTLVRELIDGKLIL corresponding to amino acids 1-116 of FABH_HUMAN (SEQ ID NO:623), which also corresponds to amino acids 1-116 of S67314_PEA_{—}1_P5 (SEQ ID NO:553), and a second amino acid sequence being at least 70%, optionally at least 80%, preferably at least 85%, more preferably at least 90% and most preferably at least 95% homologous to a polypeptide having the sequence DVLTAWPSIYRRQVKVLREDEITILPWHLQWSREKATKLLRPTLPSYNNHGWEELRVGKSIV (SEQ ID NO:1497) corresponding to amino acids 117-178 of S67314_PEA_{—}1_P5 (SEQ ID NO:553), wherein said first and second amino acid sequences are contiguous and in a sequential order.

[1398] 2. An isolated polypeptide encoding for a tail of S67314_PEA_{—}1_P5 (SEQ ID NO:553), comprising a polypeptide being at least 70%, optionally at least about 80%, preferably at least about 85%, more preferably at least about 90% and most preferably at least about 95% homologous to the sequence DVLTAWPSIYRRQVKVLREDEITILPWHLQWSREKATKLLRPTLPSYNNHGWEELRVGKSIV (SEQ ID NO:1497) in S67314_PEA_{—}1_P5 (SEQ ID NO:553).

[1399] Comparison Report Between S67314_PEA_{—}1_P5 (SEQ ID NO:553) and AAP35373 (SEQ ID NO:1392):

[1400] 1. An isolated chimeric polypeptide encoding for S67314_PEA_{—}1_P5 (SEQ ID NO:553), comprising a first amino acid sequence being at least 90% homologous to MVDAFLGTWKLVDSKNFDDYMKSLGVGFATRQVASMTKPTTIIEKNGDILTLKTHSTFKNTEISFKLGVEF DETTADDRKVKSIVTLDGGKLVHLQKWDGQETTLVRELIDGKLIL corresponding to amino acids 1-116 of AAP35373 (SEQ ID NO:1392), which also corresponds to amino acids 1-116 of S67314_PEA_{—}1_P5 (SEQ ID NO:553), and a second amino acid sequence being at least 70%, optionally at least 80%, preferably at least 85%, more preferably at least 90% and most preferably at least 95% homologous to a polypeptide having the sequence DVLTAWPSIYRRQVKVLREDEITILPWHLQWSREKATKLLRPTLPSYNNHGWEELRVGKSIV (SEQ ID NO:1497) corresponding to amino acids 117-178 of S67314_PEA_{—}1_P5 (SEQ ID NO:553), wherein said first and second amino acid sequences are contiguous and in a sequential order.

[1401] 2. An isolated polypeptide encoding for a tail of S67314_PEA_{—}1_P5 (SEQ ID NO:553), comprising a polypeptide being at least 70%, optionally at least about 80%, preferably at least about 85%, more preferably at least about 90% and most preferably at least about 95% homologous to the sequence DVLTAWPSIYRRQVKVLREDEITILPWHLQWSREKATKLLRPTLPSYNNHGWEELRVGKSIV (SEQ ID NO:1497) in S67314_PEA_{—}1_P5 (SEQ ID NO:553).

[1402] The location of the variant protein was determined according to results from a number of different software programs and analyses, including analyses from SignalP and other specialized programs. The variant protein is believed to be located as follows with regard to the cell: intracellularly. The protein localization is believed to be intracellular because neither of the trans-membrane region prediction programs predicted a trans-membrane region for this protein. In addition both signal-peptide prediction programs predict that this protein is a non-secreted protein.

[1403] Variant protein S67314_PEA_{—}1_P5 (SEQ ID NO:553) also has the following non-silent SNPs (Single Nucleotide Polymorphisms) as listed in Table 7, (given according to their position(s) on the amino acid sequence, with the alternative amino acid(s) listed; the last column indicates whether the SNP is known or not; the presence of known SNPs in variant protein S67314_PEA_{—}1_P5 (SEQ ID NO:553) sequence provides support for the deduced sequence of this variant protein according to the present invention).

TABLE 7
Amino acid mutations

| SNP position(s) on | Alternative | Previously |
|---|---|---|
| amino acid sequence | amino acid(s) | known SNP? |
| 53 | K -> R | Yes |

[1404] Variant protein S67314_PEA_{—}1_P5 (SEQ ID NO:553) is encoded by the following transcript(s): S67314_PEA_{—}1_T5 (SEQ ID NO:20), for which the sequence(s) is/are given at the end of the application. The coding portion of transcript S67314_PEA_{—}1_T5 (SEQ ID NO:20) is shown in bold; this coding portion starts at position 925 and ends at position 1458. The transcript also has the following SNPs as listed in Table 8 (given according to their position on the nucleotide sequence, with the alternative nucleic acid listed; the last column indicates whether the SNP is known or not; the presence of known SNPs in variant protein S67314_PEA_{—}1_P5 (SEQ ID NO:553) sequence provides support for the deduced sequence of this variant protein according to the present invention).

TABLE 8
Nucleic acid SNPs

| SNP position on | Alternative | Previously |
|---|---|---|
| nucleotide sequence | nucleic acid | known SNP? |
| 580 | T -> C | Yes |
| 1082 | A -> G | Yes |
| 1326 | A -> G | Yes |

[1405] Variant protein S67314_PEA_{—}1_P6 (SEQ ID NO:554) according to the present invention has an amino acid sequence as given at the end of the application; it is encoded by transcript(s) S67314_PEA_{—}1_T6 (SEQ ID NO:21). An alignment is given to the known protein (Fatty acid-binding protein (SEQ ID NO:623), heart) at the end of the application. One or more alignments to one or more previously published protein sequences are given at the end of the application. A brief description of the relationship of the variant protein according to the present invention to each such aligned protein is as follows:

[1406] Comparison Report Between S67314_PEA_{—}1_P6 (SEQ ID NO:554) and FABH_HUMAN (SEQ ID NO:623):

[1407] 1. An isolated chimeric polypeptide encoding for S67314_PEA_{—}1_P6 (SEQ ID NO:554), comprising a first amino acid sequence being at least 70%, optionally at least 80%, preferably at least 85%, more preferably at least 90% and most preferably at least 95% homologous to a polypeptide having the sequence MVDAFLGTWKLVDSKNFDDYMKSLGVGFATRQVASMTKPTTIIEKNGDILTLKTHSTFKNTEISFKLGVEF DETTADDRKVKSIVTLDGGKLVHLQKWDGQETTLVRELIDGKLIL corresponding to amino acids 1-116 of FABH_HUMAN (SEQ ID NO:623), which also corresponds to amino acids 1-116 of S67314_PEA_{—}1_P6 (SEQ ID NO:554), and a second amino acid sequence being at least 70%, optionally at least 80%, preferably at least 85%, more preferably at least 90% and most preferably at least 95% homologous to a polypeptide having the sequence MEKLQLRNVK (SEQ ID NO:1498) corresponding to amino acids 117-126 of S67314_PEA_{—}1_P6 (SEQ ID NO:554), wherein said first and second amino acid sequences are contiguous and in a sequential order.

[1408] 2. An isolated polypeptide encoding for a tail of S67314_PEA_{—}1_P6 (SEQ ID NO:554), comprising a polypeptide being at least 70%, optionally at least about 80%, preferably at least about 85%, more preferably at least about 90% and most preferably at least about 95% homologous to the sequence MEKLQLRNVK (SEQ ID NO:1498) in S67314_PEA_{—}1_P6 (SEQ ID NO:554).

[1409] Comparison Report Between S67314_PEA_{—}1_P6 (SEQ ID NO:554) and AAP35373 (SEQ ID NO:1392):

[1410] 1. An isolated chimeric polypeptide encoding for S67314_PEA_{—}1_P6 (SEQ ID NO:554), comprising a first amino acid sequence being at least 90% homologous to MVDAFLGTWKLVDSKNFDDYMKSLGVGFATRQVASMTKPTTIIEKNGDILTLKTHSTFKNTEISFKLGVEF DETTADDRKVKSIVTLDGGKLVHLQKWDGQETTLVRELIDGKLIL corresponding to amino acids 1-116 of AAP35373 (SEQ ID NO:1392), which also corresponds to amino acids 1-116 of S67314_PEA_{—}1_P6 (SEQ ID NO:554), and a second amino acid sequence being at least 70%, optionally at least 80%, preferably at least 85%, more preferably at least 90% and most preferably at least 95% homologous to a polypeptide having the sequence MEKLQLRNVK (SEQ ID NO:1498) corresponding to amino acids 117-126 of S67314_PEA_{—}1_P6 (SEQ ID NO:554), wherein said first and second amino acid sequences are contiguous and in a sequential order.

[1411] 2. An isolated polypeptide encoding for a tail of S67314_PEA_{—}1_P6 (SEQ ID NO:554), comprising a polypeptide being at least 70%, optionally at least about 80%, preferably at least about 85%, more preferably at least about 90% and most preferably at least about 95% homologous to the sequence MEKLQLRNVK (SEQ ID NO:1498) in S67314_PEA_{—}1_P6 (SEQ ID NO:554).

[1412] The location of the variant protein was determined according to results from a number of different software programs and analyses, including analyses from SignalP and other specialized programs. The variant protein is believed to be located as follows with regard to the cell: intracellularly. The protein localization is believed to be intracellular because neither of the trans-membrane region prediction programs predicted a trans-membrane region for this protein. In addition both signal-peptide prediction programs predict that this protein is a non-secreted protein.

[1413] Variant protein S67314_PEA_{—}1_P6 (SEQ ID NO:554) also has the following non-silent SNPs (Single Nucleotide Polymorphisms) as listed in Table 9, (given according to their position(s) on the amino acid sequence, with the alternative amino acid(s) listed; the last column indicates whether the SNP is known or not; the presence of known SNPs in variant protein S67314_PEA_{—}1_P6 (SEQ ID NO:554) sequence provides support for the deduced sequence of this variant protein according to the present invention).

TABLE 9
Amino acid mutations

| SNP position(s) on | Alternative | Previously |
|---|---|---|
| amino acid sequence | amino acid(s) | known SNP? |
| 53 | K -> R | Yes |

[1414] Variant protein S67314_PEA_{—}1_P6 (SEQ ID NO:554) is encoded by the following transcript(s): S67314_PEA_{—}1_T6 (SEQ ID NO:21), for which the sequence(s) is/are given at the end of the application. The coding portion of transcript S67314_PEA_{—}1_T6 (SEQ ID NO:21) is shown in bold; this coding portion starts at position 925 and ends at position 1302. The transcript also has the following SNPs as listed in Table 10 (given according to their position on the nucleotide sequence, with the alternative nucleic acid listed; the last column indicates whether the SNP is known or not; the presence of known SNPs in variant protein S67314_PEA_{—}1_P6 (SEQ ID NO:554) sequence provides support for the deduced sequence of this variant protein according to the present invention).

TABLE 10
Nucleic acid SNPs

| SNP position on | Alternative | Previously |
|---|---|---|
| nucleotide sequence | nucleic acid | known SNP? |
| 580 | T -> C | Yes |
| 1082 | A -> G | Yes |
| 1444 | T -> C | Yes |

[1415] Variant protein S67314_PEA_{—}1_P7 (SEQ ID NO:555) according to the present invention has an amino acid sequence as given at the end of the application; it is encoded by transcript(s) S67314_PEA_{—}1_T7 (SEQ ID NO:22). An alignment is given to the known protein (Fatty acid-binding protein (SEQ ID NO:623), heart) at the end of the application. One or more alignments to one or more previously published protein sequences are given at the end of the application. A brief description of the relationship of the variant protein according to the present invention to each such aligned protein is as follows:

[1416] Comparison Report Between S67314_PEA_{—}1_P7 (SEQ ID NO:555) and FABH_HUMAN (SEQ ID NO:623):

[1417] 1. An isolated chimeric polypeptide encoding for S67314_PEA_{—}1_P7 (SEQ ID NO:555), comprising a first amino acid sequence being at least 90% homologous to MVDAFLGTWKLVDSKNFDDYMKSL corresponding to amino acids 1-24 of FABH_HUMAN (SEQ ID NO:623), which also corresponds to amino acids 1-24 of S67314_PEA_{—}1_P7 (SEQ ID NO:555), second amino acid sequence being at least 70%, optionally at least 80%, preferably at least 85%, more preferably at least 90% and most preferably at least 95% homologous to a polypeptide having the sequence AHILITFPLPS (SEQ ID NO:1499) corresponding to amino acids 25-35 of S67314_PEA_{—}1_P7 (SEQ ID NO:555), and a third amino acid sequence being at least 90% homologous to GVGFATRQVASMTKPTTIIEKNGDILTLKTHSTFKNTEISFKLGVEFDETTADDRKVKSIVTLDGGKLVHLQ KWDGQETTLVRELIDGKLILTLTHGTAVCTRTYEKEA corresponding to amino acids 25-133 of FABH_HUMAN (SEQ ID NO:623), which also corresponds to amino acids 36-144 of S67314_PEA_{—}1_P7 (SEQ ID NO:555), wherein said first, second, third and fourth amino acid sequences are contiguous and in a sequential order.

[1418] 2. An isolated polypeptide encoding for an edge portion of S67314_PEA_{—}1_P7 (SEQ ID NO:555) comprising an amino acid sequence being at least 70%, optionally at least about 80%, preferably at least about 85%, more preferably at least about 90% and most preferably at least about 95% homologous to the sequence encoding for AHILITFPLPS (SEQ ID NO:1499), corresponding to S67314_PEA_{—}1_P7 (SEQ ID NO:555).

[1419] Comparison Report Between S67314_PEA_{—}1_P7 (SEQ ID NO:555) and AAP35373 (SEQ ID NO:1392):

[1420] 1. An isolated chimeric polypeptide encoding for S67314_PEA_{—}1_P7 (SEQ ID NO:555), comprising a first amino acid sequence being at least 90% homologous to MVDAFLGTWKLVDSKNFDDYMKSL corresponding to amino acids 1-24 of AAP35373 (SEQ ID NO:1392), which also corresponds to amino acids 1-24 of S67314_PEA_{—}1_P7 (SEQ ID NO:555), second amino acid sequence being at least 70%, optionally at least 80%, preferably at least 85%, more preferably at least 90% and most preferably at least 95% homologous to a polypeptide having the sequence AHILITFPLPS (SEQ ID NO:1499) corresponding to amino acids 25-35 of S67314_PEA_{—}1_P7 (SEQ ID NO:555), and a third amino acid sequence being at least 90% homologous to GVGFATRQVASMTKPTTHEKNGDILTLKTHSTFKNTEISFKLGVEFDETTADDRKVKSIVTLDGGKLVHLQ KWDGQETTLVRELIDGKLILTLTHGTAVCTRTYEKEA corresponding to amino acids 25-133 of AAP35373 (SEQ ID NO:1392), which also corresponds to amino acids 36-144 of S67314_PEA_{—}1_P7 (SEQ ID NO:555), wherein said first, second and third amino acid sequences are contiguous and in a sequential order.

[1421] 2. An isolated polypeptide encoding for an edge portion of S67314_PEA_{—}1_P7 (SEQ ID NO:555) comprising an amino acid sequence being at least 70%, optionally at least about 80%, preferably at least about 85%, more preferably at least about 90% and most preferably at least about 95% homologous to the sequence encoding for AHILITFPLPS (SEQ ID NO:1499), corresponding to S67314_PEA_{—}1_P7 (SEQ ID NO:555).

[1422] The location of the variant protein was determined according to results from a number of different software programs and analyses, including analyses from SignalP and other specialized programs. The variant protein is believed to be located as follows with regard to the cell: intracellularly. The protein localization is believed to be intracellular because neither of the trans-membrane region prediction programs predicted a trans-membrane region for this protein. In addition both signal-peptide prediction programs predict that this protein is a non-secreted protein.

[1423] Variant protein S67314_PEA_{—}1_P7 (SEQ ID NO:555) also has the following non-silent SNPs (Single Nucleotide Polymorphisms) as listed in Table 11, (given according to their position(s) on the amino acid sequence, with the alternative amino acid(s) listed; the last column indicates whether the SNP is known or not; the presence of known SNPs in variant protein S67314_PEA_{—}1_P7 (SEQ ID NO:555) sequence provides support for the deduced sequence of this variant protein according to the present invention).

TABLE 11
Amino acid mutations

| SNP position(s) on | Alternative | Previously |
|---|---|---|
| amino acid sequence | amino acid(s) | known SNP? |
| 64 | K -> R | Yes |

[1424] Variant protein S67314_PEA_{—}1_P7 (SEQ ID NO:555) is encoded by the following transcript(s): S67314_PEA_{—}1_T7 (SEQ ID NO:22), for which the sequence(s) is/are given at the end of the application. The coding portion of transcript S67314_PEA_{—}1_T7 (SEQ ID NO:22) is shown in bold; this coding portion starts at position 925 and ends at position 1356. The transcript also has the following SNPs as listed in Table 12 (given according to their position on the nucleotide sequence, with the alternative nucleic acid listed; the last column indicates whether the SNP is known or not; the presence of known SNPs in variant protein S67314_PEA_{—}1_P7 (SEQ ID NO:555) sequence provides support for the deduced sequence of this variant protein according to the present invention).

TABLE 12
Nucleic acid SNPs

| SNP position on | Alternative | Previously |
|---|---|---|
| nucleotide sequence | nucleic acid | known SNP? |
| 580 | T -> C | Yes |
| 1115 | A -> G | Yes |
| 2772 | G -> A | Yes |
| 2896 | C -> A | Yes |
| 2918 | G -> C | Yes |
| 3003 | A -> G | Yes |
| 3074 | T -> G | Yes |
| 1344 | T -> C | Yes |
| 1522 | -> T | No |
| 1540 | -> A | No |
| 1540 | -> T | No |
| 1578 | G -> A | Yes |
| 1652 | G -> A | Yes |
| 2263 | G -> A | Yes |
| 2605 | T -> C | Yes |

[1425] As noted above, cluster S67314 features 8 segment(s), which were listed in Table 2 above and for which the sequence(s) are given at the end of the application. These segment(s) are portions of nucleic acid sequence(s) which are described herein separately because they are of particular interest. A description of each segment according to the present invention is now provided.

[1426] Segment cluster S67314_PEA_{—}1_node_{—}0 (SEQ ID NO:212) according to the present invention is supported by 90 libraries. The number of libraries was determined as previously described. This segment can be found in the following transcript(s): S67314_PEA_{—}1_T4 (SEQ ID NO:19), S67314_PEA_{—}1_T5 (SEQ ID NO:20), S67314_PEA_{—}1_T6 (SEQ ID NO:21) and S67314_PEA_{—}1_T7 (SEQ ID NO:22). Table 13 below describes the starting and ending position of this segment on each transcript.

TABLE 13
Segment location on transcripts

| | Segment | Segment |
|---|---|---|
| | starting | ending |
| Transcript name | position | position |
| S67314_PEA_1_T4 (SEQ ID NO: 19) | 1 | 997 |
| S67314_PEA_1_T5 (SEQ ID NO: 20) | 1 | 997 |
| S67314_PEA_1_T6 (SEQ ID NO: 21) | 1 | 997 |
| S67314_PEA_1_T7 (SEQ ID NO: 22) | 1 | 997 |

[1427] Segment cluster S67314_PEA_{—}1_node_{—}11 (SEQ ID NO:213) according to the present invention is supported by 6 libraries. The number of libraries was determined as previously described. This segment can be found in the following transcript(s): S67314_PEA_{—}1_T4 (SEQ ID NO:19). Table 14 below describes the starting and ending position of this segment on each transcript.

TABLE 14
Segment location on transcripts

| | Segment | Segment |
|---|---|---|
| | starting | ending |
| Transcript name | position | position |
| S67314_PEA_1_T4 (SEQ ID NO: 19) | 1273 | 2110 |

[1428] Segment cluster S67314_PEA_{—}1_node_{—}13 (SEQ ID NO:214) according to the present invention is supported by 76 libraries. The number of libraries was determined as previously described. This segment can be found in the following transcript(s): S67314_PEA_{—}1_T7 (SEQ ID NO:22). Table 15 below describes the starting and ending position of this segment on each transcript.

TABLE 15
Segment location on transcripts

| | Segment | Segment |
|---|---|---|
| | starting | ending |
| Transcript name | position | position |
| S67314_PEA_1_T7 (SEQ ID NO: 22) | 1306 | 3531 |

[1429] Segment cluster S67314_PEA_{—}1_node_{—}15 (SEQ ID NO:215) according to the present invention is supported by 1 libraries. The number of libraries was determined as previously described. This segment can be found in the following transcript(s): S67314_PEA_{—}1_T5 (SEQ ID NO:20). Table 16 below describes the starting and ending position of this segment on each transcript.

TABLE 16
Segment location on transcripts

| | Segment | Segment |
|---|---|---|
| | starting | ending |
| Transcript name | position | position |
| S67314_PEA_1_T5 (SEQ ID NO: 20) | 1273 | 1733 |

[1430] Segment cluster S67314_PEA_{—}1_node_{—}17 (SEQ ID NO:216) according to the present invention is supported by 4 libraries. The number of libraries was determined as previously described. This segment can be found in the following transcript(s): S67314_PEA_{—}1_T6 (SEQ ID NO:21). Table 17 below describes the starting and ending position of this segment on each transcript.

TABLE 17
Segment location on transcripts

| | Segment | Segment |
|---|---|---|
| | starting | ending |
| Transcript name | position | position |
| S67314_PEA_1_T6 (SEQ ID NO: 21) | 1273 | 1822 |

[1431] Microarray (chip) data is also available for this segment as follows. As described above with regard to the cluster itself, various oligonucleotides were tested for being differentially expressed in various disease conditions, particularly cancer. The following oligonucleotides were found to hit this segment with regard to colon cancer, shown in Table 18.

TABLE 18
Oligonucleotides related to this segment

| | Overexpressed | Chip |
|---|---|---|
| Oligonucleotide name | in cancers | reference |
| S67314_0_0_744 (SEQ ID NO: 1406) | colorectal cancer | Colon |

[1432] As a general note, oligonucleotide S67314_{—}0_{—}0_{—}741 (SEQ ID NO:1405) was overexpressed in colon cancer; this oligonucleotide maps to at least one part of this cluster.

[1433] Segment cluster S67314_PEA_{—}1_node_{—}4 (SEQ ID NO:217) according to the present invention is supported by 101 libraries. The number of libraries was determined as previously described. This segment can be found in the following transcript(s): S67314_PEA_{—}1_T4 (SEQ ID NO:19), S67314_PEA_{—}1_T5 (SEQ ID NO:20), S67314_PEA_{—}1_T6 (SEQ ID NO:21) and S67314_PEA_{—}1_T7 (SEQ ID NO:22). Table 19 below describes the starting and ending position of this segment on each transcript.

TABLE 19
Segment location on transcripts

| | Segment | Segment |
|---|---|---|
| | starting | ending |
| Transcript name | position | position |
| S67314_PEA_1_T4 (SEQ ID NO: 19) | 998 | 1170 |
| S67314_PEA_1_T5 (SEQ ID NO: 20) | 998 | 1170 |
| S67314_PEA_1_T6 (SEQ ID NO: 21) | 998 | 1170 |
| S67314_PEA_1_T7 (SEQ ID NO: 22) | 1031 | 1203 |

[1434] According to an optional embodiment of the present invention, short segments related to the above cluster are also provided. These segments are up to about 120 bp in length, and so are included in a separate description.

[1435] Segment cluster S67314_PEA_{—}1_node_{—}10 (SEQ ID NO:218) according to the present invention is supported by 64 libraries. The number of libraries was determined as previously described. This segment can be found in the following transcript(s): S67314_PEA_{—}1_T4 (SEQ ID NO:19), S67314_PEA_{—}1_T5 (SEQ ID NO:20), S67314_PEA_{—}1_T6 (SEQ ID NO:21) and S67314_PEA_{—}1_T7 (SEQ ID NO:22). Table 20 below describes the starting and ending position of this segment on each transcript.

TABLE 20
Segment location on transcripts

| | Segment | Segment |
|---|---|---|
| | starting | ending |
| Transcript name | position | position |
| S67314_PEA_1_T4 (SEQ ID NO: 19) | 1171 | 1272 |
| S67314_PEA_1_T5 (SEQ ID NO: 20) | 1171 | 1272 |
| S67314_PEA_1_T6 (SEQ ID NO: 21) | 1171 | 1272 |
| S67314_PEA_1_T7 (SEQ ID NO: 22) | 1204 | 1305 |

[1436] Segment cluster S67314_PEA_{—}1_node_{—}3 (SEQ ID NO:219) according to the present invention is supported by 1 libraries. The number of libraries was determined as previously described. This segment can be found in the following transcript(s): S67314_PEA_{—}1_T7 (SEQ ID NO:22). Table 21 below describes the starting and ending position of this segment on each transcript.

TABLE 21
Segment location on transcripts

| | Segment | Segment |
|---|---|---|
| | starting | ending |
| Transcript name | position | position |
| S67314_PEA_1_T7 (SEQ ID NO: 22) | 998 | 1030 |

### Variant Protein Alignment to the Previously Known Protein:

[chemical structure]

[chemical structure]

[chemical structure]

[chemical structure]

[chemical structure]

[chemical structure]

[chemical structure]

[chemical structure]

[chemical structure]

[chemical structure]

[chemical structure]

[chemical structure]

[chemical structure]

[chemical structure]

[chemical structure]

[chemical structure]

[chemical structure]

[chemical structure]

[chemical structure]

[chemical structure]

[chemical structure]

[chemical structure]

[chemical structure]

[chemical structure]

### Description for Cluster Z44808

[1438] Cluster Z44808 features 5 transcript(s) and 21 segment(s) of interest, the names for which are given in Tables 1 and 2, respectively, the sequences themselves are given at the end of the application. The selected protein variants are given in table 3.

TABLE 1
Transcripts of interest

| Transcript Name | SEQ ID NO: |
|---|---|
| Z44808_PEA_1_T11 | 23 |
| Z44808_PEA_1_T4 | 24 |
| Z44808_PEA_1_T5 | 25 |
| Z44808_PEA_1_T8 | 26 |
| Z44808_PEA_1_T9 | 27 |

TABLE 2
Segments of interest

| Segment Name | SEQ ID NO: |
|---|---|
| Z44808_PEA_1_node_0 | 220 |
| Z44808_PEA_1_node_16 | 221 |
| Z44808_PEA_1_node_2 | 222 |
| Z44808_PEA_1_node_24 | 223 |
| Z44808_PEA_1_node_32 | 224 |
| Z44808_PEA_1_node_33 | 225 |
| Z44808_PEA_1_node_36 | 226 |
| Z44808_PEA_1_node_37 | 227 |
| Z44808_PEA_1_node_41 | 228 |
| Z44808_PEA_1_node_11 | 229 |
| Z44808_PEA_1_node_13 | 230 |
| Z44808_PEA_1_node_18 | 231 |
| Z44808_PEA_1_node_22 | 232 |
| Z44808_PEA_1_node_26 | 233 |
| Z44808_PEA_1_node_30 | 234 |
| Z44808_PEA_1_node_34 | 235 |
| Z44808_PEA_1_node_35 | 236 |
| Z44808_PEA_1_node_39 | 237 |
| Z44808_PEA_1_node_4 | 238 |
| Z44808_PEA_1_node_6 | 239 |
| Z44808_PEA_1_node_8 | 240 |

TABLE 3
Proteins of interest

| Protein Name | SEQ ID NO: |
|---|---|
| Z44808_PEA_1_P5 | 556 |
| Z44808_PEA_1_P6 | 557 |
| Z44808_PEA_1_P7 | 558 |
| Z44808_PEA_1_P11 | 559 |

[1439] These sequences are variants of the known protein SPARC related modular calcium-binding protein 2 precursor (SwissProt accession identifier SMO2_HUMAN; known also according to the synonyms Secreted modular calcium-binding protein 2; SMOC-2; Smooth muscle-associated protein 2; SMAP-2; MSTP117), SEQ ID NO: 624, referred to herein as the previously known protein.

[1440] Protein SPARC related modular calcium-binding protein 2 precursor is known or believed to have the following function(s): calcium binding . The sequence for protein SPARC related modular calcium-binding protein 2 precursor (SEQ ID NO:624) is given at the end of the application, as “SPARC related modular calcium-binding protein 2 precursor amino acid sequence”. Known polymorphisms for this sequence are as shown in Table 4.

TABLE 4
Amino acid mutations for Known Protein

| SNP position(s) on | |
|---|---|
| amino acid sequence | Comment |
| 169-170 | KT -> TR |
| 212 | S -> P |
| 429-466 | TPRGHAESTSNRQPRKQG -> RSKRNL |
| 434 | A -> V |
| 439 | N -> Y |

[1441] Protein SPARC related modular calcium-binding protein 2 precursor (SEQ ID NO:624) localization is believed to be Secreted (Probable).

[1442] Cluster Z44808 can be used as a diagnostic marker according to overexpression of transcripts of this cluster in cancer. Expression of such transcripts in normal tissues is also given according to the previously described methods. The term “number” in the right hand column of the table and the numbers on the y-axis of the figure below refer to weighted expression of ESTs in each category, as “parts per million” (ratio of the expression of ESTs for a particular cluster to the expression of all ESTs in that category, according to parts per million).

[1443] Overall, the following results were obtained as shown with regard to the histograms in FIG. 19 and Table 5. This cluster is overexpressed (at least at a minimum level) in the following pathological conditions: colorectal cancer, lung cancer and pancreas carcinoma.

TABLE 5
Normal tissue distribution

| Name of Tissue | Number |
|---|---|
| bladder | 123 |
| bone | 304 |
| brain | 18 |
| colon | 0 |
| epithelial | 40 |
| general | 37 |
| kidney | 2 |
| lung | 0 |
| breast | 61 |
| ovary | 116 |
| pancreas | 0 |
| prostate | 128 |
| stomach | 36 |
| uterus | 195 |

TABLE 6
P values and ratios for expression in cancerous tissue

| Name of Tissue | P1 | P2 | SP1 | R3 | SP2 | R4 |
|---|---|---|---|---|---|---|
| bladder | 6.8e−01 | 7.6e−01 | 7.7e−01 | 0.8 | 9.1e−01 | 0.6 |
| bone | 7.0e−01 | 8.8e−01 | 9.9e−01 | 0.3 | 1 | 0.2 |
| brain | 6.8e−01 | 7.2e−01 | 3.0e−02 | 2.6 | 1.7e−01 | 1.6 |
| colon | 9.2e−03 | 1.3e−02 | 1.2e−01 | 3.6 | 1.6e−01 | 3.1 |
| epithelial | 2.1e−02 | 4.0e−01 | 1.0e−04 | 1.9 | 2.7e−01 | 1.0 |
| general | 2.6e−02 | 7.2e−01 | 4.9e−07 | 1.9 | 3.0e−01 | 1.0 |
| kidney | 7.3e−01 | 8.1e−01 | 1 | 1.0 | 1 | 1.0 |
| lung | 4.0e−03 | 1.8e−02 | 8.0e−04 | 12.2 | 2.1e−02 | 6.0 |
| breast | 4.8e−01 | 6.1e−01 | 9.8e−02 | 2.0 | 3.9e−01 | 1.2 |
| ovary | 8.1e−01 | 8.3e−01 | 9.1e−01 | 0.6 | 9.7e−01 | 0.5 |
| pancreas | 1.2e−01 | 2.1e−01 | 1.0e−03 | 6.5 | 5.9e−03 | 4.6 |
| prostate | 8.4e−01 | 8.9e−01 | 9.0e−01 | 0.6 | 9.8e−01 | 0.4 |
| stomach | 5.0e−01 | 8.7e−01 | 9.6e−04 | 1.5 | 1.9e−01 | 0.8 |
| uterus | 6.7e−01 | 7.9e−01 | 9.2e−01 | 0.5 | 1 | 0.3 |

[1444] As noted above, cluster Z44808 features 5 transcript(s), which were listed in Table 1 above. These transcript(s) encode for protein(s) which are variant(s) of protein SPARC related modular calcium-binding protein 2 precursor (SEQ ID NO:624). A description of each variant protein according to the present invention is now provided.

[1445] Variant protein Z44808_PEA_{—}1_P5 (SEQ ID NO:556) according to the present invention has an amino acid sequence as given at the end of the application; it is encoded by transcript(s) Z44808_PEA_{—}1_T4 (SEQ ID NO:24). An alignment is given to the known protein (SPARC related modular calcium-binding protein 2 precursor (SEQ ID NO:624)) at the end of the application. One or more alignments to one or more previously published protein sequences are given at the end of the application. A brief description of the relationship of the variant protein according to the present invention to each such aligned protein is as follows:

[1446] Comparison Report Between Z44808_PEA_{—}1_P5 (SEQ ID NO:556) and SMO2_HUMAN (SEQ ID NO:624):

[1447] 1. An isolated chimeric polypeptide encoding for Z44808_PEA_{—}1_P5 (SEQ ID NO:556), comprising a first amino acid sequence being at least 90% homologous to MLLPQLCWLPLLAGLLPPVPAQKFSALTFLRVDQDKDKDCSLDCAGSPQKPLCASDGRTFLSRCEFQRAK CKDPQLEIAYRGNCKDVSRCVAERKYTQEQARKEFQQVFIPECNDDGTYSQVQCHSYTGYCWCVTPNGR PISGTAVAHKTPRCPGSVNEKLPQREGTGKTDDAAAPALETQPQGDEEDIASRYPTLWTEQVKSRQNKTN KNSVSSCDQEHQSALEEAKQPKNDNVVIPECAHGGLYKPVQCHPSTGYCWCVLVDTGRPIPGTSTRYEQP KCDNTARAHPAKARDLYKGRQLQGCPGAKKHEFLTSVLDALSTDMVHAASDPSSSSGRLSEPDPSHTLEE RVVHWYFKLLDKNSSGDIGKKEIKPFKRFLRKKSKPKKCVKKFVEYCDVNNDKSISVQELMGCLGVAKE DGKADTKKRHTPRGHAESTSNRQ corresponding to amino acids 1-441 of SMO2_HUMAN (SEQ ID NO:624), which also corresponds to amino acids 1-441 of Z44808_PEA_{—}1_P5 (SEQ ID NO:556), and a second amino acid sequence being at least 70%, optionally at least 80%, preferably at least 85%, more preferably at least 90% and most preferably at least 95% homologous to a polypeptide having the sequence DAMVVSSRPKATTHRKSRTLSRR (SEQ ID NO:1500) corresponding to amino acids 442-464 of Z44808_PEA_{—}1_P5 (SEQ ID NO:556), wherein said first and second amino acid sequences are contiguous and in a sequential order.

[1448] 2. An isolated polypeptide encoding for a tail of Z44808_PEA_{—}1_P5 (SEQ ID NO:556), comprising a polypeptide being at least 70%, optionally at least about 80%, preferably at least about 85%, more preferably at least about 90% and most preferably at least about 95% homologous to the sequence DAMVVSSRPKATTHRKSRTLSRR (SEQ ID NO:1500) in Z44808_PEA_{—}1_P5 (SEQ ID NO:556).

[1449] The location of the variant protein was determined according to results from a number of different software programs and analyses, including analyses from SignalP and other specialized programs. The variant protein is believed to be located as follows with regard to the cell: secreted. The protein localization is believed to be secreted because both signal-peptide prediction programs predict that this protein has a signal peptide, and neither trans-membrane region prediction program predicts that this protein has a trans-membrane region.

[1450] Variant protein Z44808_PEA_{—}1_P5 (SEQ ID NO:556) is encoded by the following transcript(s): Z44808_PEA_{—}1_T4 (SEQ ID NO:24), for which the sequence(s) is/are given at the end of the application. The coding portion of transcript Z44808_PEA_{—}1_T4 (SEQ ID NO:24) is shown in bold; this coding portion starts at position 586 and ends at position 1977. The transcript also has the following SNPs as listed in Table 7 (given according to their position on the nucleotide sequence, with the alternative nucleic acid listed; the last column indicates whether the SNP is known or not; the presence of known SNPs in variant protein Z44808_PEA_{—}1_P5 (SEQ ID NO:556) sequence provides support for the deduced sequence of this variant protein according to the present invention).

TABLE 7
Nucleic acid SNPs

| SNP position on nucleotide | Alternative | Previously |
|---|---|---|
| sequence | nucleic acid | known SNP? |
| 549 | A -> G | No |
| 648 | T -> G | No |
| 4403 | G -> T | No |
| 4456 | G -> A | Yes |
| 4964 | G -> C | Yes |
| 1025 | C -> | No |
| 1677 | T -> C | No |
| 2691 | C -> T | Yes |
| 3900 | T -> C | No |
| 3929 | G -> A | Yes |
| 4099 | G -> T | Yes |
| 4281 | T -> C | No |
| 4319 | G -> C | Yes |

[1451] Variant protein Z44808_PEA_{—}1_P6 (SEQ ID NO:557) according to the present invention has an amino acid sequence as given at the end of the application; it is encoded by transcript(s) Z44808_PEA_{—}1_T5 (SEQ ID NO:25). An alignment is given to the known protein (SPARC related modular calcium-binding protein 2 precursor (SEQ ID NO:624)) at the end of the application. One or more alignments to one or more previously published protein sequences are given at the end of the application. A brief description of the relationship of the variant protein according to the present invention to each such aligned protein is as follows:

[1452] Comparison Report Between Z44808_PEA_{—}1_P6 (SEQ ID NO:557) and SMO2_HUMAN (SEQ ID NO:624):

[1453] 1. An isolated chimeric polypeptide encoding for Z44808_PEA_{—}1_P6 (SEQ ID NO:557), comprising a first amino acid sequence being at least 90% homologous to MLLPQLCWLPLLAGLLPPVPAQKFSALTFLRVDQDKDKDCSLDCAGSPQKPLCASDGRTFLSRCEFQRAK CKDPQLEIAYRGNCKDVSRCVAERKYTQEQARKEFQQVFIPECNDDGTYSQVQCHSYTGYCWCVTPNGR PISGTAVAHKTPRCPGSVNEKLPQREGTGKTDDAAAPALETQPQGDEEDIASRYPTLWTEQVKSRQNKTN KNSVSSCDQEHQSALEEAKQPKNDNVVIPECAHGGLYKPVQCHPSTGYCWCVLVDTGRPIPGTSTRYEQP KCDNTARAHPAKARDLYKGRQLQGCPGAKKHEFLTSVLDALSTDMVHAASDPSSSSGRLSEPDPSHTLEE RVVHWYFKLLDKNSSGDIGKKEIKPFKRFLRKKSKPKKCVKKFVEYCDVNNDKSISVQELMGCLGVAKE DGKADTKKRH corresponding to amino acids 1-428 of SMO2_HUMAN (SEQ ID NO:624), which also corresponds to amino acids 1-428 of Z44808_PEA_{—}1_P6 (SEQ ID NO:557), and a second amino acid sequence being at least 70%, optionally at least 80%, preferably at least 85%, more preferably at least 90% and most preferably at least 95% homologous to a polypeptide having the sequence RSKRNL (SEQ ID NO:1501) corresponding to amino acids 1-428 of Z44808_PEA_{—}1_P6 (SEQ ID NO:557), wherein said first and second amino acid sequences are contiguous and in a sequential order.

[1454] 2. An isolated polypeptide encoding for a tail of Z44808_PEA_{—}1_P6 (SEQ ID NO:557), comprising a polypeptide being at least 70%, optionally at least about 80%, preferably at least about 85%, more preferably at least about 90% and most preferably at least about 95% homologous to the sequence RSKRNL (SEQ ID NO:1501) in Z44808_PEA_{—}1_P6 (SEQ ID NO:557).

[1455] The location of the variant protein was determined according to results from a number of different software programs and analyses, including analyses from SignalP and other specialized programs. The variant protein is believed to be located as follows with regard to the cell: secreted. The protein localization is believed to be secreted because both signal-peptide prediction programs predict that this protein has a signal peptide, and neither trans-membrane region prediction program predicts that this protein has a trans-membrane region.

[1456] Variant protein Z44808_PEA_{—}1_P6 (SEQ ID NO:557) also has the following non-silent SNPs (Single Nucleotide Polymorphisms) as listed in Table 8, (given according to their position(s) on the amino acid sequence, with the alternative amino acid(s) listed; the last column indicates whether the SNP is known or not; the presence of known SNPs in variant protein Z44808_PEA_{—}1_P6 (SEQ ID NO:557) sequence provides support for the deduced sequence of this variant protein according to the present invention).

TABLE 8
Amino acid mutations

| SNP position(s) on amino acid | Alternative | Previously |
|---|---|---|
| sequence | amino acid(s) | known SNP? |
| 147 | A -> | No |

[1457] Variant protein Z44808_PEA_{—}1_P6 (SEQ ID NO:557) is encoded by the following transcript(s): Z44808_PEA_{—}1_T5 (SEQ ID NO:25), for which the sequence(s) is/are given at the end of the application. The coding portion of transcript Z44808_PEA_{—}1_T5 (SEQ ID NO:25) is shown in bold; this coding portion starts at position 586 and ends at position 1887. The transcript also has the following SNPs as listed in Table 9 (given according to their position on the nucleotide sequence, with the alternative nucleic acid listed; the last column indicates whether the SNP is known or not; the presence of known SNPs in variant protein Z44808_PEA_{—}1_P6 (SEQ ID NO:557) sequence provides support for the deduced sequence of this variant protein according to the present invention).

TABLE 9
Nucleic acid SNPs

| SNP position on nucleotide | Alternative | Previously |
|---|---|---|
| sequence | nucleic acid | known SNP? |
| 549 | A -> G | No |
| 648 | T -> G | No |
| 2866 | G -> A | Yes |
| 3374 | G -> C | Yes |
| 1025 | C -> | No |
| 1677 | T -> C | No |
| 2310 | T -> C | No |
| 2339 | G -> A | Yes |
| 2509 | G -> T | Yes |
| 2691 | T -> C | No |
| 2729 | G -> C | Yes |
| 2813 | G -> T | No |

[1458] Variant protein Z44808_PEA_{—}1_P7 (SEQ ID NO:558) according to the present invention has an amino acid sequence as given at the end of the application; it is encoded by transcript(s) Z44808_PEA_{—}1_T9 (SEQ ID NO:27). An alignment is given to the known protein (SPARC related modular calcium-binding protein 2 precursor (SEQ ID NO:624)) at the end of the application. One or more alignments to one or more previously published protein sequences are given at the end of the application. A brief description of the relationship of the variant protein according to the present invention to each such aligned protein is as follows:

[1459] Comparison Report Between Z44808_PEA_{—}1_P7 (SEQ ID NO:558) and SMO2_HUMAN (SEQ ID NO:624):

[1460] 1. An isolated chimeric polypeptide encoding for Z44808_PEA_{—}1_P7 (SEQ ID NO:558), comprising a first amino acid sequence being at least 90% homologous to MLLPQLCWLPLLAGLLPPVPAQKFSALTFLRVDQDKDKDCSLDCAGSPQKPLCASDGRTFLSRCEFQRAK CKDPQLEIAYRGNCKDVSRCVAERKYTQEQARKEFQQVFIPECNDDGTYSQVQCHSYTGYCWCVTPNGR PISGTAVAHKTPRCPGSVNEKLPQREGTGKTDDAAAPALETQPQGDEEDIASRYPTLWTEQVKSRQNKTN KNSVSSCDQEHQSALEEAKQPKNDNVVIPECAHGGLYKPVQCHPSTGYCWCVLVDTGRPIPGTSTRYEQP KCDNTARAHPAKARDLYKGRQLQGCPGAKKHEFLTSVLDALSTDMVHAASDPSSSSGRLSEPDPSHTLEE RVVHWYFKLLDKNSSGDIGKKEIKPFKRFLRKKSKPKKCVKKFVEYCDVNNDKSISVQELMGCLGVAKE DGKADTKKRHTPRGHAESTSNRQ corresponding to amino acids 1-441 of SMO2_HUMAN (SEQ ID NO:624), which also corresponds to amino acids 1-441 of Z44808_PEA_{—}1_P7 (SEQ ID NO:558), and a second amino acid sequence being at least 70%, optionally at least 80%, preferably at least 85%, more preferably at least 90% and most preferably at least 95% homologous to a polypeptide having the sequence LLWLRGKVSFYCF (SEQ ID NO:1502) corresponding to amino acids 442-454 of Z44808_PEA_{—}1_P7 (SEQ ID NO:558), wherein said first and second amino acid sequences are contiguous and in a sequential order.

[1461] 2. An isolated polypeptide encoding for a tail of Z44808_PEA_{—}1_P7 (SEQ ID NO:558), comprising a polypeptide being at least 70%, optionally at least about 80%, preferably at least about 85%, more preferably at least about 90% and most preferably at least about 95% homologous to the sequence LLWLRGKVSFYCF (SEQ ID NO:1502) in Z44808_PEA_{—}1_P7 (SEQ ID NO:558).

[1462] The location of the variant protein was determined according to results from a number of different software programs and analyses, including analyses from SignalP and other specialized programs. The variant protein is believed to be located as follows with regard to the cell: secreted. The protein localization is believed to be secreted because both signal-peptide prediction programs predict that this protein has a signal peptide, and neither trans-membrane region prediction program predicts that this protein has a trans-membrane region.

[1463] Variant protein Z44808_PEA_{—}1_P7 (SEQ ID NO:558) also has the following non-silent SNPs (Single Nucleotide Polymorphisms) as listed in Table 10, (given according to their position(s) on the amino acid sequence, with the alternative amino acid(s) listed; the last column indicates whether the SNP is known or not; the presence of known SNPs in variant protein Z44808_PEA_{—}1_P7 (SEQ ID NO:558) sequence provides support for the deduced sequence of this variant protein according to the present invention).

TABLE 10
Amino acid mutations

| SNP position(s) on amino acid | Alternative | Previously |
|---|---|---|
| sequence | amino acid(s) | known SNP? |
| 147 | A -> | No |

[1464] Variant protein Z44808_PEA_{—}1_P7 (SEQ ID NO:558) is encoded by the following transcript(s): Z44808_PEA_{—}1_T9 (SEQ ID NO:27), for which the sequence(s) is/are given at the end of the application. The coding portion of transcript Z44808_PEA_{—}1_T9 (SEQ ID NO:27) is shown in bold; this coding portion starts at position 586 and ends at position 1947. The transcript also has the following SNPs as listed in Table 11 (given according to their position on the nucleotide sequence, with the alternative nucleic acid listed; the last column indicates whether the SNP is known or not; the presence of known SNPs in variant protein Z44808_PEA_{—}1_P7 (SEQ ID NO:558) sequence provides support for the deduced sequence of this variant protein according to the present invention).

TABLE 11
Nucleic acid SNPs

| SNP position on nucleotide | Alternative | Previously |
|---|---|---|
| sequence | nucleic acid | known SNP? |
| 549 | A -> G | No |
| 648 | T -> G | No |
| 1025 | C -> | No |
| 1677 | T -> C | No |
| 2169 | C -> A | Yes |

[1465] Variant protein Z44808_PEA_{—}1_P11 (SEQ ID NO:559) according to the present invention has an amino acid sequence as given at the end of the application; it is encoded by transcript(s) Z44808_PEA_{—}1_T11 (SEQ ID NO:23). The identification of this transcript was performed using a non-EST based method for identification of alternative splicing, described in the following reference: “Sorek R et al., Genome Res. (2004) 14:1617-23.” An alignment is given to the known protein (SPARC related modular calcium-binding protein 2 precursor (SEQ ID NO:624)) at the end of the application. One or more alignments to one or more previously published protein sequences are given at the end of the application. A brief description of the relationship of the variant protein according to the present invention to each such aligned protein is as follows:

[1466] Comparison Report Between Z44808_PEA_{—}1_P11 (SEQ ID NO:559) and SMO2_HUMAN (SEQ ID NO:624):

[1467] 1. An isolated chimeric polypeptide encoding for Z44808_PEA_{—}1_P11 (SEQ ID NO:559), comprising a first amino acid sequence being at least 90% homologous to MLLPQLCWLPLLAGLLPPVPAQKFSALTFLRVDQDKDKDCSLDCAGSPQKPLCASDGRTFLSRCEFQRAK CKDPQLEIAYRGNCKDVSRCVAERKYTQEQARKEFQQVFIPECNDDGTYSQVQCHSYTGYCWCVTPNGR PISGTAVAHKTPRCPGSVNEKLPQREGTGKT corresponding to amino acids 1-170 of SMO2_HUMAN (SEQ ID NO:624), which also corresponds to amino acids 1-170 of Z44808_PEA_{—}1_P11 (SEQ ID NO:559), and a second amino acid sequence being at least 90% homologous to DIASRYPTLWTEQVKSRQNKTNKNSVSSCDQEHQSALEEAKQPKNDNVVIPECAHGGLYKPVQCHPSTGY CWCVLVDTGRPIPGTSTRYEQPKCDNTARAHPAKARDLYKGRQLQGCPGAKKHEFLTSVLDALSTDMVH AASDPSSSSGRLSEPDPSHTLEERVVHWYFKLLDKNSSGDIGKKEIKPFKRFLRKKSKPKKCVKKFVEYCD VNNDKSISVQELMGCLGVAKEDGKADTKKRHTPRGHAESTSNRQPRKQG corresponding to amino acids 188-446 of SMO2_HUMAN (SEQ ID NO:624), which also corresponds to amino acids 171-429 of Z44808_PEA_{—}1_P11 (SEQ ID NO:559), wherein said first and second amino acid sequences are contiguous and in a sequential order.

[1468] 2. An isolated chimeric polypeptide encoding for an edge portion of Z44808_PEA_{—}1_P11 (SEQ ID NO:559) comprising a polypeptide having a length “n”, wherein n is at least about 10 amino acids in length, optionally at least about 20 amino acids in length, preferably at least about 30 amino acids in length, more preferably at least about 40 amino acids in length and most preferably at least about 50 amino acids in length, wherein at least two amino acids comprise TD, having a structure as follows: a sequence starting from any of amino acid numbers 170−x to 170; and ending at any of amino acid numbers 171+((n−2)−x), in which x varies from 0 to n−2.

[1469] The location of the variant protein was determined according to results from a number of different software programs and analyses, including analyses from SignalP and other specialized programs. The variant protein is believed to be located as follows with regard to the cell: secreted. The protein localization is believed to be secreted because both signal-peptide prediction programs predict that this protein has a signal peptide, and neither trans-membrane region prediction program predicts that this protein has a trans-membrane region.

[1470] Variant protein Z44808_PEA_{—}1_P11 (SEQ ID NO:559) also has the following non-silent SNPs (Single Nucleotide Polymorphisms) as listed in Table 12, (given according to their position(s) on the amino acid sequence, with the alternative amino acid(s) listed; the last column indicates whether the SNP is known or not; the presence of known SNPs in variant protein Z44808_PEA_{—}1_P11 (SEQ ID NO:559) sequence provides support for the deduced sequence of this variant protein according to the present invention).

TABLE 12
Amino acid mutations

| SNP position(s) on amino acid | Alternative | Previously |
|---|---|---|
| sequence | amino acid(s) | known SNP? |
| 147 | A -> | No |

[1471] Variant protein Z44808_PEA_{—}1_P11 (SEQ ID NO:559) is encoded by the following transcript(s): Z44808_PEA_{—}1_T11 (SEQ ID NO:23), for which the sequence(s) is/are given at the end of the application. The coding portion of transcript Z44808_PEA_{—}1_T11 (SEQ ID NO:23) is shown in bold; this coding portion starts at position 586 and ends at position 1872. The transcript also has the following SNPs as listed in Table 13 (given according to their position on the nucleotide sequence, with the alternative nucleic acid listed; the last column indicates whether the SNP is known or not; the presence of known SNPs in variant protein Z44808_PEA_{—}1_P11 (SEQ ID NO:559) sequence provides support for the deduced sequence of this variant protein according to the present invention).

TABLE 13
Nucleic acid SNPs

| SNP position on | Alternative | Previously |
|---|---|---|
| nucleotide sequence | nucleic acid | known SNP? |
| 549 | A -> G | No |
| 648 | T -> G | No |
| 2720 | G -> A | Yes |
| 3228 | G -> C | Yes |
| 1025 | C -> | No |
| 1626 | T -> C | No |
| 2164 | T -> C | No |
| 2193 | G -> A | Yes |
| 2363 | G -> T | Yes |
| 2545 | T -> C | No |
| 2583 | G -> C | Yes |
| 2667 | G -> T | No |

[1472] As noted above, cluster Z44808 features 21 segment(s), which were listed in Table 2 above and for which the sequence(s) are given at the end of the application. These segment(s) are portions of nucleic acid sequence(s) which are described herein separately because they are of particular interest. A description of each segment according to the present invention is now provided.

[1473] Segment cluster Z44808_PEA_{—}1_node_{—}0 (SEQ ID NO:220) according to the present invention is supported by 29 libraries. The number of libraries was determined as previously described. This segment can be found in the following transcript(s): Z44808_PEA_{—}1_T11 (SEQ ID NO:23), Z44808_PEA_{—}1_T4 (SEQ ID NO:24), Z44808_PEA_{—}1_T5 (SEQ ID NO:25), Z44808_PEA_{—}1_T8 (SEQ ID NO:26) and Z44808_PEA_{—}1_T9 (SEQ ID NO:27). Table 14 below describes the starting and ending position of this segment on each transcript.

TABLE 14
Segment location on transcripts

| | Segment | |
|---|---|---|
| | starting | Segment |
| Transcript name | position | ending position |
| Z44808_PEA_1_T11 (SEQ ID NO: 23) | 1 | 669 |
| Z44808_PEA_1_T4 (SEQ ID NO: 24) | 1 | 669 |
| Z44808_PEA_1_T5 (SEQ ID NO: 25) | 1 | 669 |
| Z44808_PEA_1_T8 (SEQ ID NO: 26) | 1 | 669 |
| Z44808_PEA_1_T9 (SEQ ID NO: 27) | 1 | 669 |

[1474] Segment cluster Z44808_PEA_{—}1_node_{—}16 (SEQ ID NO:221) according to the present invention is supported by 39 libraries. The number of libraries was determined as previously described. This segment can be found in the following transcript(s): Z44808_PEA_{—}1_T11 (SEQ ID NO:23), Z44808_PEA_{—}1_T4 (SEQ ID NO:24), Z44808_PEA_{—}1_T5 (SEQ ID NO:25), Z44808_PEA_{—}1_T8 (SEQ ID NO:26) and Z44808_PEA_{—}1_T9 (SEQ ID NO:27). Table 15 below describes the starting and ending position of this segment on each transcript.

TABLE 15
Segment location on transcripts

| | Segment | |
|---|---|---|
| | starting | Segment |
| Transcript name | position | ending position |
| Z44808_PEA_1_T11 (SEQ ID NO: 23) | 1172 | 1358 |
| Z44808_PEA_1_T4 (SEQ ID NO: 24) | 1223 | 1409 |
| Z44808_PEA_1_T5 (SEQ ID NO: 25) | 1223 | 1409 |
| Z44808_PEA_1_T8 (SEQ ID NO: 26) | 1223 | 1409 |
| Z44808_PEA_1_T9 (SEQ ID NO: 27) | 1223 | 1409 |

[1475] Segment cluster Z44808_PEA_{—}1_node_{—}2 (SEQ ID NO:222) according to the present invention is supported by 34 libraries. The number of libraries was determined as previously described. This segment can be found in the following transcript(s): Z44808_PEA_{—}1_T11 (SEQ ID NO:23), Z44808_PEA_{—}1_T4 (SEQ ID NO:24), Z44808_PEA_{—}1_T5 (SEQ ID NO:25), Z44808_PEA_{—}1_T8 (SEQ ID NO:26) and Z44808_PEA_{—}1_T9 (SEQ ID NO:27). Table 16 below describes the starting and ending position of this segment on each transcript.

TABLE 16
Segment location on transcripts

| | Segment | |
|---|---|---|
| | starting | Segment |
| Transcript name | position | ending position |
| Z44808_PEA_1_T11 (SEQ ID NO: 23) | 670 | 841 |
| Z44808_PEA_1_T4 (SEQ ID NO: 24) | 670 | 841 |
| Z44808_PEA_1_T5 (SEQ ID NO: 25) | 670 | 841 |
| Z44808_PEA_1_T8 (SEQ ID NO: 26) | 670 | 841 |
| Z44808_PEA_1_T9 (SEQ ID NO: 27) | 670 | 841 |

[1476] Segment cluster Z44808_PEA_{—}1_node_{—}24 (SEQ ID NO:223) according to the present invention is supported by 52 libraries. The number of libraries was determined as previously described. This segment can be found in the following transcript(s): Z44808_PEA_{—}1_T11 (SEQ ID NO:23), Z44808_PEA_{—}1_T4 (SEQ ID NO:24), Z44808_PEA_{—}1_T5 (SEQ ID NO:25), Z44808_PEA_{—}1_T8 (SEQ ID NO:26) and Z44808_PEA_{—}1_T9 (SEQ ID NO:27). Table 17 below describes the starting and ending position of this segment on each transcript.

TABLE 17
Segment location on transcripts

| | Segment | |
|---|---|---|
| | starting | Segment |
| Transcript name | position | ending position |
| Z44808_PEA_1_T11 (SEQ ID NO: 23) | 1545 | 1819 |
| Z44808_PEA_1_T4 (SEQ ID NO: 24) | 1596 | 1870 |
| Z44808_PEA_1_T5 (SEQ ID NO: 25) | 1596 | 1870 |
| Z44808_PEA_1_T8 (SEQ ID NO: 26) | 1596 | 1870 |
| Z44808_PEA_1_T9 (SEQ ID NO: 27) | 1596 | 1870 |

[1477] Segment cluster Z44808_PEA_{—}1_node_{—}32 (SEQ ID NO:224) according to the present invention is supported by 17 libraries. The number of libraries was determined as previously described. This segment can be found in the following transcript(s): Z44808_PEA_{—}1_T4 (SEQ ID NO:24) and Z44808_PEA_{—}1_T8 (SEQ ID NO:26). Table 18 below describes the starting and ending position of this segment on each transcript.

TABLE 18
Segment location on transcripts

| | Segment | |
|---|---|---|
| | starting | Segment |
| Transcript name | position | ending position |
| Z44808_PEA_1_T4 (SEQ ID NO: 24) | 1909 | 3593 |
| Z44808_PEA_1_T8 (SEQ ID NO: 26) | 1909 | 2397 |

[1478] Segment cluster Z44808_PEA_{—}1_node_{—}33 (SEQ ID NO:225) according to the present invention is supported by 133 libraries. The number of libraries was determined as previously described. This segment can be found in the following transcript(s): Z44808_PEA_{—}1_T11 (SEQ ID NO:23), Z44808_PEA_{—}1_T4 (SEQ ID NO:24) and Z44808_PEA_{—}1_T5 (SEQ ID NO:25). Table 20 below describes the starting and ending position of this segment on each transcript.

TABLE 20
Segment location on transcripts

| | Segment | |
|---|---|---|
| | starting | Segment |
| Transcript name | position | ending position |
| Z44808_PEA_1_T11 (SEQ ID NO: 23) | 1858 | 2734 |
| Z44808_PEA_1_T4 (SEQ ID NO: 24) | 3594 | 4470 |
| Z44808_PEA_1_T5 (SEQ ID NO: 25) | 2004 | 2880 |

[1479] Segment cluster Z44808_PEA_{—}1_node_{—}36 (SEQ ID NO:226) according to the present invention is supported by 117 libraries. The number of libraries was determined as previously described. This segment can be found in the following transcript(s): Z44808_PEA_{—}1_T11 (SEQ ID NO:23), Z44808_PEA_{—}1_T4 (SEQ ID NO:24) and Z44808_PEA_{—}1_T5 (SEQ ID NO:25). Table 21 below describes the starting and ending position of this segment on each transcript.

TABLE 21
Segment location on transcripts

| | Segment | |
|---|---|---|
| | starting | Segment |
| Transcript name | position | ending position |
| Z44808_PEA_1_T11 (SEQ ID NO: 23) | 2829 | 3080 |
| Z44808_PEA_1_T4 (SEQ ID NO: 24) | 4565 | 4816 |
| Z44808_PEA_1_T5 (SEQ ID NO: 25) | 2975 | 3226 |

[1480] Segment cluster Z44808_PEA_{—}1_node_{—}37 (SEQ ID NO:227) according to the present invention is supported by 120 libraries. The number of libraries was determined as previously described. This segment can be found in the following transcript(s): Z44808_PEA_{—}1_T11 (SEQ ID NO:23), Z44808_PEA_{—}1_T4 (SEQ ID NO:24) and Z44808_PEA_{—}1_T5 (SEQ ID NO:25). Table 22 below describes the starting and ending position of this segment on each transcript.

TABLE 22
Segment location on transcripts

| | Segment | |
|---|---|---|
| | starting | Segment |
| Transcript name | position | ending position |
| Z44808_PEA_1_T11 (SEQ ID NO: 23) | 3081 | 3429 |
| Z44808_PEA_1_T4 (SEQ ID NO: 24) | 4817 | 5165 |
| Z44808_PEA_1_T5 (SEQ ID NO: 25) | 3227 | 3575 |

[1481] Segment cluster Z44808_PEA_{—}1_node_{—}41 (SEQ ID NO:228) according to the present invention is supported by 2 libraries. The number of libraries was determined as previously described. This segment can be found in the following transcript(s): Z44808_PEA_{—}1_T9 (SEQ ID NO:27). Table 23 below describes the starting and ending position of this segment on each transcript.

TABLE 23
Segment location on transcripts

| | Segment | |
|---|---|---|
| | starting | Segment |
| Transcript name | position | ending position |
| Z44808_PEA_1_T9 (SEQ ID NO: 27) | 1974 | 2206 |

[1482] According to an optional embodiment of the present invention, short segments related to the above cluster are also provided. These segments are up to about 120 bp in length, and so are included in a separate description.

[1483] Segment cluster Z44808_PEA_{—}1_node_{—}11 (SEQ ID NO:229) according to the present invention is supported by 25 libraries. The number of libraries was determined as previously described. This segment can be found in the following transcript(s): Z44808_PEA_{—}1_T4 (SEQ ID NO:24), Z44808_PEA_{—}1_T5 (SEQ ID NO:25), Z44808_PEA_{—}1_T8 (SEQ ID NO:26) and Z44808_PEA_{—}1_T9 (SEQ ID NO:27). Table 24 below describes the starting and ending position of this segment on each transcript.

TABLE 24
Segment location on transcripts

| | Segment | |
|---|---|---|
| | starting | Segment |
| Transcript name | position | ending position |
| Z44808_PEA_1_T4 (SEQ ID NO: 24) | 1097 | 1147 |
| Z44808_PEA_1_T5 (SEQ ID NO: 25) | 1097 | 1147 |
| Z44808_PEA_1_T8 (SEQ ID NO: 26) | 1097 | 1147 |
| Z44808_PEA_1_T9 (SEQ ID NO: 27) | 1097 | 1147 |

[1484] Segment cluster Z44808_PEA_{—}1_node_{—}13 (SEQ ID NO:230) according to the present invention is supported by 28 libraries. The number of libraries was determined as previously described. This segment can be found in the following transcript(s): Z44808_PEA_{—}1_T11 (SEQ ID NO:23), Z44808_PEA_{—}1_T4 (SEQ ID NO:24), Z44808_PEA_{—}1_T5 (SEQ ID NO:25), Z44808_PEA_{—}1_T8 (SEQ ID NO:26) and Z44808_PEA_{—}1_T9 (SEQ ID NO:27). Table 25 below describes the starting and ending position of this segment on each transcript.

TABLE 25
Segment location on transcripts

| | Segment | |
|---|---|---|
| | starting | Segment |
| Transcript name | position | ending position |
| Z44808_PEA_1_T11 (SEQ ID NO: 23) | 1097 | 1171 |
| Z44808_PEA_1_T4 (SEQ ID NO: 24) | 1148 | 1222 |
| Z44808_PEA_1_T5 (SEQ ID NO: 25) | 1148 | 1222 |
| Z44808_PEA_1_T8 (SEQ ID NO: 26) | 1148 | 1222 |
| Z44808_PEA_1_T9 (SEQ ID NO: 27) | 1148 | 1222 |

[1485] Segment cluster Z44808_PEA_{—}1_node_{—}18 (SEQ ID NO:231) according to the present invention is supported by 27 libraries. The number of libraries was determined as previously described. This segment can be found in the following transcript(s): Z44808_PEA_{—}1_T11 (SEQ ID NO:23), Z44808_PEA_{—}1_T4 (SEQ ID NO:24), Z44808_PEA_{—}1_T5 (SEQ ID NO:25), Z44808_PEA_{—}1_T8 (SEQ ID NO:26) and Z44808_PEA_{—}1_T9 (SEQ ID NO:27). Table 26 below describes the starting and ending position of this segment on each transcript.

TABLE 26
Segment location on transcripts

| | Segment | |
|---|---|---|
| | starting | Segment |
| Transcript name | position | ending position |
| Z44808_PEA_1_T11 (SEQ ID NO: 23) | 1359 | 1441 |
| Z44808_PEA_1_T4 (SEQ ID NO: 24) | 1410 | 1492 |
| Z44808_PEA_1_T5 (SEQ ID NO: 25) | 1410 | 1492 |
| Z44808_PEA_1_T8 (SEQ ID NO: 26) | 1410 | 1492 |
| Z44808_PEA_1_T9 (SEQ ID NO: 27) | 1410 | 1492 |

[1486] Segment cluster Z44808_PEA_{—}1_node_{—}22 (SEQ ID NO:232) according to the present invention is supported by 33 libraries. The number of libraries was determined as previously described. This segment can be found in the following transcript(s): Z44808_PEA_{—}1_T11 (SEQ ID NO:23), Z44808_PEA_{—}1_T4 (SEQ ID NO:24), Z44808_PEA_{—}1_T5 (SEQ ID NO:25), Z44808_PEA_{—}1_T8 (SEQ ID NO:26) and Z44808_PEA_{—}1_T9 (SEQ ID NO:27). Table 27 below describes the starting and ending position of this segment on each transcript.

TABLE 27
Segment location on transcripts

| | Segment | |
|---|---|---|
| | starting | Segment |
| Transcript name | position | ending position |
| Z44808_PEA_1_T11 (SEQ ID NO: 23) | 1442 | 1544 |
| Z44808_PEA_1_T4 (SEQ ID NO: 24) | 1493 | 1595 |
| Z44808_PEA_1_T5 (SEQ ID NO: 25) | 1493 | 1595 |
| Z44808_PEA_1_T8 (SEQ ID NO: 26) | 1493 | 1595 |
| Z44808_PEA_1_T9 (SEQ ID NO: 27) | 1493 | 1595 |

[1487] Microarray (chip) data is also available for this segment as follows. As described above with regard to the cluster itself, various oligonucleotides were tested for being differentially expressed in various disease conditions, particularly cancer. The following oligonucleotides were found to hit this segment, shown in Table 28.

TABLE 28
Oligonucleotides related to this segment

| | Overexpressed | |
|---|---|---|
| Oligonucleotide name | in cancers | Chip reference |
| Z44808_0_8_0 (SEQ ID NO: 1407) | Lung squamous | LUN |
| | cell carcinoma | |

[1488] Segment cluster Z44808_PEA_{—}1_node_{—}26 (SEQ ID NO:233) according to the present invention is supported by 2 libraries. The number of libraries was determined as previously described. This segment can be found in the following transcript(s): Z44808_PEA_{—}1_T5 (SEQ ID NO:25). Table 29 below describes the starting and ending position of this segment on each transcript.

TABLE 29
Segment location on transcripts

| | | Segment |
|---|---|---|
| | Segment | ending |
| Transcript name | starting position | position |
| Z44808_PEA_1_T5 (SEQ ID NO: 25) | 1871 | 1965 |

[1489] Segment cluster Z44808_PEA_{—}1_node_{—}30 (SEQ ID NO:234) according to the present invention is supported by 44 libraries. The number of libraries was determined as previously described. This segment can be found in the following transcript(s): Z44808_PEA_{—}1_T11 (SEQ ID NO:23), Z44808_PEA_{—}1_T4 (SEQ ID NO:24), Z44808_PEA_{—}1_T5 (SEQ ID NO:25), Z44808_PEA_{—}1_T8 (SEQ ID NO:26) and Z44808_PEA_{—}1_T9 (SEQ ID NO:27). Table 31 below describes the starting and ending position of this segment on each transcript.

TABLE 31
Segment location on transcripts

| | | Segment |
|---|---|---|
| | Segment | ending |
| Transcript name | starting position | position |
| Z44808_PEA_1_T11 (SEQ ID NO: 23) | 1820 | 1857 |
| Z44808_PEA_1_T4 (SEQ ID NO: 24) | 1871 | 1908 |
| Z44808_PEA_1_T5 (SEQ ID NO: 25) | 1966 | 2003 |
| Z44808_PEA_1_T8 (SEQ ID NO: 26) | 1871 | 1908 |
| Z44808_PEA_1_T9 (SEQ ID NO: 27) | 1871 | 1908 |

[1490] Segment cluster Z44808_PEA_{—}1_node_{—}34 (SEQ ID NO:235) according to the present invention is supported by 70 libraries. The number of libraries was determined as previously described. This segment can be found in the following transcript(s): Z44808_PEA_{—}1_T11 (SEQ ID NO:23), Z44808_PEA_{—}1_T4 (SEQ ID NO:24) and Z44808_PEA_{—}1_T5 (SEQ ID NO:25). Table 32 below describes the starting and ending position of this segment on each transcript.

TABLE 32
Segment location on transcripts

| | | Segment |
|---|---|---|
| | Segment | ending |
| Transcript name | starting position | position |
| Z44808_PEA_1_T11 (SEQ ID NO: 23) | 2735 | 2809 |
| Z44808_PEA_1_T4 (SEQ ID NO: 24) | 4471 | 4545 |
| Z44808_PEA_1_T5 (SEQ ID NO: 25) | 2881 | 2955 |

[1491] Segment cluster Z44808_PEA_{—}1_node_{—}35 (SEQ ID NO:236) according to the present invention can be found in the following transcript(s): Z44808_PEA_{—}1_T11 (SEQ ID NO:23), Z44808_PEA_{—}1_T4 (SEQ ID NO:24) and Z44808_PEA_{—}1_T5 (SEQ ID NO:25). Table 33 below describes the starting and ending position of this segment on each transcript.

TABLE 33
Segment location on transcripts

| | | Segment |
|---|---|---|
| | Segment | ending |
| Transcript name | starting position | position |
| Z44808_PEA_1_T11 (SEQ ID NO: 23) | 2810 | 2828 |
| Z44808_PEA_1_T4 (SEQ ID NO: 24) | 4546 | 4564 |
| Z44808_PEA_1_T5 (SEQ ID NO: 25) | 2956 | 2974 |

[1492] Segment cluster Z44808_PEA_{—}1_node_{—}39 (SEQ ID NO:237) according to the present invention is supported by 1 libraries. The number of libraries was determined as previously described. This segment can be found in the following transcript(s): Z44808_PEA_{—}1_T9 (SEQ ID NO:27). Table 34 below describes the starting and ending position of this segment on each transcript.

TABLE 34
Segment location on transcripts

| | | Segment |
|---|---|---|
| | Segment | ending |
| Transcript name | starting position | position |
| Z44808_PEA_1_T9 (SEQ ID NO: 27) | 1909 | 1973 |

[1493] Segment cluster Z44808_PEA_{—}1_node_{—}4 (SEQ ID NO:238) according to the present invention is supported by 33 libraries. The number of libraries was determined as previously described. This segment can be found in the following transcript(s): Z44808_PEA_{—}1_T11 (SEQ ID NO:23), Z44808_PEA_{—}1_T4 (SEQ ID NO:24), Z44808_PEA_{—}1_T5 (SEQ ID NO:25) Z44808_PEA_{—}1_T8 (SEQ ID NO:26) and Z44808_PEA_{—}1_T9 (SEQ ID NO:27). Table 35 below describes the starting and ending position of this segment on each transcript.

TABLE 35
Segment location on transcripts

| | | Segment |
|---|---|---|
| | Segment | ending |
| Transcript name | starting position | position |
| Z44808_PEA_1_T11 (SEQ ID NO: 23) | 842 | 948 |
| Z44808_PEA_1_T4 (SEQ ID NO: 24) | 842 | 948 |
| Z44808_PEA_1_T5 (SEQ ID NO: 25) | 842 | 948 |
| Z44808_PEA_1_T8 (SEQ ID NO: 26) | 842 | 948 |
| Z44808_PEA_1_T9 (SEQ ID NO: 27) | 842 | 948 |

[1494] Segment cluster Z44808_PEA_{—}1_node_{—}6 (SEQ ID NO:239) according to the present invention is supported by 30 libraries. The number of libraries was determined as previously described. This segment can be found in the following transcript(s): Z44808_PEA_{—}1_T11 (SEQ ID NO:23), Z44808_PEA_{—}1_T4 (SEQ ID NO:24), Z44808_PEA_{—}1_T5 (SEQ ID NO:25), Z44808_PEA_{—}1_T8 (SEQ ID NO:26) and Z44808_PEA_{—}1_T9 (SEQ ID NO:27). Table 36 below describes the starting and ending position of this segment on each transcript.

TABLE 36
Segment location on transcripts

| | | Segment |
|---|---|---|
| | Segment | ending |
| Transcript name | starting position | position |
| Z44808_PEA_1_T11 (SEQ ID NO: 23) | 949 | 1048 |
| Z44808_PEA_1_T4 (SEQ ID NO: 24) | 949 | 1048 |
| Z44808_PEA_1_T5 (SEQ ID NO: 25) | 949 | 1048 |
| Z44808_PEA_1_T8 (SEQ ID NO: 26) | 949 | 1048 |
| Z44808_PEA_1_T9 (SEQ ID NO: 27) | 949 | 1048 |

[1495] Segment cluster Z44808_PEA_{—}1_node_{—}8 (SEQ ID NO:240) according to the present invention is supported by 25 libraries. The number of libraries was determined as previously described. This segment can be found in the following transcript(s): Z44808_PEA_{—}1_T11 (SEQ ID NO:23), Z44808_PEA_{—}1_T4 (SEQ ID NO:24), Z44808_PEA_{—}1_T5 (SEQ ID NO:25), Z44808_PEA_{—}1_T8 (SEQ ID NO:26) and Z44808_PEA_{—}1_T9 (SEQ ID NO:27). Table 37 below describes the starting and ending position of this segment on each transcript.

TABLE 37
Segment location on transcripts

| | | Segment |
|---|---|---|
| | Segment | ending |
| Transcript name | starting position | position |
| Z44808_PEA_1_T11 (SEQ ID NO: 23) | 1049 | 1096 |
| Z44808_PEA_1_T4 (SEQ ID NO: 24) | 1049 | 1096 |
| Z44808_PEA_1_T5 (SEQ ID NO: 25) | 1049 | 1096 |
| Z44808_PEA_1_T8 (SEQ ID NO: 26) | 1049 | 1096 |
| Z44808_PEA_1_T9 (SEQ ID NO: 27) | 1049 | 1096 |

### Variant Protein Alignment to the Previously Known Protein:

[chemical structure]

[chemical structure]

[chemical structure]

[chemical structure]

[chemical structure]

[chemical structure]

[chemical structure]

[chemical structure]

[chemical structure]

[chemical structure]

[chemical structure]

[chemical structure]

[chemical structure]

[chemical structure]

[chemical structure]

[chemical structure]

[chemical structure]

[chemical structure]

[chemical structure]

[chemical structure]

[chemical structure]

[chemical structure]

[chemical structure]

[chemical structure]

[chemical structure]

[chemical structure]

[chemical structure]

[chemical structure]

[chemical structure]

[chemical structure]

[chemical structure]

[chemical structure]

[chemical structure]

[chemical structure]

[chemical structure]

[chemical structure]

### Expression of SMO2_HUMAN SPARC Related Modular Calcium-Binding Protein 2 Precursor (Secreted Modular Calcium-Binding Protein 2) (SMOC-2) (Smooth Muscle-Associated Protein 2) Z44808 Transcripts which are Detectable by Amplicon as Depicted in Sequence Name Z44808junc8-11 (SEQ ID NO: 1291) in Normal and Cancerous Colon Tissues

[1497] Expression of SMO2_HUMAN SPARC related modular calcium-binding protein 2 precursor (Secreted modular calcium-binding protein 2) (SMOC-2) (Smooth muscle-associated protein 2) transcripts detectable by or according to junc8-11, Z44808junc8-11 amplicon (SEQ ID NO: 1291) and primers Z44808junc8-11 (SEQ ID NO: 1289) and Z44808junc8-11R (SEQ ID NO: 1290) was measured by real time PCR. In parallel the expression of four housekeeping genes —PBGD (GenBank Accession No. BC019323 (SEQ ID NO:1576); amplicon—PBGD-amplicon, SEQ ID NO:531), HPRT1 (GenBank Accession No. NM_{—}000194 (SEQ ID NO:1577); amplicon —HPRT1-amplicon, SEQ ID NO:612), G6PD (GenBank Accession No. NM_{—}000402 (SEQ ID NO:1578); G6PD amplicon, SEQ ID NO:615), RPS27A (GenBank Accession No. NM_{—}002954 (SEQ ID NO:1579); RPS27A amplicon, SEQ ID NO:1261) was measured similarly. For each RT sample, the expression of the above amplicon was normalized to the geometric mean of the quantities of the housekeeping genes. The normalized quantity of each RT sample was then divided by the median of the quantities of the normal post-mortem (PM) samples (Sample Nos. 41, 52, 62-67, 69-71, Table 1, above, “Tissue samples in testing panel”), to obtain a value of fold up-regulation for each sample relative to median of the normal PM samples.

[1498] FIG. 32 is a histogram showing over expression of the above-indicated SMO2_HUMAN SPARC related modular calcium-binding protein 2 precursor (Secreted modular calcium-binding protein 2) (SMOC-2) (Smooth muscle-associated protein 2) transcripts in cancerous colon samples relative to the normal samples.

[1499] As is evident from FIG. 32, the expression of SMO2_HUMAN SPARC related modular calcium-binding protein 2 precursor (Secreted modular calcium-binding protein 2) (SMOC-2) (Smooth muscle-associated protein 2) transcripts detectable by the above amplicon in cancer samples was higher in a few samples than in the non-cancerous samples (Sample Nos. 41, 52, 62-67, 69-71, Table 1, above, “Tissue samples in testing panel”). Notably an over-expression of at least 5 fold was found in 4 out of 36 adenocarcinoma samples.

[1500] Primer pairs are also optionally and preferably encompassed within the present invention; for example, for the above experiment, the following primer pair was used as a non-limiting illustrative example only of a suitable primer pair: Z44808junc8-11F forward primer (SEQ ID NO: 1289); and Z44808junc8-11R reverse primer (SEQ ID NO: 1290).

[1501] The present invention also preferably encompasses any amplicon obtained through the use of any suitable primer pair; for example, for the above experiment, the following amplicon was obtained as a non-limiting illustrative example only of a suitable amplicon: Z44808junc8-11 (SEQ ID NO: 1291).

Primers:
Forward primer Z44808junc8-11F (SEQ ID NO: 1289):
GAAGGCACAGGAAAAACAGATATTG
Reverse primer Z44808junc8-11R (SEQ ID NO: 1290):
TGGTGCTCTTGGTCACAGGAT
Amplicon Z44808junc8-11 (SEQ ID NO: 1291):
GAAGGCACAGGAAAAACAGATATTGCATCACGTTACCCTACCCTTTGGAC
TGAACAGGTTAAAAGTCGGCAGAACAAAACCAATAAGAATTCAGTGTCAT
CCTGTGACCAAGAGCACCA

### Expression of SMO2_HUMAN SPARC Related Modular Calcium-Binding Protein 2 Precursor (Secreted Modular Calcium-Binding Protein 2) (SMOC-2) (Smooth Muscle-Associated Protein 2) Z44808 Transcripts which are Detectable by Amplicon as Depicted in Sequence Name Z44808 junc8-11 (SEQ ID NO: 1291) in Different Normal Tissues

[1502] Expression of SMO2_HUMAN SPARC related modular calcium-binding protein 2 precursor (Secreted modular calcium-binding protein 2) (SMOC-2) (Smooth muscle-associated protein 2) transcripts detectable by or according to Z44808 junc8-11 amplicon (SEQ ID NO: 1291) and primers: Z44808 junc8-11F (SEQ ID NO: 1289) and Z44808 junc8-11R (SEQ ID NO: 1290) was measured by real time PCR. In parallel the expression of four housekeeping genes —RPL19 (GenBank Accession No. NM_{—}000981 (SEQ ID NO:1580); RPL19 amplicon, SEQ ID NO:1264), TATA box (GenBank Accession No. NM_{—}003194 (SEQ ID NO:1581); TATA amplicon, SEQ ID NO:1267), Ubiquitin (GenBank Accession No. BC000449 (SEQ ID NO:1582); amplicon-Ubiquitin-amplicon) and SDHA (GenBank Accession No. NM_{—}004168 (SEQ ID NO:1583); amplicon—SDHA-amplicon, SEQ ID NO:1273) was measured similarly. For each RT sample, the expression of the above amplicon was normalized to the geometric mean of the quantities of the housekeeping genes. The normalized quantity of each RT sample was then divided by the median of the quantities of the ovary samples (Sample Nos. 18-20, Table 2, “Tissue samples in normal panel”), to obtain a value of relative expression of each sample relative to median of the ovary samples.

Primers:
Forward primer Z44808junc8-11F (SEQ ID NO: 1289):
GAAGGCACAGGAAAAACAGATATTG
Reverse primer Z44808junc8-11R (SEQ ID NO: 1290):
TGGTGCTCTTGGTCACAGGAT
Amplicon Z44808junc8-11 (SEQ ID NO: 1291):
GAAGGCACAGGAAAAACAGATATTGCATCACGTTACCCTACCCTTTGGAC
TGAACAGGTTAAAAGTCGGCAGAACAAAACCAATAAGAATTCAGTGTCAT
CCTGTGACCAAGAGCACCA

[1503] The results are shown in FIG. 39, demonstrating the expression of SMO2_HUMAN SPARC related modular calcium-binding protein 2 precursor (Secreted modular calcium-binding protein 2) (SMOC-2) (Smooth muscle-associated protein 2) Z44808 transcripts which are detectable by amplicon as depicted in sequence name Z44808 junc8-11 (SEQ ID NO: 1291) in different normal tissues.

### Description for Cluster Z25299

[1504] Cluster Z25299 features 5 transcript(s) and 11 segment(s) of interest, the names for which are given in Tables 1 and 2, respectively, the sequences themselves are given at the end of the application. The selected protein variants are given in table 3.

TABLE 1
Transcripts of interest

| Transcript Name | SEQ ID NO: |
|---|---|
| Z25299_PEA_2_T1 | 28 |
| Z25299_PEA_2_T2 | 29 |
| Z25299_PEA_2_T3 | 30 |
| Z25299_PEA_2_T6 | 31 |
| Z25299_PEA_2_T9 | 32 |

TABLE 2
Segments of interest

| Segment Name | SEQ ID NO: |
|---|---|
| Z25299_PEA_2_node_20 | 241 |
| Z25299_PEA_2_node_21 | 242 |
| Z25299_PEA_2_node_23 | 243 |
| Z25299_PEA_2_node_24 | 244 |
| Z25299_PEA_2_node_8 | 245 |
| Z25299_PEA_2_node_12 | 246 |
| Z25299_PEA_2_node_13 | 247 |
| Z25299_PEA_2_node_14 | 248 |
| Z25299_PEA_2_node_17 | 249 |
| Z25299_PEA_2_node_18 | 250 |
| Z25299_PEA_2_node_19 | 251 |

TABLE 3
Proteins of interest

| Protein Name | SEQ ID NO: |
|---|---|
| Z25299_PEA_2_P2 | 560 |
| Z25299_PEA_2_P3 | 561 |
| Z25299_PEA_2_P7 | 562 |
| Z25299_PEA_2_P10 | 563 |

[1505] These sequences are variants of the known protein Antileukoproteinase 1 precursor (SwissProt accession identifier ALK1_HUMAN; known also according to the synonyms ALP; HUSI-1; Seminal proteinase inhibitor; Secretory leukocyte protease inhibitor; BLPI; Mucus proteinase inhibitor; MPI; WAP four-disulfide core domain protein 4; Protease inhibitor WAP4), SEQ ID NO: 625, referred to herein as the previously known protein.

[1506] Protein Antileukoproteinase 1 precursor (SEQ ID NO:625) is known or believed to have the following function(s): Acid-stable proteinase inhibitor with strong affinities for trypsin, chymotrypsin, elastase, and cathepsin G. May prevent elastase-mediated damage to oral and possibly other mucosal tissues. The sequence for protein Antileukoproteinase 1 precursor is given at the end of the application, as “Antileukoproteinase 1 precursor amino acid sequence”. Protein Antileukoproteinase 1 precursor localization is believed to be Secreted.

[1507] It has been investigated for clinical/therapeutic use in humans, for example as a target for an antibody or small molecule, and/or as a direct therapeutic; available information related to these investigations is as follows. Potential pharmaceutically related or therapeutically related activity or activities of the previously known protein are as follows: Elastase inhibitor; Tryptase inhibitor. A therapeutic role for a protein represented by the cluster has been predicted. The cluster was assigned this field because there was information in the drug database or the public databases (e.g., described herein above) that this protein, or part thereof, is used or can be used for a potential therapeutic indication: Anti-inflammatory; Antiasthma.

[1508] The following GO Annotation(s) apply to the previously known protein. The following annotation(s) were found: proteinase inhibitor; serine protease inhibitor, which are annotation(s) related to Molecular Function.

[1509] The GO assignment relies on information from one or more of the SwissProt/TremB1 Protein knowledgebase, available from <http://www.expasy.ch/sprot/>; or Locuslink, available from <http://www.ncbi.nlm.nih.gov/projects/LocusLink/>.

[1510] Cluster Z25299 can be used as a diagnostic marker according to overexpression of transcripts of this cluster in cancer. Expression of such transcripts in normal tissues is also given according to the previously described methods. The term “number” in the left hand column of the table and the numbers on the y-axis of the figure below refer to weighted expression of ESTs in each category, as “parts per million” (ratio of the expression of ESTs for a particular cluster to the expression of all ESTs in that category, according to parts per million).

[1511] Overall, the following results were obtained as shown with regard to the histograms in FIG. 20 and Table 4. This cluster is overexpressed (at least at a minimum level) in the following pathological conditions: brain malignant tumors, a mixture of malignant tumors from different tissues and ovarian carcinoma.

TABLE 4
Normal tissue distribution

| Name of Tissue | Number |
|---|---|
| Bladder | 82 |
| Bone | 6 |
| Brain | 0 |
| colon | 37 |
| epithelial | 145 |
| general | 73 |
| head and neck | 638 |
| kidney | 26 |
| liver | 68 |
| lung | 465 |
| breast | 52 |
| ovary | 0 |
| pancreas | 20 |
| prostate | 36 |
| skin | 215 |
| stomach | 219 |
| uterus | 113 |

TABLE 5
P values and ratios for expression in cancerous tissue

| Name of Tissue | P1 | P2 | SP1 | R3 | SP2 | R4 |
|---|---|---|---|---|---|---|
| bladder | 8.2e−01 | 8.5e−01 | 9.2e−01 | 0.6 | 9.7e−01 | 0.5 |
| bone | 5.5e−01 | 7.3e−01 | 4.0e−01 | 2.1 | 4.9e−01 | 1.5 |
| brain | 8.8e−02 | 1.5e−01 | 2.3e−03 | 7.7 | 1.2e−02 | 4.8 |
| colon | 3.3e−01 | 2.8e−01 | 4.2e−01 | 1.6 | 4.2e−01 | 1.5 |
| epithelial | 2.5e−01 | 7.6e−01 | 3.8e−01 | 1.0 | 1 | 0.6 |
| general | 6.4e−03 | 2.5e−01 | 1.7e−06 | 1.6 | 5.2e−01 | 0.9 |
| head and neck | 3.6e−01 | 5.9e−01 | 7.6e−01 | 0.6 | 1 | 0.3 |
| kidney | 7.4e−01 | 8.4e−01 | 2.1e−01 | 2.1 | 4.2e−01 | 1.4 |
| liver | 4.1e−01 | 9.1e−01 | 4.2e−02 | 3.2 | 6.4e−01 | 0.8 |
| lung | 7.6e−01 | 8.3e−01 | 9.8e−01 | 0.5 | 1 | 0.3 |
| breast | 5.0e−01 | 5.5e−01 | 9.8e−02 | 1.6 | 3.4e−01 | 1.1 |
| ovary | 3.7e−02 | 3.0e−02 | 6.9e−03 | 6.1 | 4.9e−03 | 5.6 |
| pancreas | 3.8e−01 | 3.6e−01 | 3.6e−01 | 1.7 | 3.9e−01 | 1.5 |
| prostate | 9.1e−01 | 9.2e−01 | 8.9e−01 | 0.5 | 9.4e−01 | 0.5 |
| skin | 6.0e−01 | 8.1e−01 | 9.3e−01 | 0.4 | 1 | 0.1 |
| stomach | 3.0e−01 | 8.1e−01 | 9.1e−01 | 0.6 | 1 | 0.3 |
| uterus | 1.6e−01 | 1.3e−01 | 3.2e−02 | 1.6 | 3.0e−01 | 1.1 |

[1512] As noted above, cluster Z25299 features 5 transcript(s), which were listed in Table 1 above. These transcript(s) encode for protein(s) which are variant(s) of protein Antileukoproteinase 1 precursor (SEQ ID NO:625). A description of each variant protein according to the present invention is now provided.

[1513] Variant protein Z25299_PEA_{—}2_P2 (SEQ ID NO:560) according to the present invention has an amino acid sequence as given at the end of the application; it is encoded by transcript(s) Z25299_PEA_{—}2_T1 (SEQ ID NO:28). An alignment is given to the known protein (Antileukoproteinase 1 precursor (SEQ ID NO:625)) at the end of the application. One or more alignments to one or more previously published protein sequences are given at the end of the application. A brief description of the relationship of the variant protein according to the present invention to each such aligned protein is as follows:

[1514] Comparison Report Between Z25299_PEA_{—}2_P2 (SEQ ID NO:560) and ALK1_HUMAN (SEQ ID NO:625):

[1515] 1. An isolated chimeric polypeptide encoding for Z25299_PEA_{—}2_P2 (SEQ ID NO:560), comprising a first amino acid sequence being at least 90% homologous to MKSSGLFPFLVLLALGTLAPWAVEGSGKSFKAGVCPPKKSAQCLRYKKPECQSDWQCPGKKRCCPDTCGI KCLDPVDTPNPTRRKPGKCPVTYGQCLMLNPPNFCEMDGQCKRDLKCCMGMCGKSCVSPVK corresponding to amino acids 1-131 of ALK1_HUMAN (SEQ ID NO:625), which also corresponds to amino acids 1-131 of Z25299_PEA_{—}2_P2 (SEQ ID NO:560), and a second amino acid sequence being at least 70%, optionally at least 80%, preferably at least 85%, more preferably at least 90% and most preferably at least 95% homologous to a polypeptide having the sequence GKQGMRAH (SEQ ID NO:1503) corresponding to amino acids 132-139 of Z25299_PEA_{—}2_P2 (SEQ ID NO:560), wherein said first and second amino acid sequences are contiguous and in a sequential order.

[1516] 2. An isolated polypeptide encoding for a tail of Z25299_PEA_{—}2_P2 (SEQ ID NO:560), comprising a polypeptide being at least 70%, optionally at least about 80%, preferably at least about 85%, more preferably at least about 90% and most preferably at least about 95% homologous to the sequence GKQGMRAH (SEQ ID NO:1503) in Z25299_PEA_{—}2_P2 (SEQ ID NO:560).

[1517] The location of the variant protein was determined according to results from a number of different software programs and analyses, including analyses from SignalP and other specialized programs. The variant protein is believed to be located as follows with regard to the cell: secreted. The protein localization is believed to be secreted because both signal-peptide prediction programs predict that this protein has a signal peptide, and neither trans-membrane region prediction program predicts that this protein has a trans-membrane region.

[1518] Variant protein Z25299_PEA_{—}2_P2 (SEQ ID NO:560) also has the following non-silent SNPs (Single Nucleotide Polymorphisms) as listed in Table 6, (given according to their position(s) on the amino acid sequence, with the alternative amino acid(s) listed; the last column indicates whether the SNP is known or not; the presence of known SNPs in variant protein Z25299_PEA_{—}2_P2 (SEQ ID NO:560) sequence provides support for the deduced sequence of this variant protein according to the present invention).

TABLE 6
Amino acid mutations

| SNP position(s) | | |
|---|---|---|
| on amino acid | Alternative | Previously |
| sequence | amino acid(s) | known SNP? |
| 136 | M -> T | Yes |
| 20 | P -> | No |
| 43 | C -> R | No |
| 48 | K -> N | No |
| 83 | R -> K | No |
| 84 | R -> W | No |

[1519] Variant protein Z25299_PEA_{—}2_P2 (SEQ ID NO:560) is encoded by the following transcript(s): Z25299_PEA_{—}2_T1 (SEQ ID NO:28), for which the sequence(s) is/are given at the end of the application. The coding portion of transcript Z25299_PEA_{—}2_T1 (SEQ ID NO:28) is shown in bold; this coding portion starts at position 124 and ends at position 540. The transcript also has the following SNPs as listed in Table 7 (given according to their position on the nucleotide sequence, with the alternative nucleic acid listed; the last column indicates whether the SNP is known or not; the presence of known SNPs in variant protein Z25299_PEA_{—}2_P2 (SEQ ID NO:560) sequence provides support for the deduced sequence of this variant protein according to the present invention).

TABLE 7
Nucleic acid SNPs

| SNP position on | Alternative | Previously |
|---|---|---|
| nucleotide sequence | nucleic acid | known SNP? |
| 122 | C -> T | No |
| 123 | C -> T | No |
| 530 | T -> C | Yes |
| 989 | C -> T | Yes |
| 1127 | C -> T | Yes |
| 1162 | A -> C | Yes |
| 1180 | A -> C | Yes |
| 1183 | A -> C | Yes |
| 1216 | A -> C | Yes |
| 1262 | G -> A | Yes |
| 183 | T -> | No |
| 250 | T -> C | No |
| 267 | A -> C | No |
| 267 | A -> G | No |
| 339 | C -> T | Yes |
| 371 | G -> A | No |
| 373 | A -> T | No |
| 435 | C -> T | No |

[1520] Variant protein Z25299_PEA_{—}2_P3 (SEQ ID NO:561) according to the present invention has an amino acid sequence as given at the end of the application; it is encoded by transcript(s) Z25299_PEA_{—}2_T2 (SEQ ID NO:29). An alignment is given to the known protein (Antileukoproteinase 1 precursor (SEQ ID NO:625)) at the end of the application. One or more alignments to one or more previously published protein sequences are given at the end of the application. A brief description of the relationship of the variant protein according to the present invention to each such aligned protein is as follows:

[1521] Comparison Report Between Z25299_PEA_{—}2_P3 (SEQ ID NO:561) and ALK1_HUMAN (SEQ ID NO:625):

[1522] 1. An isolated chimeric polypeptide encoding for Z25299_PEA_{—}2_P3 (SEQ ID NO:561), comprising a first amino acid sequence being at least 90% homologous to MKSSGLFPFLVLLALGTLAPWAVEGSGKSFKAGVCPPKKSAQCLRYKKPECQSDWQCPGKKRCCPDTCGI KCLDPVDTPNPTRRKPGKCPVTYGQCLMLNPPNFCEMDGQCKRDLKCCMGMCGKSCVSPVK corresponding to amino acids 1-131 of ALK1_HUMAN (SEQ ID NO:625), which also corresponds to amino acids 1-131 of Z25299_PEA_{—}2_P3 (SEQ ID NO:561), and a second amino acid sequence being at least 70%, optionally at least 80%, preferably at least 85%, more preferably at least 90% and most preferably at least 95% homologous to a polypeptide having the sequence GEKRHHKQLRDQEVDPLEMRRHSAG (SEQ ID NO:1504) corresponding to amino acids 132-156 of Z25299_PEA_{—}2_P3 (SEQ ID NO:561), wherein said first and second amino acid sequences are contiguous and in a sequential order.

[1523] 2. An isolated polypeptide encoding for a tail of Z25299_PEA_{—}2_P3 (SEQ ID NO:561), comprising a polypeptide being at least 70%, optionally at least about 80%, preferably at least about 85%, more preferably at least about 90% and most preferably at least about 95% homologous to the sequence GEKRHHKQLRDQEVDPLEMRRHSAG (SEQ ID NO:1504) in Z25299_PEA_{—}2_P3 (SEQ ID NO:561).

[1524] The location of the variant protein was determined according to results from a number of different software programs and analyses, including analyses from SignalP and other specialized programs. The variant protein is believed to be located as follows with regard to the cell: secreted. The protein localization is believed to be secreted because both signal-peptide prediction programs predict that this protein has a signal peptide, and neither trans-membrane region prediction program predicts that this protein has a trans-membrane region.

[1525] Variant protein Z25299_PEA_{—}2_P3 (SEQ ID NO:561) also has the following non-silent SNPs (Single Nucleotide Polymorphisms) as listed in Table 8, (given according to their position(s) on the amino acid sequence, with the alternative amino acid(s) listed; the last column indicates whether the SNP is known or not; the presence of known SNPs in variant protein Z25299_PEA_{—}2_P3 (SEQ ID NO:561) sequence provides support for the deduced sequence of this variant protein according to the present invention).

TABLE 8
Amino acid mutations

| SNP position(s) on amino acid | Alternative | |
|---|---|---|
| sequence | amino acid(s) | Previously known SNP? |
| 20 | P -> | No |
| 43 | C -> R | No |
| 48 | K -> N | No |
| 83 | R -> K | No |
| 84 | R -> W | No |

[1526] Variant protein Z25299_PEA_{—}2_P3 (SEQ ID NO:561) is encoded by the following transcript(s): Z25299_PEA_{—}2_T2 (SEQ ID NO:29), for which the sequence(s) is/are given at the end of the application. The coding portion of transcript Z25299_PEA_{—}2_T2 (SEQ ID NO:29) is shown in bold; this coding portion starts at position 124 and ends at position 591. The transcript also has the following SNPs as listed in Table 9 (given according to their position on the nucleotide sequence, with the alternative nucleic acid listed; the last column indicates whether the SNP is known or not; the presence of known SNPs in variant protein Z25299_PEA_{—}2_P3 (SEQ ID NO:561) sequence provides support for the deduced sequence of this variant protein according to the present invention).

TABLE 9
Nucleic acid SNPs

| SNP position on | Alternative | Previously |
|---|---|---|
| nucleotide sequence | nucleic acid | known SNP? |
| 122 | C -> T | No |
| 123 | C -> T | No |
| 183 | T -> | No |
| 250 | T -> C | No |
| 267 | A -> C | No |
| 267 | A -> G | No |
| 339 | C -> T | Yes |
| 371 | G -> A | No |
| 373 | A -> T | No |
| 435 | C -> T | No |

[1527] Variant protein Z25299_PEA_{—}2_P7 (SEQ ID NO:562) according to the present invention has an amino acid sequence as given at the end of the application; it is encoded by transcript(s) Z25299_PEA_{—}2_T6 (SEQ ID NO:31). An alignment is given to the known protein (Antileukoproteinase 1 precursor (SEQ ID NO:625)) at the end of the application. One or more alignments to one or more previously published protein sequences are given at the end of the application. A brief description of the relationship of the variant protein according to the present invention to each such aligned protein is as follows:

[1528] Comparison Report Between Z25299_PEA_{—}2_P7 (SEQ ID NO:562) and ALK1_HUMAN (SEQ ID NO:625):

[1529] 1. An isolated chimeric polypeptide encoding for Z25299_PEA_{—}2_P7 (SEQ ID NO:562), comprising a first amino acid sequence being at least 90% homologous to MKSSGLFPFLVLLALGTLAPWAVEGSGKSFKAGVCPPKKSAQCLRYKKPECQSDWQCPGKKRCCPDTCGI KCLDPVDTPNP corresponding to amino acids 1-81 of ALK1_HUMAN (SEQ ID NO:625), which also corresponds to amino acids 1-81 of Z25299_PEA_{—}2_P7 (SEQ ID NO:562), and a second amino acid sequence being at least 70%, optionally at least 80%, preferably at least 85%, more preferably at least 90% and most preferably at least 95% homologous to a polypeptide having the sequence RGSLGSAQ (SEQ ID NO:1505) corresponding to amino acids 82-89 of Z25299_PEA_{—}2_P7 (SEQ ID NO:562), wherein said first and second amino acid sequences are contiguous and in a sequential order.

[1530] 2. An isolated polypeptide encoding for a tail of Z25299_PEA_{—}2_P7 (SEQ ID NO:562), comprising a polypeptide being at least 70%, optionally at least about 80%, preferably at least about 85%, more preferably at least about 90% and most preferably at least about 95% homologous to the sequence RGSLGSAQ (SEQ ID NO:1505) in Z25299_PEA_{—}2_P7 (SEQ ID NO:562).

[1531] The location of the variant protein was determined according to results from a number of different software programs and analyses, including analyses from SignalP and other specialized programs. The variant protein is believed to be located as follows with regard to the cell: secreted. The protein localization is believed to be secreted because both signal-peptide prediction programs predict that this protein has a signal peptide, and neither trans-membrane region prediction program predicts that this protein has a trans-membrane region.

[1532] Variant protein Z25299_PEA_{—}2_P7 (SEQ ID NO:562) also has the following non-silent SNPs (Single Nucleotide Polymorphisms) as listed in Table 10, (given according to their position(s) on the amino acid sequence, with the alternative amino acid(s) listed; the last column indicates whether the SNP is known or not; the presence of known SNPs in variant protein Z25299_PEA_{—}2_P7 (SEQ ID NO:562) sequence provides support for the deduced sequence of this variant protein according to the present invention).

TABLE 10
Amino acid mutations

| SNP position(s) on amino acid | Alternative | |
|---|---|---|
| sequence | amino acid(s) | Previously known SNP? |
| 20 | P -> | No |
| 43 | C -> R | No |
| 48 | K -> N | No |
| 82 | R -> S | No |

[1533] Variant protein Z25299_PEA_{—}2_P7 (SEQ ID NO:562) is encoded by the following transcript(s): Z25299_PEA_{—}2_T6 (SEQ ID NO:31), for which the sequence(s) is/are given at the end of the application. The coding portion of transcript Z25299_PEA_{—}2_T6 (SEQ ID NO:31) is shown in bold; this coding portion starts at position 124 and ends at position 390. The transcript also has the following SNPs as listed in Table 11 (given according to their position on the nucleotide sequence, with the alternative nucleic acid listed; the last column indicates whether the SNP is known or not; the presence of known SNPs in variant protein Z25299_PEA_{—}2_P7 (SEQ ID NO:562) sequence provides support for the deduced sequence of this variant protein according to the present invention).

TABLE 11
Nucleic acid SNPs

| SNP position on | | |
|---|---|---|
| nucleotide sequence | Alternative nucleic acid | Previously known SNP? |
| 122 | C -> T | No |
| 123 | C -> T | No |
| 576 | A -> C | Yes |
| 594 | A -> C | Yes |
| 597 | A -> C | Yes |
| 630 | A -> C | Yes |
| 676 | G -> A | Yes |
| 183 | T -> | No |
| 250 | T -> C | No |
| 267 | A -> C | No |
| 267 | A -> G | No |
| 339 | C -> T | Yes |
| 369 | A -> T | No |
| 431 | C -> T | No |
| 541 | C -> T | Yes |

[1534] Variant protein Z25299_PEA_{—}2_P10 (SEQ ID NO:563) according to the present invention has an amino acid sequence as given at the end of the application; it is encoded by transcript(s) Z25299_PEA_{—}2_T9 (SEQ ID NO:32). An alignment is given to the known protein (Antileukoproteinase 1 precursor (SEQ ID NO:625)) at the end of the application. One or more alignments to one or more previously published protein sequences are given at the end of the application. A brief description of the relationship of the variant protein according to the present invention to each such aligned protein is as follows:

[1535] Comparison Report Between Z25299_PEA_{—}2_P10 (SEQ ID NO:563) and ALK1_HUMAN (SEQ ID NO:625):

[1536] 1. An isolated chimeric polypeptide encoding for Z25299_PEA_{—}2_P10 (SEQ ID NO:563), comprising a first amino acid sequence being at least 90% homologous to MKSSGLFPFLVLLALGTLAPWAVEGSGKSFKAGVCPPKKSAQCLRYKKPECQSDWQCPGKKRCCPDTCGI KCLDPVDTPNPT corresponding to amino acids 1-82 of ALK1_HUMAN (SEQ ID NO:625), which also corresponds to amino acids 1-82 of Z25299_PEA_{—}2_P10 (SEQ ID NO:563).

[1537] The location of the variant protein was determined according to results from a number of different software programs and analyses, including analyses from SignalP and other specialized programs. The variant protein is believed to be located as follows with regard to the cell: secreted. The protein localization is believed to be secreted because both signal-peptide prediction programs predict that this protein has a signal peptide, and neither trans-membrane region prediction program predicts that this protein has a trans-membrane region.

[1538] Variant protein Z25299_PEA_{—}2_P10 (SEQ ID NO:563) also has the following non-silent SNPs (Single Nucleotide Polymorphisms) as listed in Table 12, (given according to their position(s) on the amino acid sequence, with the alternative amino acid(s) listed; the last column indicates whether the SNP is known or not; the presence of known SNPs in variant protein Z25299_PEA_{—}2_P10 (SEQ ID NO:563) sequence provides support for the deduced sequence of this variant protein according to the present invention).

TABLE 12
Amino acid mutations

| SNP position(s) on amino acid | Alternative | |
|---|---|---|
| sequence | amino acid(s) | Previously known SNP? |
| 20 | P -> | No |
| 43 | C -> R | No |
| 48 | K -> N | No |

[1539] Variant protein Z25299_PEA_{—}2_P10 (SEQ ID NO:563) is encoded by the following transcript(s): Z25299_PEA_{—}2_T9 (SEQ ID NO:32), for which the sequence(s) is/are given at the end of the application. The coding portion of transcript Z25299_PEA_{—}2_T9 (SEQ ID NO:32) is shown in bold; this coding portion starts at position 124 and ends at position 369. The transcript also has the following SNPs as listed in Table 13 (given according to their position on the nucleotide sequence, with the alternative nucleic acid listed; the last column indicates whether the SNP is known or not; the presence of known SNPs in variant protein Z25299_PEA_{—}2_P10 (SEQ ID NO:563) sequence provides support for the deduced sequence of this variant protein according to the present invention).

TABLE 13
Nucleic acid SNPs

| SNP position on | | |
|---|---|---|
| nucleotide sequence | Alternative nucleic acid | Previously known SNP? |
| 122 | C -> T | No |
| 123 | C -> T | No |
| 451 | A -> C | Yes |
| 484 | A -> C | Yes |
| 530 | G -> A | Yes |
| 183 | T -> | No |
| 250 | T -> C | No |
| 267 | A -> C | No |
| 267 | A -> G | No |
| 339 | C -> T | Yes |
| 395 | C -> T | Yes |
| 430 | A -> C | Yes |
| 448 | A -> C | Yes |

[1540] As noted above, cluster Z25299 features 11 segment(s), which were listed in Table 2 above and for which the sequence(s) are given at the end of the application. These segment(s) are portions of nucleic acid sequence(s) which are described herein separately because they are of particular interest. A description of each segment according to the present invention is now provided.

[1541] Segment cluster Z25299_PEA_{—}2_node_{—}20 (SEQ ID NO:241) according to the present invention is supported by 6 libraries. The number of libraries was determined as previously described. This segment can be found in the following transcript(s): Z25299_PEA_{—}2_T1 (SEQ ID NO:28). Table 14 below describes the starting and ending position of this segment on each transcript.

TABLE 14
Segment location on transcripts

| | Segment | |
|---|---|---|
| | starting | Segment ending |
| Transcript name | position | position |
| Z25299_PEA_2_T1 (SEQ ID NO: 28) | 518 | 1099 |

[1542] Segment cluster Z25299_PEA_{—}2_node_{—}21 (SEQ ID NO:242) according to the present invention is supported by 162 libraries. The number of libraries was determined as previously described. This segment can be found in the following transcript(s): Z25299_PEA_{—}2_T1 (SEQ ID NO:28), Z25299_PEA_{—}2_T6 (SEQ ID NO:31) and Z25299_PEA_{—}2_T9 (SEQ ID NO:32). Table 15 below describes the starting and ending position of this segment on each transcript.

TABLE 15
Segment location on transcripts

| | Segment | |
|---|---|---|
| | starting | Segment ending |
| Transcript name | position | position |
| Z25299_PEA_2_T1 (SEQ ID NO: 28) | 1100 | 1292 |
| Z25299_PEA_2_T6 (SEQ ID NO: 31) | 514 | 706 |
| Z25299_PEA_2_T9 (SEQ ID NO: 32) | 368 | 560 |

[1543] Segment cluster Z25299_PEA_{—}2_node_{—}23 (SEQ ID NO:243) according to the present invention is invention is supported by 2 libraries. The number of libraries was determined as previously described. This segment can be found in the following transcript(s): Z25299_PEA_{—}2_T2 (SEQ ID NO:29). Table 16 below describes the starting and ending position of this segment on each transcript.

TABLE 16
Segment location on transcripts

| | Segment | |
|---|---|---|
| | starting | Segment |
| Transcript name | position | ending position |
| Z25299_PEA_2_T2 (SEQ ID NO: 29) | 518 | 707 |

[1544] Segment cluster Z25299_PEA_{—}2_node_{—}24 (SEQ ID NO:244) according to the present invention is supported by 2 libraries. The number of libraries was determined as previously described. This segment can be found in the following transcript(s): Z25299_PEA_{—}2_T2 (SEQ ID NO:29) and Z25299_PEA_{—}2_T3 (SEQ ID NO:30). Table 17 below describes the starting and ending position of this segment on each transcript.

TABLE 17
Segment location on transcripts

| | Segment | |
|---|---|---|
| | starting | Segment ending |
| Transcript name | position | position |
| Z25299_PEA_2_T2 (SEQ ID NO: 29) | 708 | 886 |
| Z25299_PEA_2_T3 (SEQ ID NO: 30) | 518 | 696 |

[1545] Segment cluster Z25299_PEA_{—}2_node_{—}8 (SEQ ID NO:245) according to the present invention is supported by 218 libraries. The number of libraries was determined as previously described. This segment can be found in the following transcript(s): Z25299_PEA_{—}2_T1 (SEQ ID NO:28), Z25299_PEA_{—}2_T2 (SEQ ID NO:29), Z25299_PEA_{—}2_T3 (SEQ ID NO:30), Z25299_PEA_{—}2_T6 (SEQ ID NO:31) and Z25299_PEA_{—}2_T9 (SEQ ID NO:32). Table 18 below describes the starting and ending position of this segment on each transcript.

TABLE 18
Segment location on transcripts

| | Segment | |
|---|---|---|
| | starting | Segment ending |
| Transcript name | position | position |
| Z25299_PEA_2_T1 (SEQ ID NO: 28) | 1 | 208 |
| Z25299_PEA_2_T2 (SEQ ID NO: 29) | 1 | 208 |
| Z25299_PEA_2_T3 (SEQ ID NO: 30) | 1 | 208 |
| Z25299_PEA_2_T6 (SEQ ID NO: 31) | 1 | 208 |
| Z25299_PEA_2_T9 (SEQ ID NO: 32) | 1 | 208 |

[1546] According to an optional embodiment of the present invention, short segments related to the above cluster are also provided. These segments are up to about 120 bp in length, and so are included in a separate description.

[1547] Segment cluster Z25299_PEA_{—}2_node_{—}12 (SEQ ID NO:246) according to the present invention is supported by 228 libraries. The number of libraries was determined as previously described. This segment can be found in the following transcript(s): Z25299_PEA_{—}2_T1 (SEQ ID NO:28), Z25299_PEA_{—}2_T2 (SEQ ID NO:29), Z25299_PEA_{—}2_T3 (SEQ ID NO:30), Z25299_PEA_{—}2_T6 (SEQ ID NO:31) and Z25299_PEA_{—}2_T9 (SEQ ID NO:32). Table 20 below describes the starting and ending position of this segment on each transcript.

TABLE 20
Segment location on transcripts

| | Segment | |
|---|---|---|
| | starting | Segment ending |
| Transcript name | position | position |
| Z25299_PEA_2_T1 (SEQ ID NO: 28) | 209 | 245 |
| Z25299_PEA_2_T2 (SEQ ID NO: 29) | 209 | 245 |
| Z25299_PEA_2_T3 (SEQ ID NO: 30) | 209 | 245 |
| Z25299_PEA_2_T6 (SEQ ID NO: 31) | 209 | 245 |
| Z25299_PEA_2_T9 (SEQ ID NO: 32) | 209 | 245 |

[1548] Segment cluster Z25299_PEA_{—}2_node_{—}13 (SEQ ID NO:247) according to the present invention is supported by 246 libraries. The number of libraries was determined as previously described. This segment can be found in the following transcript(s): Z25299_PEA_{—}2_T1 (SEQ ID NO:28), Z25299_PEA_{—}2_T2 (SEQ ID NO:29), Z25299_PEA_{—}2_T3 (SEQ ID NO:30) Z25299_PEA_{—}2_T6 (SEQ ID NO:31) and Z25299_PEA_{—}2_T9 (SEQ ID NO:32). Table 22 below describes the starting and ending position of this segment on each transcript.

TABLE 22
Segment location on transcripts

| | Segment | |
|---|---|---|
| | starting | Segment ending |
| Transcript name | position | position |
| Z25299_PEA_2_T1 (SEQ ID NO: 28) | 246 | 357 |
| Z25299_PEA_2_T2 (SEQ ID NO: 29) | 246 | 357 |
| Z25299_PEA_2_T3 (SEQ ID NO: 30) | 246 | 357 |
| Z25299_PEA_2_T6 (SEQ ID NO: 31) | 246 | 357 |
| Z25299_PEA_2_T9 (SEQ ID NO: 32) | 246 | 357 |

[1549] Segment cluster Z25299_PEA_{—}2_node_{—}14 (SEQ ID NO:248) according to the present invention can be found in the following transcript(s): Z25299_PEA_{—}2_T1 (SEQ ID NO:28), Z25299_PEA_{—}2_T2 (SEQ ID NO:29), Z25299_PEA_{—}2_T3 (SEQ ID NO:30), Z25299_PEA_{—}2_T6 (SEQ ID NO:31) and Z25299_PEA_{—}2_T9 (SEQ ID NO:32). Table 23 below describes the starting and ending position of this segment on each transcript.

TABLE 23
Segment location on transcripts

| | Segment | |
|---|---|---|
| | starting | Segment ending |
| Transcript name | position | position |
| Z25299_PEA_2_T1 (SEQ ID NO: 28) | 358 | 367 |
| Z25299_PEA_2_T2 (SEQ ID NO: 29) | 358 | 367 |
| Z25299_PEA_2_T3 (SEQ ID NO: 30) | 358 | 367 |
| Z25299_PEA_2_T6 (SEQ ID NO: 31) | 358 | 367 |
| Z25299_PEA_2_T9 (SEQ ID NO: 32) | 358 | 367 |

[1550] Segment cluster Z25299_PEA_{—}2_node_{—}17 (SEQ ID NO:249) according to the present invention can be found in the following transcript(s): Z25299_PEA_{—}2_T1 (SEQ ID NO:28), Z25299_PEA_{—}2_T2 (SEQ ID NO:29) and Z25299_PEA_{—}2_T3 (SEQ ID NO:30). Table 24 below describes the starting and ending position of this segment on each transcript.

TABLE 24
Segment location on transcripts

| | Segment | |
|---|---|---|
| | starting | Segment ending |
| Transcript name | position | position |
| Z25299_PEA_2_T1 (SEQ ID NO: 28) | 368 | 371 |
| Z25299_PEA_2_T2 (SEQ ID NO: 29) | 368 | 371 |
| Z25299_PEA_2_T3 (SEQ ID NO: 30) | 368 | 371 |

[1551] Segment cluster Z25299_PEA_{—}2_node_{—}18 (SEQ ID NO:250) according to the present invention is supported by 221 libraries. The number of libraries was determined as previously described. This segment can be found in the following transcript(s): Z25299_PEA_{—}2_T1 (SEQ ID NO:28), Z25299_PEA_{—}2_T2 (SEQ ID NO:29), Z25299_PEA_{—}2_T3 (SEQ ID NO:30) and Z25299_PEA_{—}2_T6 (SEQ ID NO:31). Table 25 below describes the starting and ending position of this segment on each transcript.

TABLE 25
Segment location on transcripts

| | Segment | |
|---|---|---|
| | starting | Segment ending |
| Transcript name | position | position |
| Z25299_PEA_2_T1 (SEQ ID NO: 28) | 372 | 427 |
| Z25299_PEA_2_T2 (SEQ ID NO: 29) | 372 | 427 |
| Z25299_PEA_2_T3 (SEQ ID NO: 30) | 372 | 427 |
| Z25299_PEA_2_T6 (SEQ ID NO: 31) | 368 | 423 |

[1552] Segment cluster Z25299_PEA_{—}2_node_{—}19 (SEQ ID NO:251) according to the present invention is supported by 197 libraries. The number of libraries was determined as previously described. This segment can be found in the following transcript(s): Z25299_PEA_{—}2_T1 (SEQ ID NO:28), Z25299_PEA_{—}2_T2 (SEQ ID NO:29), Z25299_PEA_{—}2_T3 (SEQ ID NO:30) and Z25299_PEA_{—}2_T6 (SEQ ID NO:31). Table 26 below describes the starting and ending position of this segment on each transcript.

TABLE 26
Segment location on transcripts

| | | Segment |
|---|---|---|
| | Segment starting | ending |
| Transcript name | position | position |
| Z25299_PEA_2_T1 (SEQ ID NO: 28) | 428 | 517 |
| Z25299_PEA_2_T2 (SEQ ID NO: 29) | 428 | 517 |
| Z25299_PEA_2_T3 (SEQ ID NO: 30) | 428 | 517 |
| Z25299_PEA_2_T6 (SEQ ID NO: 31) | 424 | 513 |

### Variant Protein Alignment to the Previously Known Protein:

[chemical structure]

[chemical structure]

[chemical structure]

[chemical structure]

[chemical structure]

[chemical structure]

[chemical structure]

[chemical structure]

[chemical structure]

[chemical structure]

### Expression of Secretory Leukocyte Protease Inhibitor Acid-Stable Proteinase Inhibitor with Strong Affinities for Trypsin, Chymotrypsin, Elastase, and Cathepsin G

### Z25299 Transcripts, which are Detectable by Amplicon as Depicted in Sequence Name Z25299 seg20 (SEQ ID NO:1294), Were Examined for Expression in Normal and Cancerous Colon Tissues

[1554] Transcripts detectable by or according to seg20, Z25299 seg20 amplicon (SEQ ID NO: 1294) and Z25299 seg20F (SEQ ID NO: 1292) and Z25299 seg20R (SEQ ID NO: 1293) primers were measured by real time PCR. In parallel the expression of four housekeeping genes —PBGD (GenBank Accession No. BC019323 (SEQ ID NO:1576); amplicon—PBGD-amplicon, SEQ ID NO:531), HPRT1 (GenBank Accession No. NM_{—}000194 (SEQ ID NO:1577); amplicon—HPRT1-amplicon, SEQ ID NO:612), G6PD (GenBank Accession No. NM_{—}000402 (SEQ ID NO:1578); HPRT1-amplicon, SEQ ID NO:615), RPS27A (GenBank Accession No. NM_{—}002954 (SEQ ID NO:1579); RPS27A amplicon, SEQ ID NO:1261), was measured similarly. For each RT sample, the expression of the above amplicon was normalized to the geometric mean of the quantities of the housekeeping genes. The normalized quantity of each RT sample was then divided by the median of the quantities of the normal post-mortem (PM) samples (Sample Nos. 41, 52, 62-67, 69-71, Table 1, above Tissue samples in testing panel), to obtain a value of fold up-regulation for each sample relative to median of the normal PM samples.

[1555] FIG. 21 is a histogram showing over expression of the above-indicated variant.

[1556] Transcript expression in cancerous colon samples relative to the normal samples are shown.

[1557] As is evident from FIG. 21, transcripts detectable by the above amplicon(s) in cancer samples were significantly higher than in the non-cancerous samples (Sample Nos. 41, 52, 62-67, 69-71 Table 1 Tissue samples in testing panel). Notably an over-expression of at least 5 fold was found in 7 out of 36 adenocarcinoma samples.

[1558] Statistical analysis was applied to verify the significance of these results, as described below. The P value for the difference in the expression levels of this variant was determined.

[1559] Transcripts detectable by the above amplicon in colon cancer samples versus the normal tissue samples were determined by T test as 6.98E-02.

[1560] Threshold of 5 fold overexpression was found to differentiate between cancer and normal samples with P value of 1.33E-02 as checked by exact fisher test. The above values demonstrate statistical significance of the results.

[1561] Primer pairs are also optionally and preferably encompassed within the present invention; for example, for the above experiment, the following primer pair was used as a non-limiting illustrative example only of a suitable primer pair: Z25299 seg20F forward primer (SEQ ID NO: 1292); and Z25299 seg20R reverse primer (SEQ ID NO: 1293).

[1562] The present invention also preferably encompasses any amplicon obtained through the use of any suitable primer pair; for example, for the above experiment, the following amplicon was obtained as a non-limiting illustrative example only of a suitable amplicon: Z25299 seg20 (SEQ ID NO: 1294).

Forward primer (SEQ ID NO: 1292):
CTCCTGAACCCTACTCCAAGCA
Reverse primer (SEQ ID NO: 1293):
CAGGCGATCCTATGGAAATCC
Amplicon (SEQ ID NO: 1294):
CTCCTGAACCCTACTCCAAGCACAGCCTCTGTCTGACTCCCTTGTCCTTT
CAAGAGAACTGTTCTCCAGGTCTCAGGGCCAGGATTTCCATAGGATCGCC
TG

### Expression of Secretory Leukocyte Protease Inhibitor Acid-Stable Proteinase Inhibitor with Strong Affinities for Trypsin, Chymotrypsin, Elastase, and Cathepsin G. May Prevent Elastase-Mediated Damage to Oral and Possibly Other Mucosal Tissues Z25299 Transcripts which are Detectable by Amplicon as Depicted in Sequence Name Z25299Seg20 (SEQ ID NO: 1294) in Different Normal Tissues

[1563] Expression of Secretory leukocyte protease inhibitor Acid-stable proteinase inhibitor with strong affinities for trypsin, chymotrypsin, elastase, and cathepsin G. May prevent elastase-mediated damage to oral and possibly other mucosal tissues transcripts detectable by or according to Z25299seg20 amplicon (SEQ ID NO: 1294) and primers: Z25299seg20F (SEQ ID NO: 1294) and Z25299seg20R (SEQ ID NO: 1294) was measured by real time PCR. In parallel the expression of four housekeeping genes —RPL19 (GenBank Accession No. NM_{—}000981 (SEQ ID NO:1580); RPL19 amplicon), TATA box (GenBank Accession No. NM_{—}003194 (SEQ ID NO:1581); TATA amplicon (SEQ ID NO: 1267)), Ubiquitin (GenBank Accession No. BC000449 (SEQ ID NO:1582); amplicon-Ubiquitin-amplicon) and SDHA (GenBank Accession No. NM_{—}004168 (SEQ ID NO:1583); amplicon—SDHA-amplicon (SEQ ID NO: 1273)) was measured similarly. For each RT sample, the expression of the above amplicon was normalized to the geometric mean of the quantities of the housekeeping genes. The normalized quantity of each RT sample was then divided by the median of the quantities of the ovary samples (Sample Nos. 18-20, Table 2, “Tissue samples on normal panel”), to obtain a value of relative expression of each sample relative to median of the ovary samples.

Forward primer (SEQ ID NO: 1292):
CTCCTGAACCCTACTCCAAGCA
Reverse primer (SEQ ID NO: 1293):
CAGGCGATCCTATGGAAATCC
Amplicon (SEQ ID NO: 1294):
CTCCTGAACCCTACTCCAAGCACAGCCTCTGTCTGACTCCCTTGTCCTTC
AAGAGAACTGTTCTCCAGGTCTCAGGGCCAGGATTTCCATAGGATCGCCT
G

The results are demonstrated in FIG. 22, showing the expression of Secretory leukocyte protease inhibitor Acid-stable proteinase inhibitor with strong affinities for trypsin, chymotrypsin, elastase, and cathepsin G. May prevent elastase-mediated damage to oral and possibly other mucosal tissues Z25299 transcripts which are detectable by amplicon as depicted in sequence name Z25299seg20 (SEQ ID NO: 1294) in different normal tissues.

### Description for Cluster HUMF5A

[1564] Cluster HUMF5A features 3 transcript(s) and 33 segment(s) of interest, the names for which are given in Tables 1 and 2, respectively, the sequences themselves are given at the end of the application. The selected protein variants are given in table 3.

TABLE 1
Transcripts of interest

| Transcript Name | SEQ ID NO: |
|---|---|
| HUMF5A_PEA_1_T1 | 33 |
| HUMF5A_PEA_1_T3 | 34 |
| HUMF5A_PEA_1_T7 | 35 |

TABLE 2
Segments of interest

| Segment Name | SEQ ID NO: |
|---|---|
| HUMF5A_PEA_1_node_0 | 252 |
| HUMF5A_PEA_1_node_4 | 253 |
| HUMF5A_PEA_1_node_6 | 254 |
| HUMF5A_PEA_1_node_8 | 255 |
| HUMF5A_PEA_1_node_10 | 256 |
| HUMF5A_PEA_1_node_12 | 257 |
| HUMF5A_PEA_1_node_14 | 258 |
| HUMF5A_PEA_1_node_18 | 259 |
| HUMF5A_PEA_1_node_21 | 260 |
| HUMF5A_PEA_1_node_22 | 261 |
| HUMF5A_PEA_1_node_24 | 262 |
| HUMF5A_PEA_1_node_26 | 263 |
| HUMF5A_PEA_1_node_27 | 264 |
| HUMF5A_PEA_1_node_29 | 265 |
| HUMF5A_PEA_1_node_35 | 266 |
| HUMF5A_PEA_1_node_37 | 267 |
| HUMF5A_PEA_1_node_39 | 268 |
| HUMF5A_PEA_1_node_47 | 269 |
| HUMF5A_PEA_1_node_50 | 270 |
| HUMF5A_PEA_1_node_53 | 271 |
| HUMF5A_PEA_1_node_56 | 272 |
| HUMF5A_PEA_1_node_60 | 273 |
| HUMF5A_PEA_1_node_2 | 274 |
| HUMF5A_PEA_1_node_16 | 275 |
| HUMF5A_PEA_1_node_31 | 276 |
| HUMF5A_PEA_1_node_32 | 277 |
| HUMF5A_PEA_1_node_33 | 278 |
| HUMF5A_PEA_1_node_41 | 279 |
| HUMF5A_PEA_1_node_43 | 280 |
| HUMF5A_PEA_1_node_45 | 281 |
| HUMF5A_PEA_1_node_51 | 282 |
| HUMF5A_PEA_1_node_57 | 283 |
| HUMF5A_PEA_1_node_59 | 284 |

TABLE 3
Proteins of interest

| | SEQ | |
|---|---|---|
| Protein Name | ID NO: | Corresponding Transcript(s) |
| HUMF5A_PEA_1_P3 | 564 | HUMF5A_PEA_1_T1 (SEQ ID |
| | | NO: 33) |
| HUMF5A_PEA_1_P4 | 565 | HUMF5A_PEA_1_T3 (SEQ ID |
| | | NO: 34) |
| HUMF5A_PEA_1_P8 | 566 | HUMF5A_PEA_1_T7 (SEQ ID |
| | | NO: 35) |

[1565] These sequences are variants of the known protein Coagulation factor V precursor (SwissProt accession identifier FA5_HUMAN; known also according to the synonyms Activated protein C cofactor), SEQ ID NO: 626, referred to herein as the previously known protein.

[1566] Protein Coagulation factor V precursor (SEQ ID NO:626) is known or believed to have the following function(s): Coagulation factor V is a cofactor that participates with factor Xa to activate prothrombin to thrombin. The sequence for protein Coagulation factor V precursor is given at the end of the application, as “Coagulation factor V precursor amino acid sequence”. Known polymorphisms for this sequence are as shown in Table 4.

TABLE 4
Amino acid mutations for Known Protein

| SNP position(s) | |
|---|---|
| on amino | |
| acid sequence | Comment |
| 107 | D -> H (in dbSNP: 6019). /FTId = VAR_013886. |
| 334 | R -> G (in APCR; Hong Kong). /FTId = VAR_013620. |
| 334 | R -> T (in APCR; Cambridge). /FTId = VAR_013621. |
| 413 | M -> T (in dbSNP: 6033). /FTId = VAR_013887. |
| 513 | R -> K (in dbSNP: 6020). /FTId = VAR_013622. |
| 534 | R -> Q (in APCR; Leiden; dbSNP: 6025). |
| | /FTId = VAR_001213. |
| 809 | P -> S (in dbSNP: 6031). /FTId = VAR_013888. |
| 817 | N -> T (in dbSNP: 6018). /FTId = VAR_013889. |
| 858 | K -> R (in dbSNP: 4524). /FTId = VAR_001214. |
| 865 | H -> R (in dbSNP: 4525). /FTId = VAR_001215. |
| 925 | K -> E (in dbSNP: 6032). /FTId = VAR_013890. |
| 1146 | H -> Q (in dbSNP: 6005). /FTId = VAR_013891. |
| 1285 | L -> I (in dbSNP: 1046712). /FTId = VAR_013892. |
| 1327 | H -> R (in dbSNP: 1800595). /FTId = VAR_013893. |
| 1530 | E -> A (in dbSNP: 6007). /FTId = VAR_013894. |
| 1685 | T -> S (in dbSNP: 6011). /FTId = VAR_013895. |
| 1749 | L -> V (in dbSNP: 6034). /FTId = VAR_013896. |
| 1764 | V -> M (in dbSNP: 6030). /FTId = VAR_013897. |
| 1820 | M -> I (in dbSNP: 6026). /FTId = VAR_013898. |
| 2102 | R -> H (in APCR). /FTId = VAR_017329. |
| 2222 | D -> G (in dbSNP: 6027). /FTId = VAR_013899. |
| 2213 | T -> A |

[1567] The following GO Annotation(s) apply to the previously known protein. The following annotation(s) were found: cell adhesion; blood coagulation, which are annotation(s) related to Biological Process; and blood coagulation factor; copper binding, which are annotation(s) related to Molecular Function.

[1568] The GO assignment relies on information from one or more of the SwissProt/TremB1 Protein knowledgebase, available from <http://www.expasy.ch/sprot/>; or Locuslink, available from <http://www.ncbi.nlm.nih.gov/projects/LocusLink/>.

[1569] As noted above, cluster HUMF5A features 3 transcript(s), which were listed in Table 1 above. These transcript(s) encode for protein(s) which are variant(s) of protein Coagulation factor V precursor (SEQ ID NO:626). A description of each variant protein according to the present invention is now provided.

[1570] Variant protein HUMF5A_PEA_{—}1_P3 (SEQ ID NO:564) according to the present invention has an amino acid sequence as given at the end of the application; it is encoded by transcript(s) HUMF5A_PEA_{—}1_T1 (SEQ ID NO:33). An alignment is given to the known protein (Coagulation factor V precursor (SEQ ID NO:626)) at the end of the application. One or more alignments to one or more previously published protein sequences are given at the end of the application. A brief description of the relationship of the variant protein according to the present invention to each such aligned protein is as follows:

[1571] Comparison Report Between HUMF5A_PEA_{—}1_P3 (SEQ ID NO:564) and FA5_HUMAN_V1 (SEQ ID NO 627):

[1572] 1. An isolated chimeric polypeptide encoding for HUMF5A_PEA_{—}1_P3 (SEQ ID NO:564), comprising a first amino acid sequence being at least 90% homologous to MFPGCPRLWVLVVLGTSWVGWGSQGTEAAQLRQFYVAAQGISWSYRPEPTNSSLNLSVTSFKKIVYREY EPYFKKEKPQSTISGLLGPTLYAEVGDIIKVHFKNKADKPLSIHPQGIRYSKLSEGASYLDHTFPAEKMDDA VAPGREYTYEWSISEDSGPTHDDPPCLTHIYYSHENLIEDFNSGLIGPLLICKKGTLTEGGTQKTFDKQIVLL FAVFDESKSWSQSSSLMYTVNGYVNGTMPDITVCAHDHISWHLLGMSSGPELFSIHFNGQVLEQNHHKVS AITLVSATSTTANMTVGPEGKWIISSLTPKHLQAGMQAYIDIKNCPKKTRNLKKITREQRREMKRWEYFIA AEEVIWDYAPVIPANMDKKYRSQHLDNFSNQIGKHYKKVMYTQYEDESFTKHTVNPNMKEDGILGPIIRA QVRDTLKIVFKNMASRPYSIYPHGVTFSPYEDEVNSSFTSGRNNTMIRAVQPGETYTYKWNILEFDEPTEN DAQCLTRPYYSDVDIMRDIASGLIGLLLICKSRSLDRRGIQRAADIEQQAVFAVFDENKSWYLEDNINKFCE NPDEVKRDDPKFYESNIMSTINGYVPESITTLGFCFDDTVQWHFCSVGTQNEILTIHFTGHSFIYGKRHEDTL TLFPMRGESVTVTMDNVGTWMLTSMNSSPRSKKLRLKFRDVKCIPDDDEDSYEIFEPPESTVMATRKMHD RLEPEDEESDADYDYQNRLAAALGIRSFRNSSLNQEEEEFNLTALALENGTEFVSSNTDIIVGSNYSSPSNIS KFTVNNLAEPQKAPSHQQATTAGSPLRHLIGKNSVLNSSTAEHSSPYSEDPIEDPLQPDVTGIRLLSLGAGEF RSQEHAKRKGPKVERDQAAKHRFSWMKLLAHKVGRHLSQDTGSPSGMRPWEDLPSQDTGSPSRMRPWK DPPSDLLLLKQSNSSKILVGRWHLASEKGSYEIIQDTDEDTAVNNWLISPQNASRAWGESTPLANKPGKQS GHPKFPRVRHKSLQVRQDGGKSRLKKSQFLIKTRKKKKEKHTHHAPLSPRTFHPLRSEAYNTFSERRLKHS LVLHKSNETSLPTDLNQTLPSMDFGWIASLPDHNQNSSNDTGQASCPPGLYQTVPPEEHYQTFPIQDPDQM HSTSDPSHRSSSPELSEMLEYDRSHKSFPTDISQMSPSSEHEVWQTVISPDLSQVTLSPELSQTNLSPDLSHTT LSPELIQRNLSPALGQMPISPDLSHTTLSPDLSHTTLSLDLSQTNLSPELSQTNLSPALGQMPLSPDLSHTTLS LDFSQTNLSPELSHMTLSPELSQTNLSPALGQMPISPDLSHTTLSLDFSQTNLSPELSQTNLSPALGQMPLSP DPSHTTLSLDLSQTNLSPELSQTNLSPDLSEMPLFADLSQIPLTPDLDQMTLSPDLGETDLSPNFGQMSLSPD LSQVTLSPDISDTTLLPDLSQISPPPDLDQIFYPSESSQSLLLQEFNESFPYPDLGQMPSPSSPTLNDTFLSKEF NPLVIVGLSKDGTDYIEIIPKEEVQSSEDDYAEIDYVPYDDPYKTDVRTNINSSRDPDNIAAWYLRSNNGNR RNYYIAAEEISWDYSEFVQRETDIEDSDDIPEDTTYKK corresponding to amino acids 1-1617 of FA5_HUMAN_V1 (SEQ ID NO:627), which also corresponds to amino acids 1-1617 of HUMF5A_PEA_{—}1_P3 (SEQ ID NO:564), and a second amino acid sequence being at least 70%, optionally at least 80%, preferably at least 85%, more preferably at least 90% and most preferably at least 95% homologous to a polypeptide having the sequence GSMKSISEFLVLLSELKWMMLSKFVLKI (SEQ ID NO:1506) corresponding to amino acids 1618-1645 of HUMF5A_PEA_{—}1_P3 (SEQ ID NO:564), wherein said first amino acid sequence and second amino acid sequence are contiguous and in a sequential order.

[1573] 2. An isolated polypeptide encoding for a tail of HUMF5A_PEA_{—}1_P3 (SEQ ID NO:564), comprising a polypeptide being at least 70%, optionally at least about 80%, preferably at least about 85%, more preferably at least about 90% and most preferably at least about 95% homologous to the sequence GSMKSISEFLVLLSELKWMMLSKFVLKI (SEQ ID NO:1506) in HUMF5A_PEA_{—}1_P3 (SEQ ID NO:564).

[1574] It should be noted that the known protein sequence (FA5_HUMAN (SEQ ID NO:626)) has one or more changes than the sequence given at the end of the application and named as being the amino acid sequence for FA5_HUMAN_V1 (SEQ ID NO:627). These changes were previously known to occur and are listed in the table below.

TABLE 5
Changes to FA5_HUMAN_V1 (SEQ ID NO: 627)

| SNP position(s) on amino | |
|---|---|
| acid sequence | Type of change |
| 859 | variant |
| 866 | variant |

[1575] The location of the variant protein was determined according to results from a number of different software programs and analyses, including analyses from SignalP and other specialized programs. The variant protein is believed to be located as follows with regard to the cell: secreted. The protein localization is believed to be secreted because both signal-peptide prediction programs predict that this protein has a signal peptide, and neither trans-membrane region prediction program predicts that this protein has a trans-membrane region.

[1576] Variant protein HUMF5A_PEA_{—}1_P3 (SEQ ID NO:564) also has the following non-silent SNPs (Single Nucleotide Polymorphisms) as listed in Table 6, (given according to their position(s) on the amino acid sequence, with the alternative amino acid(s) listed; the last column indicates whether the SNP is known or not; the presence of known SNPs in variant protein HUMF5A_PEA_{—}1_P3 (SEQ ID NO:564) sequence provides support for the deduced sequence of this variant protein according to the present invention).

TABLE 6
Amino acid mutations

| SNP position(s) on amino acid | Alternative | |
|---|---|---|
| sequence | amino acid(s) | Previously known SNP? |
| 15 | G -> S | Yes |
| 107 | D -> H | Yes |
| 413 | M -> T | Yes |
| 513 | R -> K | Yes |
| 534 | R -> Q | Yes |
| 781 | S -> R | Yes |
| 809 | P -> S | Yes |
| 817 | N -> T | Yes |
| 858 | R -> K | Yes |
| 865 | R -> H | Yes |
| 915 | T -> S | Yes |
| 925 | K -> E | Yes |
| 969 | N -> S | Yes |
| 980 | R -> L | Yes |
| 1146 | H -> Q | Yes |
| 1169 | D -> | No |
| 1285 | L -> I | Yes |
| 1327 | H -> R | Yes |
| 1397 | L -> F | Yes |
| 1404 | P -> S | Yes |
| 1530 | E -> A | Yes |

[1577] Variant protein HUMF5A_PEA_{—}1_P3 (SEQ ID NO:564) is encoded by the following transcript(s): HUMF5A_PEA_{—}1_T1 (SEQ ID NO:33), for which the sequence(s) is/are given at the end of the application. The coding portion of transcript HUMF5A_PEA_{—}1_T1 (SEQ ID NO:33) is shown in bold; this coding portion starts at position 183 and ends at position 5117. The transcript also has the following SNPs as listed in Table 7 (given according to their position on the nucleotide sequence, with the alternative nucleic acid listed; the last column indicates whether the SNP is known or not; the presence of known SNPs in variant protein HUMF5A_PEA_{—}1_P3 (SEQ ID NO:564) sequence provides support for the deduced sequence of this variant protein according to the present invention).

TABLE 7
Nucleic acid SNPs

| SNP position on | Alternative | Previously |
|---|---|---|
| nucleotide sequence | nucleic acid | known SNP? |
| 16 | C -> T | Yes |
| 225 | G -> A | Yes |
| 419 | A -> G | Yes |
| 501 | G -> C | Yes |
| 587 | G -> A | Yes |
| 734 | G -> T | Yes |
| 746 | G -> C | Yes |
| 951 | C -> T | Yes |
| 998 | C -> T | Yes |
| 1420 | T -> C | Yes |
| 1424 | A -> G | Yes |
| 1562 | C -> T | Yes |
| 1720 | G -> A | Yes |
| 1783 | G -> A | Yes |
| 1898 | G -> A | Yes |
| 2102 | C -> T | Yes |
| 2108 | C -> A | Yes |
| 2390 | T -> C | Yes |
| 2417 | C -> T | Yes |
| 2471 | A -> G | Yes |
| 2483 | G -> A | Yes |
| 2525 | T -> G | Yes |
| 2607 | C -> T | Yes |
| 2632 | A -> C | Yes |
| 2755 | G -> A | Yes |
| 2776 | G -> A | Yes |
| 2925 | A -> T | Yes |
| 2955 | A -> G | Yes |
| 3088 | A -> G | Yes |
| 3121 | G -> T | Yes |
| 3437 | A -> G | Yes |
| 3620 | C -> G | Yes |
| 3686 | A -> C | Yes |
| 3688 | A -> | No |
| 3689 | T -> | No |
| 3764 | C -> T | Yes |
| 3986 | T -> C | Yes |
| 4035 | C -> A | Yes |
| 4130 | C -> T | Yes |
| 4162 | A -> G | Yes |
| 4277 | C -> T | Yes |
| 4371 | C -> T | Yes |
| 4392 | C -> T | Yes |
| 4771 | A -> C | Yes |
| 5152 | A -> G | Yes |
| 5184 | C -> G | Yes |
| 5375 | C -> G | Yes |
| 5420 | G -> A | Yes |
| 5590 | G -> A | Yes |
| 6573 | T -> C | Yes |
| 6684 | A -> G | Yes |
| 6795 | A -> G | Yes |

[1578] Variant protein HUMF5A_PEA_{—}1_P4 (SEQ ID NO:565) according to the present invention has an amino acid sequence as given at the end of the application; it is encoded by transcript(s) HUMF5A_PEA_{—}1_T3 (SEQ ID NO:34). An alignment is given to the known protein (Coagulation factor V precursor (SEQ ID NO:626)) at the end of the application. One or more alignments to one or more previously published protein sequences are given at the end of the application. A brief description of the relationship of the variant protein according to the present invention to each such aligned protein is as follows:

[1579] Comparison Report Between HUMF5A_PEA_{—}1_P4 (SEQ ID NO:565) and FA5_HUMAN_V1 (SEQ ID NO:627):

[1580] 1. An isolated chimeric polypeptide encoding for HUMF5A_PEA_{—}1_P4 (SEQ ID NO:565), comprising a first amino acid sequence being at least 90% homologous to MFPGCPRLWVLVVLGTSWVGWGSQGTEAAQLRQFYVAAQGISWSYRPEPTNSSLNLSVTSFKKIVYREY EPYFKKEKPQSTISGLLGPTLYAEVGDIIKVHFKNKADKPLSIHPQGIRYSKLSEGASYLDHTFPAEKMDDA VAPGREYTYEWSISEDSGPTHDDPPCLTHIYYSHENLIEDFNSGLIGPLLICKKGTLTEGGTQKTFDKQIVLL FAVFDESKSWSQSSSLMYTVNGYVNGTMPDITVCAHDHISWHLLGMSSGPELFSIHFNGQVLEQNHHKVS AITLVSATSTTANMTVGPEGKWIISSLTPKHLQAGMQAYIDIKNCPKKTRNLKKITREQRRHMKRWEYFIA AEEVIWDYAPVIPANMDKKYRSQHLDNFSNQIGKHYKKVMYTQYEDESFTKHTVNPNMKEDGILGPIIRA QVRDTLKIVFKNMASRPYSIYPHGVTFSPYEDEVNSSFTSGRNNTMIRAVQPGETYTYKWNILEFDEPTEN DAQCLTRPYYSDVDIMRDIASGLIGLLLICKSRSLDRRGIQRAADIEQQAVFAVFDENKSWYLEDNINKFCE NPDEVKRDDPKFYESNIMSTINGYVPESITTLGFCFDDTVQWHFCSVGTQNEILTIHFTGHSFIYGKRHEDTL TLFPMRGESVTVTMDNVGTWMLTSMNSSPRSKKLRLKFRDVKCIPDDDEDSYEIFEPPESTVMATRKMHD RLEPEDEESDADYDYQNRLAAALGIRSFRNSSLNQEEEEFNLTALALENGTEFVSSNTDIIVGSNYSSPSNIS KFTVNNLAEPQKAPSHQQATTAGSPLRHLIGKNSVLNSSTAEHSSPYSEDPIEDPLQPDVTGIRLLSLGAGEF RSQEHAKRKGPKVERDQAAKHRFSWMKLLAHKVGRHLSQDTGSPSGMRPWEDLPSQDTGSPSRMRPWK DPPSDLLLLKQSNSSKILVGRWHLASEKGSYEIIQDTDEDTAVNNWLISPQNASRAWGESTPLANKPGKQS GHPKFPRVRHKSLQVRQDGGKSRLKKSQFLIKTRKKKKEKHTHHAPLSPRTFHPLRSEAYNTFSERRLKHS LVLHKSNETSLPTDLNQTLPSMDFGWIASLPDHNQNSSNDTGQASCPPGLYQTVPPEEHYQTFPIQDPDQM HSTSDPSHRSSSPELSEMLEYDRSHKSFPTDISQMSPSSEHEVWQTVISPDLSQVTLSPELSQTNLSPDLSHTT LSPELIQRNLSPALGQMPISPDLSHTTLSPDLSHTTLSLDLSQTNLSPELSQTNLSPALGQMPLSPDLSHTTLS LDFSQTNLSPELSHMTLSPELSQTNLSPALGQMPISPDLSHTTLSLDFSQTNLSPELSQTNLSPALGQMPLSP DPSHTTLSLDLSQTNLSPELSQTNLSPDLSEMPLFADLSQIPLTPDLDQMTLSPDLGETDLSPNFGQMSLSPD LSQVTLSPDISDTTLLPDLSQISPPPDLDQIFYPSESSQSLLLQEFNESFPYPDLGQMPSPSSPTLNDTFLSKEF NPLVIVGLSKDGTDYIEIIPKEEVQSSEDDYAEIDYVPYDDPYKTDVRTNINSSRDPDNIAAWYLRSNNGNR RNYYIAAEEISWDYSEFVQRETDIEDSDDIPEDTTYKKVVFRKYLDSTFTKRDPRGEYEEHLGILGPIIRAEV DDVIQVRFKNLASRPYSLHAHGLSYEKSSEGKTYEDDSPEWFKEDNAVQPNSSYTYVWHATERSGPESPG SACRAWAYYSAVNPEKDIHSGLIGPLLICQKGILHKDSNMPVDMREFVLLFMTFDEKKSWYYEKKSRSSW RLTSSEMKKSHEFHAINGMIYSLPGLKMYEQEWVRLHLLNIGGSQDIHVVHFHGQTLLENGNKQHQLGV WPLLPGSFKTLEMKASKPGWWLLNTEVGENQRAGMQTPFLIMDRDCRMPMGLSTGIISDSQIKASEFLGY WEPRLARLNNGGSYNAWSVEKLAAEFASKPWIQVDMQKEVIITGIQTQGAKHYLKSCYTTEFYVAYSSN QINWQIFKGNSTRNVMYFNGNSDASTIKENQFDPPIVARYIRISPTRAYNRPTLRLELQGCE corresponding to amino acids 1-2062 of FA5_HUMAN_V1 (SEQ ID NO:627), which also corresponds to amino acids 1-2062 of HUMF5A_PEA_{—}1_P4 (SEQ ID NO:565), and a second amino acid sequence being at least 70%, optionally at least 80%, preferably at least 85%, more preferably at least 90% and most preferably at least 95% homologous to a polypeptide having the sequence DVPHPWVWKMER (SEQ ID NO:1507) corresponding to amino acids 2063-2074 of HUMF5A_PEA_{—}1_P4 (SEQ ID NO:565), wherein said first amino acid sequence and second amino acid sequence are contiguous and in a sequential order.

[1581] 2. An isolated polypeptide encoding for a tail of HUMF5A_PEA_{—}1_P4 (SEQ ID NO:565), comprising a polypeptide being at least 70%, optionally at least about 80%, preferably at least about 85%, more preferably at least about 90% and most preferably at least about 95% homologous to the sequence DVPHPWVWKMER (SEQ ID NO:1507) in HUMF5A_PEA_{—}1_P4 (SEQ ID NO:565).

[1582] It should be noted that the known protein sequence (FA5_HUMAN (SEQ ID NO:626)) has one or more changes than the sequence given at the end of the application and named as being the amino acid sequence for FA5_HUMAN_V1 (SEQ ID NO:627). These changes were previously known to occur and are listed in the table below.

TABLE 8
Changes to FA5_HUMAN_V1 (SEQ ID NO: 627)

| SNP position(s) on amino | |
|---|---|
| acid sequence | Type of change |
| 859 | variant |
| 866 | variant |

[1583] The location of the variant protein was determined according to results from a number of different software programs and analyses, including analyses from SignalP and other specialized programs. The variant protein is believed to be located as follows with regard to the cell: secreted. The protein localization is believed to be secreted because both signal-peptide prediction programs predict that this protein has a signal peptide, and neither trans-membrane region prediction program predicts that this protein has a trans-membrane region.

[1584] Variant protein HUMF5A_PEA_{—}1_P4 (SEQ ID NO:565) also has the following non-silent SNPs (Single Nucleotide Polymorphisms) as listed in Table 9, (given according to their position(s) on the amino acid sequence, with the alternative amino acid(s) listed; the last column indicates whether the SNP is known or not; the presence of known SNPs in variant protein HUMF5A_PEA_{—}1_P4 (SEQ ID NO:565) sequence provides support for the deduced sequence of this variant protein according to the present invention).

TABLE 9
Amino acid mutations

| SNP position(s) on amino acid | Alternative | |
|---|---|---|
| sequence | amino acid(s) | Previously known SNP? |
| 15 | G -> S | Yes |
| 107 | D -> H | Yes |
| 413 | M -> T | Yes |
| 513 | R -> K | Yes |
| 534 | R -> Q | Yes |
| 781 | S -> R | Yes |
| 809 | P -> S | Yes |
| 817 | N -> T | Yes |
| 858 | R -> K | Yes |
| 865 | R -> H | Yes |
| 915 | T -> S | Yes |
| 925 | K -> E | Yes |
| 969 | N -> S | Yes |
| 980 | R -> L | Yes |
| 1146 | H -> Q | Yes |
| 1169 | D -> | No |
| 1285 | L -> I | Yes |
| 1327 | H -> R | Yes |
| 1397 | L -> F | Yes |
| 1404 | P -> S | Yes |
| 1530 | E -> A | Yes |
| 1685 | T -> S | Yes |
| 1749 | L -> V | Yes |
| 1764 | V -> M | Yes |
| 1820 | M -> I | Yes |

[1585] Variant protein HUMF5A_PEA_{—}1_P4 (SEQ ID NO:565) is encoded by the following transcript(s): HUMF5A_PEA_{—}1_T3 (SEQ ID NO:34), for which the sequence(s) is/are given at the end of the application. The coding portion of transcript HUMF5A_PEA_{—}1_T3 (SEQ ID NO:34) is shown in bold; this coding portion starts at position 183 and ends at position 6404. The transcript also has the following SNPs as listed in Table 10 (given according to their position on the nucleotide sequence, with the alternative nucleic acid listed; the last column indicates whether the SNP is known or not; the presence of known SNPs in variant protein HUMF5A_PEA_{—}1_P4 (SEQ ID NO:565) sequence provides support for the deduced sequence of this variant protein according to the present invention).

TABLE 10
Nucleic acid SNPs

| SNP position on | Alternative | Previously |
|---|---|---|
| nucleotide sequence | nucleic acid | known SNP? |
| 16 | C -> T | Yes |
| 225 | G -> A | Yes |
| 419 | A -> G | Yes |
| 501 | G -> C | Yes |
| 587 | G -> A | Yes |
| 734 | G -> T | Yes |
| 746 | G -> C | Yes |
| 951 | C -> T | Yes |
| 998 | C -> T | Yes |
| 1420 | T -> C | Yes |
| 1424 | A -> G | Yes |
| 1562 | C -> T | Yes |
| 1720 | G -> A | Yes |
| 1783 | G -> A | Yes |
| 1898 | G -> A | Yes |
| 2102 | C -> T | Yes |
| 2108 | C -> A | Yes |
| 2390 | T -> C | Yes |
| 2417 | C -> T | Yes |
| 2471 | A -> G | Yes |
| 2483 | G -> A | Yes |
| 2525 | T -> G | Yes |
| 2607 | C -> T | Yes |
| 2632 | A -> C | Yes |
| 2755 | G -> A | Yes |
| 2776 | G -> A | Yes |
| 2925 | A -> T | Yes |
| 2955 | A -> G | Yes |
| 3088 | A -> G | Yes |
| 3121 | G -> T | Yes |
| 3437 | A -> G | Yes |
| 3620 | C -> G | Yes |
| 3686 | A -> C | Yes |
| 3688 | A -> | No |
| 3689 | T -> | No |
| 3764 | C -> T | Yes |
| 3986 | T -> C | Yes |
| 4035 | C -> A | Yes |
| 4130 | C -> T | Yes |
| 4162 | A -> G | Yes |
| 4277 | C -> T | Yes |
| 4371 | C -> T | Yes |
| 4392 | C -> T | Yes |
| 4771 | A -> C | Yes |
| 5204 | A -> G | Yes |
| 5236 | C -> G | Yes |
| 5427 | C -> G | Yes |
| 5472 | G -> A | Yes |
| 5642 | G -> A | Yes |
| 6618 | T -> C | Yes |
| 6729 | A -> G | Yes |
| 6840 | A -> G | Yes |

[1586] Variant protein HUMF5A_PEA_{—}1_P8 (SEQ ID NO:566) according to the present invention has an amino acid sequence as given at the end of the application; it is encoded by transcript(s) HUMF5A_PEA_{—}1_T7 (SEQ ID NO:35). An alignment is given to the known protein (Coagulation factor V precursor (SEQ ID NO:626)) at the end of the application. One or more alignments to one or more previously published protein sequences are given at the end of the application. A brief description of the relationship of the variant protein according to the present invention to each such aligned protein is as follows:

[1587] Comparison Report Between HUMF5A_PEA_{—}1_P8 (SEQ ID NO:566) and FA5_HUMAN (SEQ ID NO:626):

[1588] 1. An isolated chimeric polypeptide encoding for HUMF5A_PEA_{—}1_P8 (SEQ ID NO:566), comprising a first amino acid sequence being at least 90% homologous to MFPGCPRLWVLVVLGTSWVGWGSQGTEAAQLRQFYVAAQGISWSYRPEPTNSSLNLSVTSFKKIVYREY EPYFKKEKPQSTISGLLGPTLYAEVGDIIKVHFKNKADKPLSIHPQGIRYSKLSEGASYLDHTFPAEKMDDA VAPGREYTYEWSISEDSGPTHDDPPCLTHIYYSHENLIEDFNSGLIGPLLICKKGTLTEGGTQKTFDKQIVLL FAVFDESKSWSQSSSLMYTVNGYVNGTMPDITVCAHDHISWHLLGMSSGPELFSIHFNGQVLEQNHHKVS AITLVSATSTTANMTVGPEGKWIISSLTPKHLQAGMQAYIDIKNCPKKTRNLKKITREQRRHMKRWEYFIA AEEVIWDYAPVIPANMDKKYRSQHLDNFSNQIGKHYKKVMYTQYEDESFTKHTVNPNMKEDGILGPIIRA QVRDTLKIVFKNMASRPYSIYPHGVTFSPYEDEVNSSFTSGRNNTMIRAVQPGETYTYKWNILEFDEPTEN DAQCLTRPYYSDVDIMRDIASGLIGLLLICKSRSLDRRGIQRAADIEQQAVFAVFDENKSWYLEDNINKFCE NPDEVKRDDPKFYESNIMS corresponding to amino acids 1-587 of FA5_HUMAN (SEQ ID NO:626), which also corresponds to amino acids 1-587 of HUMF5A_PEA_{—}1_P8 (SEQ ID NO:566), and a second amino acid sequence being at least 70%, optionally at least 80%, preferably at least 85%, more preferably at least 90% and most preferably at least 95% homologous to a polypeptide having the sequence SKSEYYFCSSVFHSCG (SEQ ID NO:1508) corresponding to amino acids 588-603 of HUMF5A_PEA_{—}1_P8 (SEQ ID NO:566), wherein said first amino acid sequence and second amino acid sequence are contiguous and in a sequential order.

[1589] 2. An isolated polypeptide encoding for a tail of HUMF5A_PEA_{—}1_P8 (SEQ ID NO:566), comprising a polypeptide being at least 70%, optionally at least about 80%, preferably at least about 85%, more preferably at least about 90% and most preferably at least about 95% homologous to the sequence SKSEYYFCSSVFHSCG (SEQ ID NO:1508) in HUMF5A_PEA_{—}1_P8 (SEQ ID NO:566).

[1590] The location of the variant protein was determined according to results from a number of different software programs and analyses, including analyses from SignalP and other specialized programs. The variant protein is believed to be located as follows with regard to the cell: secreted. The protein localization is believed to be secreted because both signal-peptide prediction programs predict that this protein has a signal peptide, and neither trans-membrane region prediction program predicts that this protein has a trans-membrane region.

[1591] Variant protein HUMF5A_PEA_{—}1_P8 (SEQ ID NO:566) also has the following non-silent SNPs (Single Nucleotide Polymorphisms) as listed in Table 11, (given according to their position(s) on the amino acid sequence, with the alternative amino acid(s) listed; the last column indicates whether the SNP is known or not; the presence of known SNPs in variant protein HUMF5A_PEA_{—}1_P8 (SEQ ID NO:566) sequence provides support for the deduced sequence of this variant protein according to the present invention).

TABLE 11
Amino acid mutations

| SNP position(s) on amino acid | Alternative | |
|---|---|---|
| sequence | amino acid(s) | Previously known SNP? |
| 15 | G -> S | Yes |
| 107 | D -> H | Yes |
| 413 | M -> T | Yes |
| 513 | R -> K | Yes |
| 534 | R -> Q | Yes |

[1592] The glycosylation sites of variant protein HUMF5A_PEA_{—}1_P8 (SEQ ID NO:566), as compared to the known protein Coagulation factor V precursor (SEQ ID NO:626), are described in Table 12 (given according to their position(s) on the amino acid sequence in the first column; the second column indicates whether the glycosylation site is present in the variant protein; and the last column indicates whether the position is different on the variant protein).

TABLE 12
Glycosylation site(s)

| Position(s) on known amino | Present in | Position |
|---|---|---|
| acid sequence | variant protein? | in variant protein? |
| 821 | no | |
| 554 | yes | 554 |
| 1703 | no | |
| 741 | no | |
| 55 | yes | 55 |
| 297 | yes | 297 |
| 752 | no | |
| 468 | yes | 468 |
| 460 | yes | 460 |
| 1559 | no | |
| 782 | no | |
| 1479 | no | |
| 938 | no | |
| 776 | no | |
| 760 | no | |
| 1103 | no | |
| 1499 | no | |
| 1106 | no | |
| 977 | no | |
| 2010 | no | |
| 239 | yes | 239 |
| 1074 | no | |
| 2209 | no | |
| 1083 | no | |
| 51 | yes | 51 |
| 382 | yes | 382 |

[1593] The phosphorylation sites of variant protein HUMF5A_PEA_{—}1_P8 (SEQ ID NO:566), as compared to the known protein Coagulation factor V precursor (SEQ ID NO:626), are described in Table 13 (given according to their position(s) on the amino acid sequence in the first column; the second column indicates whether the phosphorylation site is present in the variant protein; and the last column indicates whether the position is different on the variant protein).

TABLE 13
Phosphorylation site(s)

| Position(s) on known amino acid | |
|---|---|
| sequence | Present in variant protein? |
| 724 | no |
| 726 | no |
| 1543 | no |
| 1538 | no |
| 693 | no |
| 1593 | no |
| 1522 | no |

[1594] Variant protein HUMF5A_PEA_{—}1_P8 (SEQ ID NO:566) is encoded by the following transcript(s): HUMF5A_PEA_{—}1_T7 (SEQ ID NO:35), for which the sequence(s) is/are given at the end of the application. The coding portion of transcript HUMF5A_PEA_{—}1_T7 (SEQ ID NO:35) is shown in bold; this coding portion starts at position 183 and ends at position 1991. The transcript also has the following SNPs as listed in Table 14 (given according to their position on the nucleotide sequence, with the alternative nucleic acid listed; the last column indicates whether the SNP is known or not; the presence of known SNPs in variant protein HUMF5A_PEA_{—}1_P8 (SEQ ID NO:566) sequence provides support for the deduced sequence of this variant protein according to the present invention).

TABLE 14
Nucleic acid SNPs

| SNP position on | Alternative | Previously |
|---|---|---|
| nucleotide sequence | nucleic acid | known SNP? |
| 16 | C -> T | Yes |
| 225 | G -> A | Yes |
| 419 | A -> G | Yes |
| 501 | G -> C | Yes |
| 587 | G -> A | Yes |
| 734 | G -> T | Yes |
| 746 | G -> C | Yes |
| 951 | C -> T | Yes |
| 998 | C -> T | Yes |
| 1420 | T -> C | Yes |
| 1424 | A -> G | Yes |
| 1562 | C -> T | Yes |
| 1720 | G -> A | Yes |
| 1783 | G -> A | Yes |
| 1898 | G -> A | Yes |
| 2088 | G -> A | Yes |
| 2095 | G -> A | Yes |

[1595] As noted above, cluster HUMF5A features 33 segment(s), which were listed in Table 2 above and for which the sequence(s) are given at the end of the application. These segment(s) are portions of nucleic acid sequence(s) which are described herein separately because they are of particular interest. A description of each segment according to the present invention is now provided.

[1596] Segment cluster HUMF5A_PEA_{—}1_node_{—}0 (SEQ ID NO:252) according to the present invention is supported by 9 libraries. The number of libraries was determined as previously described. This segment can be found in the following transcript(s): HUMF5A_PEA_{—}1_T1 (SEQ ID NO:33), HUMF5A_PEA_{—}1_T3 (SEQ ID NO:34) and HUMF5A_PEA_{—}1_T7 (SEQ ID NO:35). Table 15 below describes the starting and ending position of this segment on each transcript.

TABLE 15
Segment location on transcripts

| | Segment | |
|---|---|---|
| | starting | Segment ending |
| Transcript name | position | position |
| HUMF5A_PEA_1_T1 (SEQ ID NO: 33) | 1 | 340 |
| HUMF5A_PEA_1_T3 (SEQ ID NO: 34) | 1 | 340 |
| HUMF5A_PEA_1_T7 (SEQ ID NO: 35) | 1 | 340 |

[1597] Segment cluster HUMF5A_PEA_{—}1_node_{—}4 (SEQ ID NO:253) according to the present invention is supported by 7 libraries. The number of libraries was determined as previously described. This segment can be found in the following transcript(s): HUMF5A_PEA_{—}1_T1 (SEQ ID NO:33), HUMF5A_PEA_{—}1_T3 (SEQ ID NO:34) and HUMF5A_PEA_{—}1_T7 (SEQ ID NO:35). Table 16 below describes the starting and ending position of this segment on each transcript.

TABLE 16
Segment location on transcripts

| | Segment | |
|---|---|---|
| | starting | Segment ending |
| Transcript name | position | position |
| HUMF5A_PEA_1_T1 (SEQ ID NO: 33) | 433 | 555 |
| HUMF5A_PEA_1_T3 (SEQ ID NO: 34) | 433 | 555 |
| HUMF5A_PEA_1_T7 (SEQ ID NO: 35) | 433 | 555 |

[1598] Segment cluster HUMF5A_PEA_{—}1_node_{—}6 (SEQ ID NO:254) according to the present invention is supported by 11 libraries. The number of libraries was determined as previously described. This segment can be found in the following transcript(s): HUMF5A_PEA_{—}1_T1 (SEQ ID NO:33), HUMF5A_PEA_{—}1_T3 (SEQ ID NO:34) and HUMF5A_PEA_{—}1_T7 (SEQ ID NO:35). Table 17 below describes the starting and ending position of this segment on each transcript.

TABLE 17
Segment location on transcripts

| | Segment | |
|---|---|---|
| | starting | Segment ending |
| Transcript name | position | position |
| HUMF5A_PEA_1_T1 (SEQ ID NO: 33) | 556 | 768 |
| HUMF5A_PEA_1_T3 (SEQ ID NO: 34) | 556 | 768 |
| HUMF5A_PEA_1_T7 (SEQ ID NO: 35) | 556 | 768 |

[1599] Segment cluster HUMF5A_PEA_{—}1_node_{—}8 (SEQ ID NO:255) according to the present invention is supported by 8 libraries. The number of libraries was determined as previously described. This segment can be found in the following transcript(s): HUMF5A_PEA_{—}1_T1 (SEQ ID NO:33), HUMF5A_PEA_{—}1_T3 (SEQ ID NO:34) and HUMF5A_PEA_{—}1_T7 (SEQ ID NO:35). Table 18 below describes the starting and ending position of this segment on each transcript.

TABLE 18
Segment location on transcripts

| | Segment | |
|---|---|---|
| | starting | Segment ending |
| Transcript name | position | position |
| HUMF5A_PEA_1_T1 (SEQ ID NO: 33) | 769 | 912 |
| HUMF5A_PEA_1_T3 (SEQ ID NO: 34) | 769 | 912 |
| HUMF5A_PEA_1_T7 (SEQ ID NO: 35) | 769 | 912 |

[1600] Segment cluster HUMF5A_PEA_{—}1_node_{—}10 (SEQ ID NO:256) according to the present invention is supported by 7 libraries. The number of libraries was determined as previously described. This segment can be found in the following transcript(s): HUMF5A_PEA_{—}1_T1 (SEQ ID NO:33) HUMF5A_PEA_{—}1_T3 (SEQ ID NO:34) and HUMF5A_PEA_{—}1_T7 (SEQ ID NO:35). Table 19 below describes the starting and ending position of this segment on each transcript.

TABLE 19
Segment location on transcripts

| | Segment | |
|---|---|---|
| | starting | Segment ending |
| Transcript name | position | position |
| HUMF5A_PEA_1_T1 (SEQ ID NO: 33) | 913 | 1134 |
| HUMF5A_PEA_1_T3 (SEQ ID NO: 34) | 913 | 1134 |
| HUMF5A_PEA_1_T7 (SEQ ID NO: 35) | 913 | 1134 |

[1601] Segment cluster HUMF5A_PEA_{—}1_node_{—}12 (SEQ ID NO:257) according to the present invention is supported by 10 libraries. The number of libraries was determined as previously described. This segment can be found in the following transcript(s): HUMF5A_PEA_{—}1_T1 (SEQ ID NO:33), HUMF5A_PEA_{—}1_T3 (SEQ ID NO:34) and HUMF5A_PEA_{—}1_T7 (SEQ ID NO:35). Table 20 below describes the starting and ending position of this segment on each transcript.

TABLE 20
Segment location on transcripts

| | Segment | |
|---|---|---|
| | starting | Segment ending |
| Transcript name | position | position |
| HUMF5A_PEA_1_T1 (SEQ ID NO: 33) | 1135 | 1300 |
| HUMF5A_PEA_1_T3 (SEQ ID NO: 34) | 1135 | 1300 |
| HUMF5A_PEA_1_T7 (SEQ ID NO: 35) | 1135 | 1300 |

[1602] Segment cluster HUMF5A_PEA_{—}1_node_{—}14 (SEQ ID NO:258) according to the present invention is supported by 9 libraries. The number of libraries was determined as previously described. This segment can be found in the following transcript(s): HUMF5A_PEA_{—}1_T1 (SEQ ID NO:33), HUMF5A_PEA_{—}1_T3 (SEQ ID NO:34) and HUMF5A_PEA_{—}1_T7 (SEQ ID NO:35). Table 21 below describes the starting and ending position of this segment on each transcript.

TABLE 21
Segment location on transcripts

| | Segment | |
|---|---|---|
| | starting | Segment ending |
| Transcript name | position | position |
| HUMF5A_PEA_1_T1 (SEQ ID NO: 33) | 1301 | 1478 |
| HUMF5A_PEA_1_T3 (SEQ ID NO: 34) | 1301 | 1478 |
| HUMF5A_PEA_1_T7 (SEQ ID NO: 35) | 1301 | 1478 |

[1603] Segment cluster HUMF5A_PEA_{—}1_node_{—}18 (SEQ ID NO:259) according to the present invention is supported by 10 libraries. The number of libraries was determined as previously described. This segment can be found in the following transcript(s): HUMF5A_PEA_{—}1_T1 (SEQ ID NO:33), HUMF5A_PEA_{—}1_T3 (SEQ ID NO:34) and HUMF5A_PEA_{—}1_T7 (SEQ ID NO:35). Table 22 below describes the starting and ending position of this segment on each transcript.

TABLE 22
Segment location on transcripts

| | Segment | |
|---|---|---|
| | starting | Segment ending |
| Transcript name | position | position |
| HUMF5A_PEA_1_T1 (SEQ ID NO: 33) | 1579 | 1793 |
| HUMF5A_PEA_1_T3 (SEQ ID NO: 34) | 1579 | 1793 |
| HUMF5A_PEA_1_T7 (SEQ ID NO: 35) | 1579 | 1793 |

[1604] Segment cluster HUMF5A_PEA_{—}1_node_{—}21 (SEQ ID NO:260) according to the present invention is supported by 12 libraries. The number of libraries was determined as previously described. This segment can be found in the following transcript(s): HUMF5A_PEA_{—}1_T1 (SEQ ID NO:33), HUMF5A_PEA_{—}1_T3 (SEQ ID NO:34) and HUMF5A_PEA_{—}1_T7 (SEQ ID NO:35). Table 23 below describes the starting and ending position of this segment on each transcript.

TABLE 23
Segment location on transcripts

| | Segment | |
|---|---|---|
| | starting | Segment ending |
| Transcript name | position | position |
| HUMF5A_PEA_1_T1 (SEQ ID NO: 33) | 1794 | 1944 |
| HUMF5A_PEA_1_T3 (SEQ ID NO: 34) | 1794 | 1944 |
| HUMF5A_PEA_1_T7 (SEQ ID NO: 35) | 1794 | 1944 |

[1605] Segment cluster HUMF5A_PEA_{—}1_node_{—}22 (SEQ ID NO:261) according to the present invention is supported by 1 libraries. The number of libraries was determined as previously described. This segment can be found in the following transcript(s): HUMF5A_PEA_{—}1_T7 (SEQ ID NO:35). Table 24 below describes the starting and ending position of this segment on each transcript.

TABLE 24
Segment location on transcripts

| | Segment | |
|---|---|---|
| | starting | Segment ending |
| Transcript name | position | position |
| HUMF5A_PEA_1_T7 (SEQ ID NO: 35) | 1945 | 2097 |

[1606] Segment cluster HUMF5A_PEA_{—}1_node_{—}24 (SEQ ID NO:262) according to the present invention is supported by 13 libraries. The number of libraries was determined as previously described. This segment can be found in the following transcript(s): HUMF5A_PEA_{—}1_T1 (SEQ ID NO:33) and HUMF5A_PEA_{—}1_T3 (SEQ ID NO:34). Table 25 below describes the starting and ending position of this segment on each transcript.

TABLE 25
Segment location on transcripts

| | Segment | |
|---|---|---|
| | starting | Segment ending |
| Transcript name | position | position |
| HUMF5A_PEA_1_T1 (SEQ ID NO: 33) | 1945 | 2157 |
| HUMF5A_PEA_1_T3 (SEQ ID NO: 34) | 1945 | 2157 |

[1607] Segment cluster HUMF5A_PEA_{—}1_node_{—}26 (SEQ ID NO:263) according to the present invention is supported by 33 libraries. The number of libraries was determined as previously described. This segment can be found in the following transcript(s): HUMF5A_PEA_{—}1_T1 (SEQ ID NO:33) and HUMF5A_PEA_{—}1_T3 (SEQ ID NO:34). Table 26 below describes the starting and ending position of this segment on each transcript.

TABLE 26
Segment location on transcripts

| | Segment | |
|---|---|---|
| | starting | Segment ending |
| Transcript name | position | position |
| HUMF5A_PEA_1_T1 (SEQ ID NO: 33) | 2158 | 3766 |
| HUMF5A_PEA_1_T3 (SEQ ID NO: 34) | 2158 | 3766 |

[1608] Segment cluster HUMF5A_PEA_{—}1_node_{—}27 (SEQ ID NO:264) according to the present invention is supported by 12 libraries. The number of libraries was determined as previously described. This segment can be found in the following transcript(s): HUMF5A_PEA_{—}1_T1 (SEQ ID NO:33) and HUMF5A_PEA_{—}1_T3 (SEQ ID NO:34). Table 27 below describes the starting and ending position of this segment on each transcript.

TABLE 27
Segment location on transcripts

| | Segment | |
|---|---|---|
| | starting | Segment ending |
| Transcript name | position | position |
| HUMF5A_PEA_1_T1 (SEQ ID NO: 33) | 3767 | 3936 |
| HUMF5A_PEA_1_T3 (SEQ ID NO: 34) | 3767 | 3936 |

[1609] Segment cluster HUMF5A_PEA_{—}1_node_{—}29 (SEQ ID NO:265) according to the present invention is supported by 22 libraries. The number of libraries was determined as previously described. This segment can be found in the following transcript(s): HUMF5A_PEA_{—}1_T1 (SEQ ID NO:33) and HUMF5A_PEA_{—}1_T3 (SEQ ID NO:34). Table 28 below describes the starting and ending position of this segment on each transcript.

TABLE 28
Segment location on transcripts

| | Segment | |
|---|---|---|
| | starting | Segment ending |
| Transcript name | position | position |
| HUMF5A_PEA_1_T1 (SEQ ID NO: 33) | 3937 | 4978 |
| HUMF5A_PEA_1_T3 (SEQ ID NO: 34) | 3937 | 4978 |

[1610] Segment cluster HUMF5A_PEA_{—}1_node_{—}35 (SEQ ID NO:266) according to the present invention is supported by 7 libraries. The number of libraries was determined as previously described. This segment can be found in the following transcript(s): HUMF5A_PEA_{—}1_T1 (SEQ ID NO:33) and HUMF5A_PEA_{—}1_T3 (SEQ ID NO:34). Table 29 below describes the starting and ending position of this segment on each transcript.

TABLE 29
Segment location on transcripts

| | Segment | |
|---|---|---|
| | starting | Segment ending |
| Transcript name | position | position |
| HUMF5A_PEA_1_T1 (SEQ ID NO: 33) | 5102 | 5338 |
| HUMF5A_PEA_1_T3 (SEQ ID NO: 34) | 5154 | 5390 |

[1611] Segment cluster HUMF5A_PEA_{—}1_node_{—}37 (SEQ ID NO:267) according to the present invention is supported by 9 libraries. The number of libraries was determined as previously described. This segment can be found in the following transcript(s): HUMF5A_PEA_{—}1_T1 (SEQ ID NO:33) and HUMF5A_PEA_{—}1_T3 (SEQ ID NO:34). Table 30 below describes the starting and ending position of this segment on each transcript.

TABLE 30
Segment location on transcripts

| | | Segment |
|---|---|---|
| | Segment | ending |
| Transcript name | starting position | position |
| HUMF5A_PEA_1_T1 (SEQ ID NO: 33) | 5339 | 5549 |
| HUMF5A_PEA_1_T3 (SEQ ID NO: 34) | 5391 | 5601 |

[1612] Segment cluster HUMF5A_PEA_{—}1_node_{—}39 (SEQ ID NO:268) according to the present invention is supported by 10 libraries. The number of libraries was determined as previously described. This segment can be found in the following transcript(s): HUMF5A_PEA_{—}1_T1 (SEQ ID NO:33) and HUMF5A_PEA_{—}1_T3 (SEQ ID NO:34). Table 31 below describes the starting and ending position of this segment on each transcript.

TABLE 31
Segment location on transcripts

| | | Segment |
|---|---|---|
| | Segment | ending |
| Transcript name | starting position | position |
| HUMF5A_PEA_1_T1 (SEQ ID NO: 33) | 5550 | 5729 |
| HUMF5A_PEA_1_T3 (SEQ ID NO: 34) | 5602 | 5781 |

[1613] Segment cluster HUMF5A_PEA_{—}1_node_{—}47 (SEQ ID NO:269) according to the present invention is supported by 14 libraries. The number of libraries was determined as previously described. This segment can be found in the following transcript(s): HUMF5A_PEA_{—}1_T1 (SEQ ID NO:33) and HUMF5A_PEA_{—}1_T3 (SEQ ID NO:34). Table 32 below describes the starting and ending position of this segment on each transcript.

TABLE 32
Segment location on transcripts

| | | Segment |
|---|---|---|
| | Segment | ending |
| Transcript name | starting position | position |
| HUMF5A_PEA_1_T1 (SEQ ID NO: 33) | 6023 | 6178 |
| HUMF5A_PEA_1_T3 (SEQ ID NO: 34) | 6075 | 6230 |

[1614] Segment cluster HUMF5A_PEA_{—}1_node_{—}50 (SEQ ID NO:270) according to the present invention is supported by 20 libraries. The number of libraries was determined as previously described. This segment can be found in the following transcript(s): HUMF5A_PEA_{—}1_T1 (SEQ ID NO:33) and HUMF5A_PEA_{—}1_T3 (SEQ ID NO:34). Table 33 below describes the starting and ending position of this segment on each transcript.

TABLE 33
Segment location on transcripts

| | | Segment |
|---|---|---|
| | Segment | ending |
| Transcript name | starting position | position |
| HUMF5A_PEA_1_T1 (SEQ ID NO: 33) | 6179 | 6316 |
| HUMF5A_PEA_1_T3 (SEQ ID NO: 34) | 6231 | 6368 |

[1615] Segment cluster HUMF5A_PEA_{—}1_node_{—}53 (SEQ ID NO:271) according to the present invention is supported by 29 libraries. The number of libraries was determined as previously described. This segment can be found in the following transcript(s): HUMF5A_PEA_{—}1_T1 (SEQ ID NO:33) and HUMF5A_PEA_{—}1_T3 (SEQ ID NO:34). Table 34 below describes the starting and ending position of this segment on each transcript.

TABLE 34
Segment location on transcripts

| | | Segment |
|---|---|---|
| | Segment | ending |
| Transcript name | starting position | position |
| HUMF5A_PEA_1_T1 (SEQ ID NO: 33) | 6324 | 6475 |
| HUMF5A_PEA_1_T3 (SEQ ID NO: 34) | 6369 | 6520 |

[1616] Segment cluster HUMF5A_PEA_{—}1_node_{—}56 (SEQ ID NO:272) according to the present invention is supported by 24 libraries. The number of libraries was determined as previously described. This segment can be found in the following transcript(s): HUMF5A_PEA_{—}1_T1 (SEQ ID NO:33) and HUMF5A_PEA_{—}1_T3 (SEQ ID NO:34). Table 35 below describes the starting and ending position of this segment on each transcript.

TABLE 35
Segment location on transcripts

| | | Segment |
|---|---|---|
| | Segment | ending |
| Transcript name | starting position | position |
| HUMF5A_PEA_1_T1 (SEQ ID NO: 33) | 6476 | 6611 |
| HUMF5A_PEA_1_T3 (SEQ ID NO: 34) | 6521 | 6656 |

[1617] Segment cluster HUMF5A_PEA_{—}1_node_{—}60 (SEQ ID NO:273) according to the present invention is supported by 24 libraries. The number of libraries was determined as previously described. This segment can be found in the following transcript(s): HUMF5A_PEA_{—}1_T1 (SEQ ID NO:33) and HUMF5A_PEA_{—}1_T3 (SEQ ID NO:34). Table 36 below describes the starting and ending position of this segment on each transcript.

TABLE 36
Segment location on transcripts

| | | Segment |
|---|---|---|
| | Segment | ending |
| Transcript name | starting position | position |
| HUMF5A_PEA_1_T1 (SEQ ID NO: 33) | 6666 | 6951 |
| HUMF5A_PEA_1_T3 (SEQ ID NO: 34) | 6711 | 6996 |

[1618] According to an optional embodiment of the present invention, short segments related to the above cluster are also provided. These segments are up to about 120 bp in length, and so are included in a separate description.

[1619] Segment cluster HUMF5A_PEA_{—}1_node_{—}2 (SEQ ID NO:274) according to the present invention is supported by 6 libraries. The number of libraries was determined as previously described. This segment can be found in the following transcript(s): HUMF5A_PEA_{—}1_T1 (SEQ ID NO:33), HUMF5A_PEA_{—}1_T3 (SEQ ID NO:34) and HUMF5A_PEA_{—}1_T7 (SEQ ID NO:35). Table 37 below describes the starting and ending position of this segment on each transcript.

TABLE 37
Segment location on transcripts

| | | Segment |
|---|---|---|
| | Segment | ending |
| Transcript name | starting position | position |
| HUMF5A_PEA_1_T1 (SEQ ID NO: 33) | 341 | 432 |
| HUMF5A_PEA_1_T3 (SEQ ID NO: 34) | 341 | 432 |
| HUMF5A_PEA_1_T7 (SEQ ID NO: 35) | 341 | 432 |

[1620] Segment cluster HUMF5A_PEA_{—}1_node_{—}16 (SEQ ID NO:275) according to the present invention is supported by 10 libraries. The number of libraries was determined as previously described. This segment can be found in the following transcript(s): HUMF5A_PEA_{—}1_T1 (SEQ ID NO:33), HUMF5A_PEA_{—}1_T3 (SEQ ID NO:34) and HUMF5A_PEA_{—}1_T7 (SEQ ID NO:35). Table 38 below describes the starting and ending position of this segment on each transcript.

TABLE 38
Segment location on transcripts

| | | Segment |
|---|---|---|
| | Segment | ending |
| Transcript name | starting position | position |
| HUMF5A_PEA_1_T1 (SEQ ID NO: 33) | 1479 | 1578 |
| HUMF5A_PEA_1_T3 (SEQ ID NO: 34) | 1479 | 1578 |
| HUMF5A_PEA_1_T7 (SEQ ID NO: 35) | 1479 | 1578 |

[1621] Segment cluster HUMF5A_PEA_{—}1_node_{—}31 (SEQ ID NO:276) according to the present invention is supported by 3 libraries. The number of libraries was determined as previously described. This segment can be found in the following transcript(s): HUMF5A_PEA_{—}1_T1 (SEQ ID NO:33) and HUMF5A_PEA_{—}1_T3 (SEQ ID NO:34). Table 39 below describes the starting and ending position of this segment on each transcript.

TABLE 39
Segment location on transcripts

| | | Segment |
|---|---|---|
| | Segment | ending |
| Transcript name | starting position | position |
| HUMF5A_PEA_1_T1 (SEQ ID NO: 33) | 4979 | 5033 |
| HUMF5A_PEA_1_T3 (SEQ ID NO: 34) | 4979 | 5033 |

[1622] Segment cluster HUMF5A_PEA_{—}1_node_{—}32 (SEQ ID NO:277) according to the present invention is supported by 2 libraries. The number of libraries was determined as previously described. This segment can be found in the following transcript(s): HUMF5A_PEA_{—}1_T3 (SEQ ID NO:34). Table 40 below describes the starting and ending position of this segment on each transcript.

TABLE 40
Segment location on transcripts

| | | Segment |
|---|---|---|
| | Segment | ending |
| Transcript name | starting position | position |
| HUMF5A_PEA_1_T3 (SEQ ID NO: 34) | 5034 | 5085 |

[1623] Segment cluster HUMF5A_PEA_{—}1_node_{—}33 (SEQ ID NO:278) according to the present invention is supported by 4 libraries. The number of libraries was determined as previously described. This segment can be found in the following transcript(s): HUMF5A_PEA_{—}1_T1 (SEQ ID NO:33) and HUMF5A_PEA_{—}1_T3 (SEQ ID NO:34). Table 41 below describes the starting and ending position of this segment on each transcript.

TABLE 41
Segment location on transcripts

| | | Segment |
|---|---|---|
| | Segment | ending |
| Transcript name | starting position | position |
| HUMF5A_PEA_1_T1 (SEQ ID NO: 33) | 5034 | 5101 |
| HUMF5A_PEA_1_T3 (SEQ ID NO: 34) | 5086 | 5153 |

[1624] Segment cluster HUMF5A_PEA_{—}1_node_{—}41 (SEQ ID NO:279) according to the present invention is supported by 8 libraries. The number of libraries was determined as previously described. This segment can be found in the following transcript(s): HUMF5A_PEA_{—}1_T1 (SEQ ID NO:33) and HUMF5A_PEA_{—}1_T3 (SEQ ID NO:34). Table 42 below describes the starting and ending position of this segment on each transcript.

TABLE 42
Segment location on transcripts

| | | Segment |
|---|---|---|
| | Segment | ending |
| Transcript name | starting position | position |
| HUMF5A_PEA_1_T1 (SEQ ID NO: 33) | 5730 | 5846 |
| HUMF5A_PEA_1_T3 (SEQ ID NO: 34) | 5782 | 5898 |

[1625] Segment cluster HUMF5A_PEA_{—}1_node_{—}43 (SEQ ID NO:280) according to the present invention is supported by 6 libraries. The number of libraries was determined as previously described. This segment can be found in the following transcript(s): HUMF5A_PEA_{—}1_T1 (SEQ ID NO:33) and HUMF5A_PEA_{—}1_T3 (SEQ ID NO:34). Table 43 below describes the starting and ending position of this segment on each transcript.

TABLE 43
Segment location on transcripts

| | | Segment |
|---|---|---|
| | Segment | ending |
| Transcript name | starting position | position |
| HUMF5A_PEA_1_T1 (SEQ ID NO: 33) | 5847 | 5918 |
| HUMF5A_PEA_1_T3 (SEQ ID NO: 34) | 5899 | 5970 |

[1626] Segment cluster HUMF5A_PEA_{—}1_node_{—}45 (SEQ ID NO:281) according to the present invention is supported by 12 libraries. The number of libraries was determined as previously described. This segment can be found in the following transcript(s): HUMF5A_PEA_{—}1_T1 (SEQ ID NO:33) and HUMF5A_PEA_{—}1_T3 (SEQ ID NO:34). Table 44 below describes the starting and ending position of this segment on each transcript.

TABLE 44
Segment location on transcripts

| | | Segment |
|---|---|---|
| | Segment | ending |
| Transcript name | starting position | position |
| HUMF5A_PEA_1_T1 (SEQ ID NO: 33) | 5919 | 6022 |
| HUMF5A_PEA_1_T3 (SEQ ID NO: 34) | 5971 | 6074 |

[1627] Segment cluster HUMF5A_PEA_{—}1_node_{—}51 (SEQ ID NO:282) according to the present invention can be found in the following transcript(s): HUMF5A_PEA_{—}1_T1 (SEQ ID NO:33). Table 45 below describes the starting and ending position of this segment on each transcript.

TABLE 45
Segment location on transcripts

| | Segment | Segment |
|---|---|---|
| Transcript name | starting position | ending position |
| HUMF5A_PEA_1_T1 | 6317 | 6323 |
| (SEQ ID NO: 33) | | |

[1628] Segment cluster HUMF5A_PEA_{—}1_node_{—}57 (SEQ ID NO:283) according to the present invention is supported by 18 libraries. The number of libraries was determined as previously described. This segment can be found in the following transcript(s): HUMF5A_PEA_{—}1_T1 (SEQ ID NO:33) and HUMF5A_PEA_{—}1_T3 (SEQ ID NO:34). Table 46 below describes the starting and ending position of this segment on each transcript.

TABLE 46
Segment location on transcripts

| | | Segment |
|---|---|---|
| | Segment | ending |
| Transcript name | starting position | position |
| HUMF5A_PEA_1_T1 (SEQ ID NO: 33) | 6612 | 6658 |
| HUMF5A_PEA_1_T3 (SEQ ID NO: 34) | 6657 | 6703 |

[1629] Segment cluster HUMF5A_PEA_{—}1_node_{—}59 (SEQ ID NO:284) according to the present invention can be found in the following transcript(s): HUMF5A_PEA_{—}1_T1 (SEQ ID NO:33) and HUMF5A_PEA_{—}1_T3 (SEQ ID NO:34). Table 47 below describes the starting and ending position of this segment on each transcript.

TABLE 47
Segment location on transcripts

| | | Segment |
|---|---|---|
| | Segment | ending |
| Transcript name | starting position | position |
| HUMF5A_PEA_1_T1 (SEQ ID NO: 33) | 6659 | 6665 |
| HUMF5A_PEA_1_T3 (SEQ ID NO: 34) | 6704 | 6710 |

### Variant Protein Alignment to the Previously Known Protein:

[chemical structure]

[chemical structure]

[chemical structure]

[chemical structure]

[chemical structure]

[chemical structure]

[chemical structure]

[chemical structure]

[chemical structure]

[chemical structure]

[chemical structure]

[chemical structure]

[chemical structure]

[chemical structure]

[chemical structure]

[chemical structure]

[chemical structure]

[chemical structure]

[chemical structure]

[chemical structure]

[chemical structure]

[chemical structure]

[chemical structure]

[chemical structure]

[chemical structure]

[chemical structure]

[chemical structure]

[chemical structure]

[chemical structure]

[chemical structure]

[chemical structure]

[chemical structure]

[chemical structure]

[chemical structure]

[chemical structure]

[chemical structure]

[chemical structure]

[chemical structure]

[chemical structure]

[chemical structure]

[chemical structure]

[chemical structure]

[chemical structure]

[chemical structure]

[chemical structure]

[chemical structure]

[chemical structure]

[chemical structure]

[chemical structure]

[chemical structure]

[chemical structure]

[chemical structure]

[chemical structure]

[chemical structure]

[chemical structure]

[chemical structure]

[chemical structure]

[chemical structure]

[chemical structure]

[chemical structure]

[chemical structure]

[chemical structure]

[chemical structure]

[chemical structure]

[chemical structure]

[chemical structure]

[chemical structure]

[chemical structure]

[chemical structure]

[chemical structure]

[chemical structure]

[chemical structure]

[chemical structure]

[chemical structure]

[chemical structure]

[chemical structure]

[chemical structure]

[chemical structure]

[chemical structure]

[chemical structure]

[chemical structure]

[chemical structure]

[chemical structure]

[chemical structure]

[chemical structure]

[chemical structure]

[chemical structure]

PBGD-amplicon, SEQ ID NO:531HPRT1-amplicon, SEQ ID NO:612HPRT1-amplicon, SEQ ID NO:615RPS27A amplicon, SEQ ID NO:1261

### Description for Cluster HUMANK

[1631] Cluster HUMANK features 8 transcript(s) and 22 segment(s) of interest, the names for which are given in Tables 1 and 2, respectively, the sequences themselves are given at the end of the application. The selected protein variants are given in table 3.

TABLE 1
Transcripts of interest

| Transcript Name | SEQ ID NO: |
|---|---|
| HUMANK_T3 | 36 |
| HUMANK_T13 | 37 |
| HUMANK_T23 | 38 |
| HUMANK_T24 | 39 |
| HUMANK_T26 | 40 |
| HUMANK_T27 | 41 |
| HUMANK_T28 | 42 |
| HUMANK_T35 | 43 |

TABLE 2
Segments of interest

| Segment Name | SEQ ID NO: |
|---|---|
| HUMANK_node_91 | 285 |
| HUMANK_node_92 | 286 |
| HUMANK_node_93 | 287 |
| HUMANK_node_100 | 288 |
| HUMANK_node_108 | 289 |
| HUMANK_node_113 | 290 |
| HUMANK_node_115 | 291 |
| HUMANK_node_117 | 292 |
| HUMANK_node_119 | 293 |
| HUMANK_node_120 | 294 |
| HUMANK_node_94 | 295 |
| HUMANK_node_95 | 296 |
| HUMANK_node_98 | 297 |
| HUMANK_node_99 | 298 |
| HUMANK_node_102 | 299 |
| HUMANK_node_103 | 300 |
| HUMANK_node_104 | 301 |
| HUMANK_node_105 | 302 |
| HUMANK_node_106 | 303 |
| HUMANK_node_112 | 304 |
| HUMANK_node_114 | 305 |
| HUMANK_node_116 | 306 |

TABLE 3
Proteins of interest

| Protein Name | SEQ ID NO: | Corresponding Transcript(s) |
|---|---|---|
| HUMANK_P12 | 567 | HUMANK_T13 (SEQ ID NO: 37) |
| HUMANK_P21 | 568 | HUMANK_T26 (SEQ ID NO: 40) |
| HUMANK_P22 | 569 | HUMANK_T27 (SEQ ID NO: 41) |
| HUMANK_P23 | 570 | HUMANK_T28 (SEQ ID NO: 42) |
| HUMANK_P27 | 571 | HUMANK_T35 (SEQ ID NO: 43) |
| HUMANK_P29 | 572 | HUMANK_T3 (SEQ ID NO: 36) |
| HUMANK_P33 | 573 | HUMANK_T23 (SEQ ID NO: 38) |
| HUMANK_P34 | 574 | HUMANK_T24 (SEQ ID NO: 39) |

[1632] These sequences are variants of the known protein Ankyrin 1 (SwissProt accession identifier ANK1_HUMAN; known also according to the synonyms Erythrocyte ankyrin; Ankyrin R), SEQ ID NO: 628, referred to herein as the previously known protein.

[1633] Protein Ankyrin 1 (SEQ ID NO:628) is known or believed to have the following function(s): Attach integral membrane proteins to cytoskeletal elements; bind to the erythrocyte membrane protein band 4.2, to Na—K ATPase, to the lymphocyte membrane protein GP85, and to the cytoskeletal proteins fodrin, tubulin, vimentin and desmin. Erythrocyte ankyrins also link spectrin (beta chain) to the cytoplasmic domain of the erythrocytes anion exchange protein; they retain most or all of these binding functions. The sequence for protein Ankyrin 1 is given at the end of the application, as “Ankyrin 1 amino acid sequence”. Known polymorphisms for this sequence are as shown in Table 4.

TABLE 4
Amino acid mutations for Known Protein

| SNP position(s) | |
|---|---|
| on amino | |
| acid sequence | Comment |
| 20 | R -> T. /FTId = VAR_000595. |
| 462 | V -> I (in HS). /FTId = VAR_000596. |
| 618 | R -> H (in Brueggen). /FTId = VAR_000597. |
| 749 | V -> A. /FTId = VAR_000598. |
| 844 | D -> E. /FTId = VAR_000599. |
| 1285 | E -> D. /FTId = VAR_000601. |
| 1391 | S -> T. /FTId = VAR_000600. |
| 1591 | D -> N (in Duesseldorf). /FTId = VAR_000602. |
| 1698 | R -> D. /FTId = VAR_000603. |
| 229 | A -> S |
| 1545 | V -> I |

[1634] Protein Ankyrin 1 (SEQ ID NO:628) localization is believed to be Cytoplasmic surface of erythrocytic plasma membrane.

[1635] The following GO Annotation(s) apply to the previously known protein. The following annotation(s) were found: exocytosis; cytoskeleton organization and biogenesis; signal transduction, which are annotation(s) related to Biological Process; structural protein; structural protein of cytoskeleton; cytoskeletal adaptor, which are annotation(s) related to Molecular Function; and cytoskeleton; plasma membrane; actin cytoskeleton; basolateral plasma membrane, which are annotation(s) related to Cellular Component.

[1636] The GO assignment relies on information from one or more of the SwissProt/TremB1 Protein knowledgebase, available from <http://www.expasy.ch/sprot/>; or Locuslink, available from <http://www.ncbi.nlm.nih.gov/projects/LocusLink/>.

[1637] Cluster HUMANK can be used as a diagnostic marker according to overexpression of transcripts of this cluster in cancer. Expression of such transcripts in normal tissues is also given according to the previously described methods. The term “number” in the left hand column of the table and the numbers on the y-axis of the figure below refer to weighted expression of ESTs in each category, as “parts per million” (ratio of the expression of ESTs for a particular cluster to the expression of all ESTs in that category, according to parts per million).

[1638] Overall, the following results were obtained as shown with regard to the histograms in FIG. 23 and Table 5. This cluster is overexpressed (at least at a minimum level) in the following pathological conditions: epithelial malignant tumors.

TABLE 5
Normal tissue distribution

| Name of Tissue | Number |
|---|---|
| Bladder | 0 |
| Brain | 41 |
| Epithelial | 2 |
| General | 20 |
| head and neck | 0 |
| Kidney | 0 |
| bone marrow | 62 |
| Muscle | 225 |
| Ovary | 0 |
| Pancreas | 4 |
| prostate | 8 |
| uterus | 0 |

TABLE 6
P values and ratios for expression in cancerous tissue

| Name of Tissue | P1 | P2 | SP1 | R3 | SP2 | R4 |
|---|---|---|---|---|---|---|
| bladder | 5.4e−01 | 6.0e−01 | 5.6e−01 | 1.8 | 6.8e−01 | 1.5 |
| brain | 8.9e−01 | 8.9e−01 | 1 | 0.1 | 1 | 0.2 |
| epithelial | 1.0e−01 | 1.7e−01 | 1.8e−03 | 3.8 | 1.8e−02 | 2.6 |
| general | 9.1e−01 | 9.5e−01 | 9.3e−01 | 0.5 | 1 | 0.4 |
| head and neck | 4.3e−01 | 2.8e−01 | 1 | 1.1 | 7.5e−01 | 1.4 |
| kidney | 6.5e−01 | 7.2e−01 | 5.8e−01 | 1.7 | 7.0e−01 | 1.4 |
| bone marrow | 7.1e−01 | 8.4e−01 | 1 | 0.3 | 9.0e−01 | 0.6 |
| muscle | 5.4e−01 | 6.2e−01 | 1 | 0.1 | 1 | 0.2 |
| ovary | 3.8e−01 | 4.2e−01 | 6.9e−02 | 2.4 | 1.6e−01 | 1.9 |
| pancreas | 5.5e−01 | 2.0e−01 | 4.2e−01 | 1.7 | 1.5e−01 | 2.6 |
| prostate | 9.1e−01 | 9.3e−01 | 6.7e−01 | 1.1 | 7.5e−01 | 1.0 |
| uterus | 4.7e−01 | 6.4e−01 | 6.6e−01 | 1.5 | 8.0e−01 | 1.2 |

[1639] As noted above, cluster HUMANK features 8 transcript(s), which were listed in Table 1 above. These transcript(s) encode for protein(s) which are variant(s) of protein Ankyrin 1 (SEQ ID NO:628). A description of each variant protein according to the present invention is now provided.

[1640] Variant protein HUMANK_P12 (SEQ ID NO:567) according to the present invention has an amino acid sequence as given at the end of the application; it is encoded by transcript(s) HUMANK_T13 (SEQ ID NO:37). An alignment is given to the known protein (Ankyrin 1 (SEQ ID NO:628)) at the end of the application. One or more alignments to one or more previously published protein sequences are given at the end of the application. A brief description of the relationship of the variant protein according to the present invention to each such aligned protein is as follows:

[1641] Comparison Report Between HUMANK_P12 (SEQ ID NO:567) and AAH07930 (SEQ ID NO 631):

[1642] 1. An isolated chimeric polypeptide encoding for HUMANK_P12 (SEQ ID NO:567), comprising a first amino acid sequence being at least 90% homologous to MWTFVTQLLVTLVLLSFFLVSCQNVMHIVRGSLCFVLKHIHQELDKELGESEGLSDDEETISTRVVRRRVF LKGNEFQNIPGEQVTEEQFTDEQGNIVTKKIIRKVVRQIDLSSADAAQEHEE corresponding to amino acids 1-123 of AAH07930 (SEQ ID NO:631), which also corresponds to amino acids 1-123 of HUMANK_P12 (SEQ ID NO:567), and a second amino acid sequence being at least 70%, optionally at least 80%, preferably at least 85%, more preferably at least 90% and most preferably at least 95% homologous to a polypeptide having the sequence VTVEGPLEDPSELEVDIDYFMKHSKDHTSTPNP (SEQ ID NO:1509) corresponding to amino acids 124-156 of HUMANK_P12 (SEQ ID NO:567), wherein said first amino acid sequence and second amino acid sequence are contiguous and in a sequential order.

[1643] 2. An isolated polypeptide encoding for a tail of HUMANK_P12 (SEQ ID NO:567), comprising a polypeptide being at least 70%, optionally at least about 80%, preferably at least about 85%, more preferably at least about 90% and most preferably at least about 95% homologous to the sequence VTVEGPLEDPSELEVDIDYFMKHSKDHTSTPNP (SEQ ID NO:1509) in HUMANK_P12 (SEQ ID NO:567).

[1644] Comparison Report Between HUMANK_P12 (SEQ ID NO:567) and ANK1_HUMAN_V1 (SEQ ID NO 629):

[1645] 1. An isolated chimeric polypeptide encoding for HUMANK_P12 (SEQ ID NO:567), comprising a first amino acid sequence being at least 70%, optionally at least 80%, preferably at least 85%, more preferably at least 90% and most preferably at least 95% homologous to a polypeptide having the sequence MWTFVTQLLVTLVLLSFFLVSCQNVMHIVRGSLCFVLKHIHQELDKELGESEGLSDDEETISTRVVRRRVF LK (SEQ ID NO:1510) corresponding to amino acids 1-73 of HUMANK_P12 (SEQ ID NO:567), and a second amino acid sequence being at least 90% homologous to GNEFQNIPGEQVTEEQFTDEQGNIVTKKIIRKVVRQIDLSSADAAQEHEEVTVEGPLEDPSELEVDIDYFMK HSKDHTSTPNP (SEQ ID NO:1509) corresponding to amino acids 1799-1881 of ANK1_HUMAN_V1 (SEQ ID NO:629), which also corresponds to amino acids 74-156 of HUMANK_P12 (SEQ ID NO:567), wherein said first amino acid sequence and second amino acid sequence are contiguous and in a sequential order.

[1646] 2. An isolated polypeptide encoding for a head of HUMANK_P12 (SEQ ID NO:567), comprising a polypeptide being at least 70%, optionally at least about 80%, preferably at least about 85%, more preferably at least about 90% and most preferably at least about 95% homologous to the sequence MWTFVTQLLVTLVLLSFFLVSCQNVMHIVRGSLCFVLKHIHQELDKELGESEGLSDDEETISTRVVRRRVF LK (SEQ ID NO:1510) of HUMANK_P12 (SEQ ID NO:567).

[1647] It should be noted that the known protein sequence (ANK1_HUMAN (SEQ ID NO:628)) has one or more changes than the sequence given at the end of the application and named as being the amino acid sequence for ANK1_HUMAN_V1 (SEQ ID NO:629). These changes were previously known to occur and are listed in the table below.

TABLE 7
Changes to ANK1_HUMAN_V1 (SEQ ID NO: 629)

| SNP position(s) on amino | |
|---|---|
| acid sequence | Type of change |
| 1 | init_met |

[1648] Comparison Report Between HUMANK_P12 (SEQ ID NO:567) and Q8N604 (SEQ ID NO: 630):

[1649] 1. An isolated chimeric polypeptide encoding for HUMANK_P12 (SEQ ID NO:567), comprising a first amino acid sequence being at least 90% homologous to MWTFVTQLLVTLVLLSFFLVSCQNVMHIVRGSLCFVLKHIHQELDKELGESE corresponding to amino acids 1-52 of Q8N604 (SEQ ID NO:630), which also corresponds to amino acids 1-52 of HUMANK_P12 (SEQ ID NO:567), a bridging amino acid G corresponding to amino acid 53 of HUMANK_P12 (SEQ ID NO:567), a second amino acid sequence being at least 90% homologous to LSDDEETISTRVVRRRVFLKGNEFQNIPGEQVTEEQFTDEQGNIVTKKIIRKVVRQIDLSSADAAQEHEEV corresponding to amino acids 54-124 of Q8N604 (SEQ ID NO:630), which also corresponds to amino acids 54-124 of HUMANK_P12 (SEQ ID NO:567), and a third amino acid sequence being at least 70%, optionally at least 80%, preferably at least 85%, more preferably at least 90% and most preferably at least 95% homologous to a polypeptide having the sequence TVEGPLEDPSELEVDIDYFMKHSKDHTSTPNP corresponding to amino acids 125-156 of HUMANK_P12 (SEQ ID NO:567), wherein said first amino acid sequence, bridging amino acid, second amino acid sequence and third amino acid sequence are contiguous and in a sequential order.

[1650] 2. An isolated polypeptide encoding for a tail of HUMANK_P12 (SEQ ID NO:567), comprising a polypeptide being at least 70%, optionally at least about 80%, preferably at least about 85%, more preferably at least about 90% and most preferably at least about 95% homologous to the sequence TVEGPLEDPSELEVDIDYFMKHSKDHTSTPNP in HUMANK_P12 (SEQ ID NO:567).

[1651] The location of the variant protein was determined according to results from a number of different software programs and analyses, including analyses from SignalP and other specialized programs. The variant protein is believed to be located as follows with regard to the cell: secreted. The protein localization is believed to be secreted because both signal-peptide prediction programs predict that this protein has a signal peptide, and neither trans-membrane region prediction program predicts that this protein has a trans-membrane region.

[1652] Variant protein HUMANK_P12 (SEQ ID NO:567) also has the following non-silent SNPs (Single Nucleotide Polymorphisms) as listed in Table 8, (given according to their position(s) on the amino acid sequence, with the alternative amino acid(s) listed; the last column indicates whether the SNP is known or not; the presence of known SNPs in variant protein HUMANK_P12 (SEQ ID NO:567) sequence provides support for the deduced sequence of this variant protein according to the present invention).

TABLE 8
Amino acid mutations

| SNP position(s) on amino acid | Alternative | Previously |
|---|---|---|
| sequence | amino acid(s) | known SNP? |
| 12 | L -> P | No |
| 63 | T -> P | No |
| 82 | G -> | No |
| 82 | G -> V | No |
| 89 | Q -> P | No |

[1653] Variant protein HUMANK_P12 (SEQ ID NO:567) is encoded by the following transcript(s): HUMANK_T13 (SEQ ID NO:37), for which the sequence(s) is/are given at the end of the application. The coding portion of transcript HUMANK_T13 (SEQ ID NO:37) is shown in bold; this coding portion starts at position 2053 and ends at position 2520. The transcript also has the following SNPs as listed in Table 9 (given according to their position on the nucleotide sequence, with the alternative nucleic acid listed; the last column indicates whether the SNP is known or not; the presence of known SNPs in variant protein HUMANK_P12 (SEQ ID NO:567) sequence provides support for the deduced sequence of this variant protein according to the present invention).

TABLE 9
Nucleic acid SNPs

| SNP position on nucleotide | Alternative | |
|---|---|---|
| sequence | nucleic acid | Previously known SNP? |
| 1603 | C -> T | No |
| 1969 | A -> G | No |
| 2005 | -> G | No |
| 2014 | C -> A | No |
| 2087 | T -> C | No |
| 2238 | C -> A | No |
| 2239 | A -> C | No |
| 2297 | G -> | No |
| 2297 | G -> T | No |
| 2318 | A -> C | No |
| 2533 | -> C | No |
| 2533 | -> T | No |
| 2733 | A -> | No |
| 2733 | A -> C | No |
| 2742 | A -> C | No |
| 2772 | A -> C | No |
| 2796 | A -> | No |
| 2796 | A -> C | No |
| 2890 | C -> T | No |
| 3305 | -> G | No |
| 3306 | -> C | No |
| 4118 | T -> A | Yes |
| 4175 | -> T | No |
| 4228 | G -> | No |
| 4603 | G -> T | Yes |
| 5012 | T -> | No |

[1654] Variant protein HUMANK_P21 (SEQ ID NO:568) according to the present invention has an amino acid sequence as given at the end of the application; it is encoded by transcript(s) HUMANK_T26 (SEQ ID NO:40). An alignment is given to the known protein (Ankyrin 1 (SEQ ID NO:628)) at the end of the application. One or more alignments to one or more previously published protein sequences are given at the end of the application. A brief description of the relationship of the variant protein according to the present invention to each such aligned protein is as follows:

[1655] Comparison Report Between HUMANK_P21 (SEQ ID NO:568) and AAH07930 (SEQ ID NO: 631):

[1656] 1. An isolated chimeric polypeptide encoding for HUMANK_P21 (SEQ ID NO:568), comprising a first amino acid sequence being at least 90% homologous to MWTFVTQLLVTLVLLSFFLVSCQNVMHIVRGSLCFVLKHIHQELDKELGESEGLSDDEETISTRVVRRRVF LKGNEFQNIPGEQVTEEQFTDEQGNIVTKKIIRKVVRQIDLSSADAAQEHEE corresponding to amino acids 1-123 of AAH07930 (SEQ ID NO:631), which also corresponds to amino acids 1-123 of HUMANK_P21 (SEQ ID NO:568), and a second amino acid sequence being at least 70%, optionally at least 80%, preferably at least 85%, more preferably at least 90% and most preferably at least 95% homologous to a polypeptide having the sequence VTVEGPLEDPSELEVELRGSGLQPDLIEGRKGAQIVKRASLKRGKQ (SEQ ID NO:1511) corresponding to amino acids 124-169 of HUMANK_P21 (SEQ ID NO:568), wherein said first amino acid sequence and second amino acid sequence are contiguous and in a sequential order.

[1657] 2. An isolated polypeptide encoding for a tail of HUMANK_P21 (SEQ ID NO:568), comprising a polypeptide being at least 70%, optionally at least about 80%, preferably at least about 85%, more preferably at least about 90% and most preferably at least about 95% homologous to the sequence VTVEGPLEDPSELEVELRGSGLQPDLIEGRKGAQIVKRASLKRGKQ (SEQ ID NO:1511) in HUMANK_P21 (SEQ ID NO:568).

[1658] Comparison Report Between HUMANK_P21 (SEQ ID NO:568) and Q8N604 (SEQ ID NO:630):

[1659] 1. An isolated chimeric polypeptide encoding for HUMANK_P21 (SEQ ID NO:568), comprising a first amino acid sequence being at least 90% homologous to MWTFVTQLLVTLVLLSFFLVSCQNVMHIVRGSLCFVLKHIHQELDKELGESE corresponding to amino acids 1-52 of Q8N604 (SEQ ID NO:630), which also corresponds to amino acids 1-52 of HUMANK_P21 (SEQ ID NO:568), a bridging amino acid G corresponding to amino acid 53 of HUMANK_P21 (SEQ ID NO:568), a second amino acid sequence being at least 90% homologous to LSDDEETISTRVVRRRVFLKGNEFQNIPGEQVTEEQFTDEQGNIVTKKIIRKVVRQIDLSSADAAQEHE corresponding to amino acids 54-122 of Q8N604 (SEQ ID NO:630), which also corresponds to amino acids 54-122 of HUMANK_P21 (SEQ ID NO:568), a third amino acid sequence being at least 70%, optionally at least 80%, preferably at least 85%, more preferably at least 90% and most preferably at least 95% homologous to a polypeptide having the sequence EVTVEGPLEDPSEL (SEQ ID NO:1512) corresponding to amino acids 123-136 of HUMANK_P21 (SEQ ID NO:568), and a fourth amino acid sequence being at least 90% homologous to EVELRGSGLQPDLIEGRKGAQIVKRASLKRGKQ corresponding to amino acids 123-155 of Q8N604 (SEQ ID NO:630), which also corresponds to amino acids 137-169 of HUMANK_P21 (SEQ ID NO:568), wherein said first amino acid sequence, bridging amino acid, second amino acid sequence, third amino acid sequence and fourth amino acid sequence are contiguous and in a sequential order.

[1660] 2. An isolated polypeptide encoding for an edge portion of HUMANK_P21 (SEQ ID NO:568), comprising an amino acid sequence being at least 70%, optionally at least about 80%, preferably at least about 85%, more preferably at least about 90% and most preferably at least about 95% homologous to the sequence encoding for EVTVEGPLEDPSEL (SEQ ID NO:1512), corresponding to HUMANK_P21 (SEQ ID NO:568).

[1661] The location of the variant protein was determined according to results from a number of different software programs and analyses, including analyses from SignalP and other specialized programs. The variant protein is believed to be located as follows with regard to the cell: secreted. The protein localization is believed to be secreted because both signal-peptide prediction programs predict that this protein has a signal peptide, and neither trans-membrane region prediction program predicts that this protein has a trans-membrane region.

[1662] Variant protein HUMANK_P21 (SEQ ID NO:568) also has the following non-silent SNPs (Single Nucleotide Polymorphisms) as listed in Table 10, (given according to their position(s) on the amino acid sequence, with the alternative amino acid(s) listed; the last column indicates whether the SNP is known or not; the presence of known SNPs in variant protein HUMANK_P21 (SEQ ID NO:568) sequence provides support for the deduced sequence of this variant protein according to the present invention).

TABLE 10
Amino acid mutations

| SNP position(s) on amino acid | Alternative | Previously |
|---|---|---|
| sequence | amino acid(s) | known SNP? |
| 12 | L -> P | No |
| 63 | T -> P | No |
| 82 | G -> | No |
| 82 | G -> V | No |
| 89 | Q -> P | No |

[1663] Variant protein HUMANK_P21 (SEQ ID NO:568) is encoded by the following transcript(s): HUMANK_T26 (SEQ ID NO:40), for which the sequence(s) is/are given at the end of the application. The coding portion of transcript HUMANK_T26 (SEQ ID NO:40) is shown in bold; this coding portion starts at position 2053 and ends at position 2559. The transcript also has the following SNPs as listed in Table 11 (given according to their position on the nucleotide sequence, with the alternative nucleic acid listed; the last column indicates whether the SNP is known or not; the presence of known SNPs in variant protein HUMANK_P21 (SEQ ID NO:568) sequence provides support for the deduced sequence of this variant protein according to the present invention).

TABLE 11
Nucleic acid SNPs

| SNP position on nucleotide | Alternative | Previously |
|---|---|---|
| sequence | nucleic acid | known SNP? |
| 1603 | C -> T | No |
| 1969 | A -> G | No |
| 2005 | -> G | No |
| 2014 | C -> A | No |
| 2087 | T -> C | No |
| 2238 | C -> A | No |
| 2239 | A -> C | No |
| 2297 | G -> | No |
| 2297 | G -> T | No |
| 2318 | A -> C | No |
| 2635 | -> C | No |
| 2635 | -> T | No |
| 2835 | A -> | No |
| 2835 | A -> C | No |
| 2844 | A -> C | No |
| 2874 | A -> C | No |
| 2898 | A -> | No |
| 2898 | A -> C | No |
| 2992 | C -> T | No |
| 3407 | -> G | No |
| 3408 | -> C | No |
| 4220 | T -> A | Yes |
| 4277 | -> T | No |
| 4330 | G -> | No |
| 4705 | G -> T | Yes |
| 5114 | T -> | No |

[1664] Variant protein HUMANK_P22 (SEQ ID NO:569) according to the present invention has an amino acid sequence as given at the end of the application; it is encoded by transcript(s) HUMANK_T27 (SEQ ID NO:41). An alignment is given to the known protein (Ankyrin 1 (SEQ ID NO:628)) at the end of the application. One or more alignments to one or more previously published protein sequences are given at the end of the application. A brief description of the relationship of the variant protein according to the present invention to each such aligned protein is as follows:

[1665] Comparison Report Between HUMANK_P22 (SEQ ID NO:569) and AAH07930 (SEQ ID NO:631):

[1666] 1. An isolated chimeric polypeptide encoding for HUMANK_P22 (SEQ ID NO:569), comprising a first amino acid sequence being at least 90% homologous to MWTFVTQLLVTLVLLSFFLVSCQNVMHIVRGSLCFVLKHIHQELDKELGESEGLSDDEETISTRVVRRRVF LKGNEFQNIPGEQVTEEQFTDEQGNIVTKKIIRKVVRQIDLSSADAAQEHEE corresponding to amino acids 1-123 of AAH07930 (SEQ ID NO:631), which also corresponds to amino acids 1-123 of HUMANK_P22 (SEQ ID NO:569), and a second amino acid sequence being at least 70%, optionally at least 80%, preferably at least 85%, more preferably at least 90% and most preferably at least 95% homologous to a polypeptide having the sequence VTVEGPLEDPSELEVDIDYFMKHSKVELRGSGLQPDLIEGRKGAQIVKRASLKRGKQ (SEQ ID NO:1513) corresponding to amino acids 124-180 of HUMANK_P22 (SEQ ID NO:569), wherein said first amino acid sequence and second amino acid sequence are contiguous and in a sequential order.

[1667] 2. An isolated polypeptide encoding for a tail of HUMANK_P22 (SEQ ID NO:569), comprising a polypeptide being at least 70%, optionally at least about 80%, preferably at least about 85%, more preferably at least about 90% and most preferably at least about 95% homologous to the sequence VTVEGPLEDPSELEVDIDYFMKHSKVELRGSGLQPDLIEGRKGAQIVKRASLKRGKQ (SEQ ID NO:1513) in HUMANK_P22 (SEQ ID NO:569).

[1668] Comparison Report Between HUMANK_P22 (SEQ ID NO:569) and Q8N604 (SEQ ID NO:630):

[1669] 1. An isolated chimeric polypeptide encoding for HUMANK_P22 (SEQ ID NO:569), comprising a first amino acid sequence being at least 90% homologous to MWTFVTQLLVTLVLLSFFLVSCQNVMHIVRGSLCFVLKHIHQELDKELGESE corresponding to amino acids 1-52 of Q8N604 (SEQ ID NO:630), which also corresponds to amino acids 1-52 of HUMANK_P22 (SEQ ID NO:569), a bridging amino acid G corresponding to amino acid 53 of HUMANK_P22 (SEQ ID NO:569), a second amino acid sequence being at least 90% homologous to LSDDEETISTRVVRRRVFLKGNEFQNIPGEQVTEEQFTDEQGNIVTKKIIRKVVRQIDLSSADAAQEHEE corresponding to amino acids 54-123 of Q8N604 (SEQ ID NO:630), which also corresponds to amino acids 54-123 of HUMANK_P22 (SEQ ID NO:569), a third amino acid sequence being at least 70%, optionally at least 80%, preferably at least 85%, more preferably at least 90% and most preferably at least 95% homologous to a polypeptide having the sequence VTVEGPLEDPSELEVDIDYFMKHSK (SEQ ID NO:1514) corresponding to amino acids 124-148 of HUMANK_P22 (SEQ ID NO:569), and a fourth amino acid sequence being at least 90% homologous to VELRGSGLQPDLIEGRKGAQIVKRASLKRGKQ (SEQ ID NO:1517) corresponding to amino acids 124-155 of Q8N604 (SEQ ID NO:630), which also corresponds to amino acids 149-180 of HUMANK_P22 (SEQ ID NO:569), wherein said first amino acid sequence, bridging amino acid, second amino acid sequence, third amino acid sequence and fourth amino acid sequence are contiguous and in a sequential order.

[1670] 2. An isolated polypeptide encoding for an edge portion of HUMANK_P22 (SEQ ID NO:569), comprising an amino acid sequence being at least 70%, optionally at least about 80%, preferably at least about 85%, more preferably at least about 90% and most preferably at least about 95% homologous to the sequence encoding for VTVEGPLEDPSELEVDIDYFMKHSK (SEQ ID NO:1514), corresponding to HUMANK_P22 (SEQ ID NO:569).

[1671] The location of the variant protein was determined according to results from a number of different software programs and analyses, including analyses from SignalP and other specialized programs. The variant protein is believed to be located as follows with regard to the cell: secreted. The protein localization is believed to be secreted because both signal-peptide prediction programs predict that this protein has a signal peptide, and neither trans-membrane region prediction program predicts that this protein has a trans-membrane region.

[1672] Variant protein HUMANK_P22 (SEQ ID NO:569) also has the following non-silent SNPs (Single Nucleotide Polymorphisms) as listed in Table 12, (given according to their position(s) on the amino acid sequence, with the alternative amino acid(s) listed; the last column indicates whether the SNP is known or not; the presence of known SNPs in variant protein HUMANK_P22 (SEQ ID NO:569) sequence provides support for the deduced sequence of this variant protein according to the present invention).

TABLE 12
Amino acid mutations

| SNP position(s) on amino acid | Alternative | Previously |
|---|---|---|
| sequence | amino acid(s) | known SNP? |
| 12 | L -> P | No |
| 63 | T -> P | No |
| 82 | G -> | No |
| 82 | G -> V | No |
| 89 | Q -> P | No |

[1673] Variant protein HUMANK_P22 (SEQ ID NO:569) is encoded by the following transcript(s): HUMANK_T27 (SEQ ID NO:41), for which the sequence(s) is/are given at the end of the application. The coding portion of transcript HUMANK_T27 (SEQ ID NO:41) is shown in bold; this coding portion starts at position 2053 and ends at position 2592. The transcript also has the following SNPs as listed in Table 13 (given according to their position on the nucleotide sequence, with the alternative nucleic acid listed; the last column indicates whether the SNP is known or not; the presence of known SNPs in variant protein HUMANK_P22 (SEQ ID NO:569) sequence provides support for the deduced sequence of this variant protein according to the present invention).

TABLE 13
Nucleic acid SNPs

| SNP position on nucleotide | Alternative | Previously |
|---|---|---|
| sequence | nucleic acid | known SNP? |
| 1603 | C -> T | No |
| 1969 | A -> G | No |
| 2005 | -> G | No |
| 2014 | C -> A | No |
| 2087 | T -> C | No |
| 2238 | C -> A | No |
| 2239 | A -> C | No |
| 2297 | G -> | No |
| 2297 | G -> T | No |
| 2318 | A -> C | No |
| 2668 | -> C | No |
| 2668 | -> T | No |
| 2868 | A -> | No |
| 2868 | A -> C | No |
| 2877 | A -> C | No |
| 2907 | A -> C | No |
| 2931 | A -> | No |
| 2931 | A -> C | No |
| 3025 | C -> T | No |
| 3440 | -> G | No |
| 3441 | -> C | No |
| 4253 | T -> A | Yes |
| 4310 | -> T | No |
| 4363 | G -> | No |
| 4738 | G -> T | Yes |
| 5147 | T -> | No |

[1674] Variant protein HUMANK_P23 (SEQ ID NO:570) according to the present invention has an amino acid sequence as given at the end of the application; it is encoded by transcript(s) HUMANK_T28 (SEQ ID NO:42). An alignment is given to the known protein (Ankyrin 1 (SEQ ID NO:628)) at the end of the application. One or more alignments to one or more previously published protein sequences are given at the end of the application. A brief description of the relationship of the variant protein according to the present invention to each such aligned protein is as follows:

[1675] Comparison Report Between HUMANK_P23 (SEQ ID NO:570) and AAH07930 (SEQ ID NO:631):

[1676] 1. An isolated chimeric polypeptide encoding for HUMANK_P23 (SEQ ID NO:570), comprising a first amino acid sequence being at least 90% homologous to MWTFVTQLLVTLVLLSFFLVSCQNVMHIVRGSLCFVLKHIHQELDKELGESEGLSDDEETISTRVVRRRVF LKGNEFQNIPGEQVTEEQFTDEQGNUVTKKIIRKVVRQIDLSSADAAQEHEE corresponding to amino acids 1-123 of AAH07930 (SEQ ID NO:631), which also corresponds to amino acids 1-123 of HUMANK_P23 (SEQ ID NO:570), and a second amino acid sequence being at least 70%, optionally at least 80%, preferably at least 85%, more preferably at least 90% and most preferably at least 95% homologous to a polypeptide having the sequence VTVEGPLEDPSELEDHTSTPNP (SEQ ID NO:1515) corresponding to amino acids 124-145 of HUMANK_P23 (SEQ ID NO:570), wherein said first amino acid sequence and second amino acid sequence are contiguous and in a sequential order.

[1677] 2. An isolated polypeptide encoding for a tail of HUMANK_P23 (SEQ ID NO:570), comprising a polypeptide being at least 70%, optionally at least about 80%, preferably at least about 85%, more preferably at least about 90% and most preferably at least about 95% homologous to the sequence VTVEGPLEDPSELEDHTSTPNP (SEQ ID NO:1515) in HUMANK_P23 (SEQ ID NO:570).

[1678] Comparison Report Between HUMANK_P23 (SEQ ID NO:570) and Q8N604 (SEQ ID NO:630):

[1679] 1. An isolated chimeric polypeptide encoding for HUMANK_P23 (SEQ ID NO:570), comprising a first amino acid sequence being at least 90% homologous to MWTFVTQLLVTLVLLSFFLVSCQNVMHIVRGSLCFVLKHIHQELDKELGESE corresponding to amino acids 1-52 of Q8N604 (SEQ ID NO:630), which also corresponds to amino acids 1-52 of HUMANK_P23 (SEQ ID NO:570), a bridging amino acid G corresponding to amino acid 53 of HUMANK_P23 (SEQ ID NO:570), a second amino acid sequence being at least 90% homologous to LSDDEETISTRVVRRRVFLKGNEFQNIPGEQVTEEQFTDEQGNIVTKKIIRKVVRQIDLSSADAAQEHEEV corresponding to amino acids 54-124 of Q8N604 (SEQ ID NO:630), which also corresponds to amino acids 54-124 of HUMANK_P23 (SEQ ID NO:570), and a third amino acid sequence being at least 70%, optionally at least 80%, preferably at least 85%, more preferably at least 90% and most preferably at least 95% homologous to a polypeptide having the sequence TVEGPLEDPSELEDHTSTPNP corresponding to amino acids 125-145 of HUMANK_P23 (SEQ ID NO:570), wherein said first amino acid sequence, bridging amino acid, second amino acid sequence and third amino acid sequence are contiguous and in a sequential order.

[1680] 2. An isolated polypeptide encoding for a tail of HUMANK_P23 (SEQ ID NO:570), comprising a polypeptide being at least 70%, optionally at least about 80%, preferably at least about 85%, more preferably at least about 90% and most preferably at least about 95% homologous to the sequence TVEGPLEDPSELEDHTSTPNP in HUMANK_P23 (SEQ ID NO:570).

[1681] The location of the variant protein was determined according to results from a number of different software programs and analyses, including analyses from SignalP and other specialized programs. The variant protein is believed to be located as follows with regard to the cell: secreted. The protein localization is believed to be secreted because both signal-peptide prediction programs predict that this protein has a signal peptide, and neither trans-membrane region prediction program predicts that this protein has a trans-membrane region.

[1682] Variant protein HUMANK_P23 (SEQ ID NO:570) also has the following non-silent SNPs (Single Nucleotide Polymorphisms) as listed in Table 14, (given according to their position(s) on the amino acid sequence, with the alternative amino acid(s) listed; the last column indicates whether the SNP is known or not; the presence of known SNPs in variant protein HUMANK_P23 (SEQ ID NO:570) sequence provides support for the deduced sequence of this variant protein according to the present invention).

TABLE 14
Amino acid mutations

| SNP position(s) on | | |
|---|---|---|
| amino acid sequence | Alternative amino acid(s) | Previously known SNP? |
| 12 | L -> P | No |
| 63 | T -> P | No |
| 82 | G -> | No |
| 82 | G -> V | No |
| 89 | Q -> P | No |

[1683] Variant protein HUMANK_P23 (SEQ ID NO:570) is encoded by the following transcript(s): HUMANK_T28 (SEQ ID NO:42), for which the sequence(s) is/are given at the end of the application. The coding portion of transcript HUMANK_T28 (SEQ ID NO:42) is shown in bold; this coding portion starts at position 2053 and ends at position 2487. The transcript also has the following SNPs as listed in Table 15 (given according to their position on the nucleotide sequence, with the alternative nucleic acid listed; the last column indicates whether the SNP is known or not; the presence of known SNPs in variant protein HUMANK_P23 (SEQ ID NO:570) sequence provides support for the deduced sequence of this variant protein according to the present invention).

TABLE 15
Nucleic acid SNPs

| SNP position on | | |
|---|---|---|
| nucleotide sequence | Alternative nucleic acid | Previously known SNP? |
| 1603 | C -> T | No |
| 1969 | A -> G | No |
| 2005 | -> G | No |
| 2014 | C -> A | No |
| 2087 | T -> C | No |
| 2238 | C -> A | No |
| 2239 | A -> C | No |
| 2297 | G -> | No |
| 2297 | G -> T | No |
| 2318 | A -> C | No |
| 2500 | -> C | No |
| 2500 | -> T | No |
| 2700 | A -> | No |
| 2700 | A -> C | No |
| 2709 | A -> C | No |
| 2739 | A -> C | No |
| 2763 | A -> | No |
| 2763 | A -> C | No |
| 2857 | C -> T | No |
| 3272 | -> G | No |
| 3273 | -> C | No |
| 4085 | T -> A | Yes |
| 4142 | -> T | No |
| 4195 | G -> | No |
| 4570 | G -> T | Yes |
| 4979 | T -> | No |

[1684] Variant protein HUMANK_P27 (SEQ ID NO:571) according to the present invention has an amino acid sequence as given at the end of the application; it is encoded by transcript(s) HUMANK_T35 (SEQ ID NO:43). An alignment is given to the known protein (Ankyrin 1 (SEQ ID NO:628)) at the end of the application. One or more alignments to one or more previously published protein sequences are given at the end of the application. A brief description of the relationship of the variant protein according to the present invention to each such aligned protein is as follows:

[1685] Comparison Report Between HUMANK_P27 (SEQ ID NO:571) and AAH07930 (SEQ ID NO:631):

[1686] 1. An isolated chimeric polypeptide encoding for HUMANK_P27 (SEQ ID NO:571), comprising a first amino acid sequence being at least 90% homologous to MWTFVTQLLVTLVLLSFFLVSCQNVMHIVRGSLCFVLKHIHQELDKELGESEGLSDDEETISTRVVRRRVF LKGNEFQNIPGEQVTEEQFTDEQGNIVTKK corresponding to amino acids 1-101 of AAH07930 (SEQ ID NO:631), which also corresponds to amino acids 1-101 of HUMANK_P27 (SEQ ID NO:571), and a second amino acid sequence being at least 70%, optionally at least 80%, preferably at least 85%, more preferably at least 90% and most preferably at least 95% homologous to a polypeptide having the sequence VGAECSPLCWGEAGGLEAKRW (SEQ ID NO:1516) corresponding to amino acids 102-122 of HUMANK_P27 (SEQ ID NO:571), wherein said first amino acid sequence and second amino acid sequence are contiguous and in a sequential order.

[1687] 2. An isolated polypeptide encoding for a tail of HUMANK_P27 (SEQ ID NO:571), comprising a polypeptide being at least 70%, optionally at least about 80%, preferably at least about 85%, more preferably at least about 90% and most preferably at least about 95% homologous to the sequence VGAECSPLCWGEAGGLEAKRW (SEQ ID NO:1516) in HUMANK_P27 (SEQ ID NO:571).

[1688] Comparison Report Between HUMANK_P27 (SEQ ID NO:571) and Q8N604 (SEQ ID NO:630):

[1689] 1. An isolated chimeric polypeptide encoding for HUMANK_P27 (SEQ ID NO:571), comprising a first amino acid sequence being at least 90% homologous to MWTFVTQLLVTLVLLSFFLVSCQNVMHIVRGSLCFVLKHIHQELDKELGESE corresponding to amino acids 1-52 of Q8N604 (SEQ ID NO:630), which also corresponds to amino acids 1-52 of HUMANK_P27 (SEQ ID NO:571), a bridging amino acid G corresponding to amino acid 53 of HUMANK_P27 (SEQ ID NO:571), a second amino acid sequence being at least 90% homologous to LSDDEETISTRVVRRRVFLKGNEFQNIPGEQVTEEQFTDEQGNIVTKK corresponding to amino acids 54-101 of Q8N604 (SEQ ID NO:630), which also corresponds to amino acids 54-101 of HUMANK_P27 (SEQ ID NO:571), and a third amino acid sequence being at least 70%, optionally at least 80%, preferably at least 85%, more preferably at least 90% and most preferably at least 95% homologous to a polypeptide having the sequence VGAECSPLCWGEAGGLEAKRW (SEQ ID NO:1516) corresponding to amino acids 102-122 of HUMANK_P27 (SEQ ID NO:571), wherein said first amino acid sequence, bridging amino acid, second amino acid sequence and third amino acid sequence are contiguous and in a sequential order.

[1690] 2. An isolated polypeptide encoding for a tail of HUMANK_P27 (SEQ ID NO:571), comprising a polypeptide being at least 70%, optionally at least about 80%, preferably at least about 85%, more preferably at least about 90% and most preferably at least about 95% homologous to the sequence VGAECSPLCWGEAGGLEAKRW (SEQ ID NO:1516) in HUMANK_P27 (SEQ ID NO:571).

[1691] The location of the variant protein was determined according to results from a number of different software programs and analyses, including analyses from SignalP and other specialized programs. The variant protein is believed to be located as follows with regard to the cell: secreted. The protein localization is believed to be secreted because both signal-peptide prediction programs predict that this protein has a signal peptide, and neither trans-membrane region prediction program predicts that this protein has a trans-membrane region.

[1692] Variant protein HUMANK_P27 (SEQ ID NO:571) also has the following non-silent SNPs (Single Nucleotide Polymorphisms) as listed in Table 16, (given according to their position(s) on the amino acid sequence, with the alternative amino acid(s) listed; the last column indicates whether the SNP is known or not; the presence of known SNPs in variant protein HUMANK_P27 (SEQ ID NO:571) sequence provides support for the deduced sequence of this variant protein according to the present invention).

TABLE 16
Amino acid mutations

| SNP position(s) on | | |
|---|---|---|
| amino acid sequence | Alternative amino acid(s) | Previously known SNP? |
| 12 | L -> P | No |
| 63 | T -> P | No |
| 82 | G -> | No |
| 82 | G -> V | No |
| 89 | Q -> P | No |

[1693] Variant protein HUMANK_P27 (SEQ ID NO:571) is encoded by the following transcript(s): HUMANK_T35 (SEQ ID NO:43), for which the sequence(s) is/are given at the end of the application. The coding portion of transcript HUMANK_T35 (SEQ ID NO:43) is shown in bold; this coding portion starts at position 2053 and ends at position 2418. The transcript also has the following SNPs as listed in Table 17 (given according to their position on the nucleotide sequence, with the alternative nucleic acid listed; the last column indicates whether the SNP is known or not; the presence of known SNPs in variant protein HUMANK_P27 (SEQ ID NO:571) sequence provides support for the deduced sequence of this variant protein according to the present invention).

TABLE 17
Nucleic acid SNPs

| SNP position on | | |
|---|---|---|
| nucleotide sequence | Alternative nucleic acid | Previously known SNP? |
| 1603 | C -> T | No |
| 1969 | A -> G | No |
| 2005 | -> G | No |
| 2014 | C -> A | No |
| 2087 | T -> C | No |
| 2238 | C -> A | No |
| 2239 | A -> C | No |
| 2297 | G -> | No |
| 2297 | G -> T | No |
| 2318 | A -> C | No |

[1694] Variant protein HUMANK_P29 (SEQ ID NO:572) according to the present invention has an amino acid sequence as given at the end of the application; it is encoded by transcript(s) HUMANK_T3 (SEQ ID NO:36). An alignment is given to the known protein (Ankyrin 1 (SEQ ID NO:628)) at the end of the application. One or more alignments to one or more previously published protein sequences are given at the end of the application. A brief description of the relationship of the variant protein according to the present invention to each such aligned protein is as follows:

[1695] Comparison Report Between HUMANK_P29 (SEQ ID NO:572) and AAH07930 (SEQ ID NO:631):

[1696] 1. An isolated chimeric polypeptide encoding for HUMANK_P29 (SEQ ID NO:572), comprising a first amino acid sequence being at least 90% homologous to MWTFVTQLLVTLVLLSFFLVSCQNVMHIVRGSLCFVLKHIHQELDKELGESEGLSDDEETIS corresponding to amino acids 1-62 of AAH07930 (SEQ ID NO:631), which also corresponds to amino acids 1-62 of HUMANK_P29 (SEQ ID NO:572), a bridging amino acid P corresponding to amino acid 63 of HUMANK_P29 (SEQ ID NO:572), a second amino acid sequence being at least 90% homologous to RVVRRRVFLKGNEFQNIPGEQVTEEQFTDEQGNIVTKKIIRKVVRQIDLSSADAAQEHEE corresponding to amino acids 64-123 of AAH07930 (SEQ ID NO:631), which also corresponds to amino acids 64-123 of HUMANK_P29 (SEQ ID NO:572), and a third amino acid sequence being at least 70%, optionally at least 80%, preferably at least 85%, more preferably at least 90% and most preferably at least 95% homologous to a polypeptide having the sequence VELRGSGLQPDLIEGRKGAQIVKRASLKRGKQ (SEQ ID NO:1517) corresponding to amino acids 124-155 of HUMANK_P29 (SEQ ID NO:572), wherein said first amino acid sequence, bridging amino acid, second amino acid sequence and third amino acid sequence are contiguous and in a sequential order.

[1697] 2. An isolated polypeptide encoding for a tail of HUMANK_P29 (SEQ ID NO:572), comprising a polypeptide being at least 70%, optionally at least about 80%, preferably at least about 85%, more preferably at least about 90% and most preferably at least about 95% homologous to the sequence VELRGSGLQPDLIEGRKGAQIVKRASLKRGKQ (SEQ ID NO:1517) in HUMANK_P29 (SEQ ID NO:572).

[1698] Comparison Report Between HUMANK_P29 (SEQ ID NO:572) and Q8N604 (SEQ ID NO:630):

[1699] 1. An isolated chimeric polypeptide encoding for HUMANK_P29 (SEQ ID NO:572), comprising a first amino acid sequence being at least 90% homologous to MWTFVTQLLVTLVLLSFFLVSCQNVMHIVRGSLCFVLKHIHQELDKELGESE corresponding to amino acids 1-52 of Q8N604 (SEQ ID NO:630), which also corresponds to amino acids 1-52 of HUMANK_P29 (SEQ ID NO:572), a bridging amino acid G corresponding to amino acid 53 of HUMANK_P29 (SEQ ID NO:572), a second amino acid sequence being at least 90% homologous to LSDDEETIS corresponding to amino acids 54-62 of Q8N604 (SEQ ID NO:630), which also corresponds to amino acids 54-62 of HUMANK_P29 (SEQ ID NO:572), a bridging amino acid P corresponding to amino acid 63 of HUMANK_P29 (SEQ ID NO:572), and a third amino acid sequence being at least 90% homologous to RVVRRRVFLKGNEFQNIPGEQVTEEQFTDEQGNIVTKKIIRKVVRQIDLSSADAAQEHEEVELRGSGLQPDL IEGRKGAQIVKRASLKRGKQ corresponding to amino acids 64-155 of Q8N604 (SEQ ID NO:630), which also corresponds to amino acids 64-155 of HUMANK_P29 (SEQ ID NO:572), wherein said first amino acid sequence, bridging amino acid, second amino acid sequence, bridging amino acid and third amino acid sequence are contiguous and in a sequential order.

[1700] The location of the variant protein was determined according to results from a number of different software programs and analyses, including analyses from SignalP and other specialized programs. The variant protein is believed to be located as follows with regard to the cell: secreted. The protein localization is believed to be secreted because both signal-peptide prediction programs predict that this protein has a signal peptide, and neither trans-membrane region prediction program predicts that this protein has a trans-membrane region.

[1701] Variant protein HUMANK_P29 (SEQ ID NO:572) also has the following non-silent SNPs (Single Nucleotide Polymorphisms) as listed in Table 18, (given according to their position(s) on the amino acid sequence, with the alternative amino acid(s) listed; the last column indicates whether the SNP is known or not; the presence of known SNPs in variant protein HUMANK_P29 (SEQ ID NO:572) sequence provides support for the deduced sequence of this variant protein according to the present invention).

TABLE 18
Amino acid mutations

| SNP position(s) on | | |
|---|---|---|
| amino acid sequence | Alternative amino acid(s) | Previously known SNP? |
| 12 | L -> P | No |
| 63 | P -> T | No |
| 82 | G -> | No |
| 82 | G -> V | No |
| 89 | Q -> P | No |

[1702] Variant protein HUMANK_P29 (SEQ ID NO:572) is encoded by the following transcript(s): HUMANK_T3 (SEQ ID NO:36), for which the sequence(s) is/are given at the end of the application. The coding portion of transcript HUMANK_T3 (SEQ ID NO:36) is shown in bold; this coding portion starts at position 2053 and ends at position 2517. The transcript also has the following SNPs as listed in Table 19 (given according to their position on the nucleotide sequence, with the alternative nucleic acid listed; the last column indicates whether the SNP is known or not; the presence of known SNPs in variant protein HUMANK_P29 (SEQ ID NO:572) sequence provides support for the deduced sequence of this variant protein according to the present invention).

TABLE 19
Nucleic acid SNPs

| SNP position on | | |
|---|---|---|
| nucleotide sequence | Alternative nucleic acid | Previously known SNP? |
| 1603 | C -> T | No |
| 1969 | A -> G | No |
| 2005 | -> G | No |
| 2014 | C -> A | No |
| 2087 | T -> C | No |
| 2238 | C -> A | No |
| 2239 | A -> C | No |
| 2297 | G -> | No |
| 2297 | G -> T | No |
| 2318 | A -> C | No |
| 2593 | -> C | No |
| 2593 | -> T | No |
| 2793 | A -> | No |
| 2793 | A -> C | No |
| 2802 | A -> C | No |
| 2832 | A -> C | No |
| 2856 | A -> | No |
| 2856 | A -> C | No |
| 2950 | C -> T | No |
| 3242 | G -> T | Yes |
| 3244 | C -> A | Yes |
| 3245 | T -> A | Yes |
| 3246 | C -> T | Yes |
| 3379 | -> G | No |
| 3380 | -> C | No |
| 4192 | T -> A | Yes |
| 4249 | -> T | No |
| 4302 | G -> | No |
| 4677 | G -> T | Yes |
| 5086 | T -> | No |

[1703] Variant protein HUMANK_P33 (SEQ ID NO:573) according to the present invention has an amino acid sequence as given at the end of the application; it is encoded by transcript(s) HUMANK_T23 (SEQ ID NO:38). An alignment is given to the known protein (Ankyrin 1 (SEQ ID NO:628)) at the end of the application. One or more alignments to one or more previously published protein sequences are given at the end of the application. A brief description of the relationship of the variant protein according to the present invention to each such aligned protein is as follows:

[1704] Comparison Report Between HUMANK_P33 (SEQ ID NO:573) and AAH07930 (SEQ ID NO:631):

[1705] 1. An isolated chimeric polypeptide encoding for HUMANK_P33 (SEQ ID NO:573), comprising a first amino acid sequence being at least 90% homologous to MWTFVTQLLVTLVLLSFFLVSCQNVMHIVRGSLCFVLKHIHQELDKELGESEGLSDDEETIS corresponding to amino acids 1-62 of AAH07930 (SEQ ID NO:631), which also corresponds to amino acids 1-62 of HUMANK_P33 (SEQ ID NO:573), a bridging amino acid P corresponding to amino acid 63 of HUMANK_P33 (SEQ ID NO:573), a second amino acid sequence being at least 90% homologous to RVVRRRVFLKGNEFQNIPGEQVTEEQFTDEQGNIVTKK corresponding to amino acids 64-101 of AAH07930 (SEQ ID NO:631), which also corresponds to amino acids 64-101 of HUMANK_P33 (SEQ ID NO:573), and a third amino acid sequence being at least 70%, optionally at least 80%, preferably at least 85%, more preferably at least 90% and most preferably at least 95% homologous to a polypeptide having the sequence DHTSTPNP (SEQ ID NO:1518) corresponding to amino acids 102-109 of HUMANK_P33 (SEQ ID NO:573), wherein said first amino acid sequence, bridging amino acid, second amino acid sequence and third amino acid sequence are contiguous and in a sequential order.

[1706] 2. An isolated polypeptide encoding for a tail of HUMANK_P33 (SEQ ID NO:573), comprising a polypeptide being at least 70%, optionally at least about 80%, preferably at least about 85%, more preferably at least about 90% and most preferably at least about 95% homologous to the sequence DHTSTPNP (SEQ ID NO:1518) in HUMANK_P33 (SEQ ID NO:573).

[1707] Comparison Report Between HUMANK_P33 (SEQ ID NO:573) and Q8N604 (SEQ ID NO:630):

[1708] 1. An isolated chimeric polypeptide encoding for HUMANK_P33 (SEQ ID NO:573), comprising a first amino acid sequence being at least 90% homologous to MWTFVTQLLVTLVLLSFFLVSCQNVMHIVRGSLCFVLKHIHQELDKELGESE corresponding to amino acids 1-52 of Q8N604 (SEQ ID NO:630), which also corresponds to amino acids 1-52 of HUMANK_P33 (SEQ ID NO:573), a bridging amino acid G corresponding to amino acid 53 of HUMANK_P33 (SEQ ID NO:573), a second amino acid sequence being at least 90% homologous to LSDDEETIS corresponding to amino acids 54-62 of Q8N604 (SEQ ID NO:630), which also corresponds to amino acids 54-62 of HUMANK_P33 (SEQ ID NO:573), a bridging amino acid P corresponding to amino acid 63 of HUMANK_P33 (SEQ ID NO:573), a third amino acid sequence being at least 90% homologous to RVVRRRVFLKGNEFQNIPGEQVTEEQFTDEQGNIVTKK corresponding to amino acids 64-101 of Q8N604 (SEQ ID NO:630), which also corresponds to amino acids 64-101 of HUMANK_P33 (SEQ ID NO:573), and a fourth amino acid sequence being at least 70%, optionally at least 80%, preferably at least 85%, more preferably at least 90% and most preferably at least 95% homologous to a polypeptide having the sequence DHTSTPNP (SEQ ID NO:1518) corresponding to amino acids 102-109 of HUMANK_P33 (SEQ ID NO:573), wherein said first amino acid sequence, bridging amino acid, second amino acid sequence, bridging amino acid, third amino acid sequence and fourth amino acid sequence are contiguous and in a sequential order.

[1709] 2. An isolated polypeptide encoding for a tail of HUMANK_P33 (SEQ ID NO:573), comprising a polypeptide being at least 70%, optionally at least about 80%, preferably at least about 85%, more preferably at least about 90% and most preferably at least about 95% homologous to the sequence DHTSTPNP (SEQ ID NO:1518) in HUMANK_P33 (SEQ ID NO:573).

[1710] The location of the variant protein was determined according to results from a number of different software programs and analyses, including analyses from SignalP and other specialized programs. The variant protein is believed to be located as follows with regard to the cell: secreted. The protein localization is believed to be secreted because both signal-peptide prediction programs predict that this protein has a signal peptide, and neither trans-membrane region prediction program predicts that this protein has a trans-membrane region.

[1711] Variant protein HUMANK_P33 (SEQ ID NO:573) also has the following non-silent SNPs (Single Nucleotide Polymorphisms) as listed in Table 20, (given according to their position(s) on the amino acid sequence, with the alternative amino acid(s) listed; the last column indicates whether the SNP is known or not; the presence of known SNPs in variant protein HUMANK_P33 (SEQ ID NO:573) sequence provides support for the deduced sequence of this variant protein according to the present invention).

TABLE 20
Amino acid mutations

| SNP position(s) on | | |
|---|---|---|
| amino acid sequence | Alternative amino acid(s) | Previously known SNP? |
| 12 | L -> P | No |
| 63 | P -> T | No |
| 82 | G -> | No |
| 82 | G -> V | No |
| 89 | Q -> P | No |

[1712] Variant protein HUMANK_P33 (SEQ ID NO:573) is encoded by the following transcript(s): HUMANK_T23 (SEQ ID NO:38), for which the sequence(s) is/are given at the end of the application. The coding portion of transcript HUMANK_T23 (SEQ ID NO:38) is shown in bold; this coding portion starts at position 2053 and ends at position 2379. The transcript also has the following SNPs as listed in Table 21 (given according to their position on the nucleotide sequence, with the alternative nucleic acid listed; the last column indicates whether the SNP is known or not; the presence of known SNPs in variant protein HUMANK_P33 (SEQ ID NO:573) sequence provides support for the deduced sequence of this variant protein according to the present invention).

TABLE 21
Nucleic acid SNPs

| SNP position on | | |
|---|---|---|
| nucleotide sequence | Alternative nucleic acid | Previously known SNP? |
| 1603 | C -> T | No |
| 1969 | A -> G | No |
| 2005 | -> G | No |
| 2014 | C -> A | No |
| 2087 | T -> C | No |
| 2238 | C -> A | No |
| 2239 | A -> C | No |
| 2297 | G -> | No |
| 2297 | G -> T | No |
| 2318 | A -> C | No |
| 2392 | -> C | No |
| 2392 | -> T | No |
| 2592 | A -> | No |
| 2592 | A -> C | No |
| 2601 | A -> C | No |
| 2631 | A -> C | No |
| 2655 | A -> | No |
| 2655 | A -> C | No |
| 2749 | C -> T | No |
| 3164 | -> G | No |
| 3165 | -> C | No |
| 3977 | T -> A | Yes |
| 4034 | -> T | No |
| 4087 | G -> | No |
| 4462 | G -> T | Yes |
| 4871 | T -> | No |

[1713] Variant protein HUMANK_P34 (SEQ ID NO:574) according to the present invention has an amino acid sequence as given at the end of the application; it is encoded by transcript(s) HUMANK_T24 (SEQ ID NO:39). An alignment is given to the known protein (Ankyrin 1 (SEQ ID NO:628)) at the end of the application. One or more alignments to one or more previously published protein sequences are given at the end of the application. A brief description of the relationship of the variant protein according to the present invention to each such aligned protein is as follows:

[1714] Comparison Report Between HUMANK_P34 (SEQ ID NO:574) and AAH07930 (SEQ ID NO:631):

[1715] 1. An isolated chimeric polypeptide encoding for HUMANK_P34 (SEQ ID NO:574), comprising a first amino acid sequence being at least 90% homologous to MWTFVTQLLVTLVLLSFFLVSCQNVMHIVRGSLCFVLKHIHQELDKELGESEGLSDDEETIS corresponding to amino acids 1-62 of AAH07930 (SEQ ID NO:631), which also corresponds to amino acids 1-62 of HUMANK_P34 (SEQ ID NO:574), a bridging amino acid P corresponding to amino acid 63 of HUMANK_P34 (SEQ ID NO:574), a second amino acid sequence being at least 90% homologous to RVVRRRVFLKGNEFQNIPGEQVTEEQFTDEQGNIVTKK corresponding to amino acids 64-101 of AAH07930 (SEQ ID NO:631), which also corresponds to amino acids 64-101 of HUMANK_P34 (SEQ ID NO:574), and a third amino acid sequence being at least 70%, optionally at least 80%, preferably at least 85%, more preferably at least 90% and most preferably at least 95% homologous to a polypeptide having the sequence VELRGSGLQPDLIEGRKGAQIVKRASLKRGKQ (SEQ ID NO:1517) corresponding to amino acids 102-133 of HUMANK_P34 (SEQ ID NO:574), wherein said first amino acid sequence, bridging amino acid, second amino acid sequence and third amino acid sequence are contiguous and in a sequential order.

[1716] 2. An isolated polypeptide encoding for a tail of HUMANK_P34 (SEQ ID NO:574), comprising a polypeptide being at least 70%, optionally at least about 80%, preferably at least about 85%, more preferably at least about 90% and most preferably at least about 95% homologous to the sequence VELRGSGLQPDLIEGRKGAQIVKRASLKRGKQ (SEQ ID NO:1517) in HUMANK_P34 (SEQ ID NO:574).

[1717] Comparison Report Between HUMANK_P34 (SEQ ID NO:574) and Q8N604 (SEQ ID NO:630):

[1718] 1. An isolated chimeric polypeptide encoding for HUMANK_P34 (SEQ ID NO:574), comprising a first amino acid sequence being at least 90% homologous to MWTFVTQLLVTLVLLSFFLVSCQNVMHIVRGSLCFVLKHIHQELDKELGESE corresponding to amino acids 1-52 of Q8N604 (SEQ ID NO:630), which also corresponds to amino acids 1-52 of HUMANK_P34 (SEQ ID NO:574), a bridging amino acid G corresponding to amino acid 53 of HUMANK_P34 (SEQ ID NO:574), a second amino acid sequence being at least 90% homologous to LSDDEETIS corresponding to amino acids 54-62 of Q8N604 (SEQ ID NO:630), which also corresponds to amino acids 54-62 of HUMANK_P34 (SEQ ID NO:574), a bridging amino acid P corresponding to amino acid 63 of HUMANK_P34 (SEQ ID NO:574), a third amino acid sequence being at least 90% homologous to RVVRRRVFLKGNEFQNIPGEQVTEEQFTDEQGNIVTKK corresponding to amino acids 64-101 of Q8N604 (SEQ ID NO:630), which also corresponds to amino acids 64-101 of HUMANK_P34 (SEQ ID NO:574), and a fourth amino acid sequence being at least 90% homologous to VELRGSGLQPDLIEGRKGAQIVKRASLKRGKQ (SEQ ID NO:1517) corresponding to amino acids 124-155 of Q8N604 (SEQ ID NO:630), which also corresponds to amino acids 102-133 of HUMANK_P34 (SEQ ID NO:574), wherein said first amino acid sequence, bridging amino acid, second amino acid sequence, bridging amino acid, third amino acid sequence and fourth amino acid sequence are contiguous and in a sequential order.

[1719] 2. An isolated chimeric polypeptide encoding for an edge portion of HUMANK_P34 (SEQ ID NO:574), comprising a polypeptide having a length “n”, wherein n is at least about 10 amino acids in length, optionally at least about 20 amino acids in length, preferably at least about 30 amino acids in length, more preferably at least about 40 amino acids in length and most preferably at least about 50 amino acids in length, wherein at least two amino acids comprise KV, having a structure as follows: a sequence starting from any of amino acid numbers 101−x to 101; and ending at any of amino acid numbers 102+((n−2)−x), in which x varies from 0 to n−2.

[1720] The location of the variant protein was determined according to results from a number of different software programs and analyses, including analyses from SignalP and other specialized programs. The variant protein is believed to be located as follows with regard to the cell: secreted. The protein localization is believed to be secreted because both signal-peptide prediction programs predict that this protein has a signal peptide, and neither trans-membrane region prediction program predicts that this protein has a trans-membrane region.

[1721] Variant protein HUMANK_P34 (SEQ ID NO:574) also has the following non-silent SNPs (Single Nucleotide Polymorphisms) as listed in Table 22, (given according to their position(s) on the amino acid sequence, with the alternative amino acid(s) listed; the last column indicates whether the SNP is known or not; the presence of known SNPs in variant protein HUMANK_P34 (SEQ ID NO:574) sequence provides support for the deduced sequence of this variant protein according to the present invention).

TABLE 22
Amino acid mutations

| SNP position(s) on | | |
|---|---|---|
| amino acid sequence | Alternative amino acid(s) | Previously known SNP? |
| 12 | L -> P | No |
| 63 | P -> T | No |
| 82 | G -> | No |
| 82 | G -> V | No |
| 89 | Q -> P | No |

[1722] Variant protein HUMANK_P34 (SEQ ID NO:574) is encoded by the following transcript(s): HUMANK_T24 (SEQ ID NO:39), for which the sequence(s) is/are given at the end of the application. The coding portion of transcript HUMANK_T24 (SEQ ID NO:39) is shown in bold; this coding portion starts at position 2053 and ends at position 2451. The transcript also has the following SNPs as listed in Table 23 (given according to their position on the nucleotide sequence, with the alternative nucleic acid listed; the last column indicates whether the SNP is known or not; the presence of known SNPs in variant protein HUMANK_P34 (SEQ ID NO:574) sequence provides support for the deduced sequence of this variant protein according to the present invention).

TABLE 23
Nucleic acid SNPs

| SNP position on | | |
|---|---|---|
| nucleotide sequence | Alternative nucleic acid | Previously known SNP? |
| 1603 | C -> T | No |
| 1969 | A -> G | No |
| 2005 | -> G | No |
| 2014 | C -> A | No |
| 2087 | T -> C | No |
| 2238 | C -> A | No |
| 2239 | A -> C | No |
| 2297 | G -> | No |
| 2297 | G -> T | No |
| 2318 | A -> C | No |
| 2527 | -> C | No |
| 2527 | -> T | No |
| 2727 | A -> | No |
| 2727 | A -> C | No |
| 2736 | A -> C | No |
| 2766 | A -> C | No |
| 2790 | A -> | No |
| 2790 | A -> C | No |
| 2884 | C -> T | No |
| 3299 | -> G | No |
| 3300 | -> C | No |
| 4112 | T -> A | Yes |
| 4169 | -> T | No |
| 4222 | G -> | No |
| 4597 | G -> T | Yes |
| 5006 | T -> | No |

[1723] As noted above, cluster HUMANK features 22 segment(s), which were listed in Table 2 above and for which the sequence(s) are given at the end of the application. These segment(s) are portions of nucleic acid sequence(s) which are described herein separately because they are of particular interest. A description of each segment according to the present invention is now provided.

[1724] Segment cluster HUMANK_node_{—}91 (SEQ ID NO:285) according to the present invention is supported by 8 libraries. The number of libraries was determined as previously described. This segment can be found in the following transcript(s): HUMANK_T3 (SEQ ID NO:36), HUMANK_T13 (SEQ ID NO:37), HUMANK_T23 (SEQ ID NO:38), HUMANK_T24 (SEQ ID NO:39), HUMANK_T26 (SEQ ID NO:40), HUMANK_T27 (SEQ ID NO:41), HUMANK_T28 (SEQ ID NO:42) and HUMANK_T35 (SEQ ID NO:43). Table 24 below describes the starting and ending position of this segment on each transcript.

TABLE 24
Segment location on transcripts

| | Segment | Segment |
|---|---|---|
| Transcript name | starting position | ending position |
| HUMANK_T3 (SEQ ID NO: 36) | 1 | 1543 |
| HUMANK_T13 (SEQ ID NO: 37) | 1 | 1543 |
| HUMANK_T23 (SEQ ID NO: 38) | 1 | 1543 |
| HUMANK_T24 (SEQ ID NO: 39) | 1 | 1543 |
| HUMANK_T26 (SEQ ID NO: 40) | 1 | 1543 |
| HUMANK_T27 (SEQ ID NO: 41) | 1 | 1543 |
| HUMANK_T28 (SEQ ID NO: 42) | 1 | 1543 |
| HUMANK_T35 (SEQ ID NO: 43) | 1 | 1543 |

[1725] Segment cluster HUMANK_node_{—}92 (SEQ ID NO:286) according to the present invention is supported by 19 libraries. The number of libraries was determined as previously described. This segment can be found in the following transcript(s): HUMANK_T3 (SEQ ID NO:36), HUMANK_T13 (SEQ ID NO:37), HUMANK_T23 (SEQ ID NO:38), HUMANK_T24 (SEQ ID NO:39), HUMANK_T26 (SEQ ID NO:40), HUMANK_T27 (SEQ ID NO:41), HUMANK_T28 (SEQ ID NO:42) and HUMANK_T35 (SEQ ID NO:43). Table 25 below describes the starting and ending position of this segment on each transcript.

TABLE 25
Segment location on transcripts

| | Segment | Segment |
|---|---|---|
| Transcript name | starting position | ending position |
| HUMANK_T3 (SEQ ID NO: 36) | 1544 | 1928 |
| HUMANK_T13 (SEQ ID NO: 37) | 1544 | 1928 |
| HUMANK_T23 (SEQ ID NO: 38) | 1544 | 1928 |
| HUMANK_T24 (SEQ ID NO: 39) | 1544 | 1928 |
| HUMANK_T26 (SEQ ID NO: 40) | 1544 | 1928 |
| HUMANK_T27 (SEQ ID NO: 41) | 1544 | 1928 |
| HUMANK_T28 (SEQ ID NO: 42) | 1544 | 1928 |
| HUMANK_T35 (SEQ ID NO: 43) | 1544 | 1928 |

[1726] Segment cluster HUMANK_node_{—}93 (SEQ ID NO:287) according to the present invention is supported by 31 libraries. The number of libraries was determined as previously described. This segment can be found in the following transcript(s): HUMANK_T3 (SEQ ID NO:36), HUMANK_T13 (SEQ ID NO:37), HUMANK_T23 (SEQ ID NO:38), HUMANK_T24 (SEQ ID NO:39), HUMANK_T26 (SEQ ID NO:40), HUMANK_T27 (SEQ ID NO:41), HUMANK_T28 (SEQ ID NO:42) and HUMANK_T35 (SEQ ID NO:43). Table 26 below describes the starting and ending position of this segment on each transcript.

TABLE 26
Segment location on transcripts

| | Segment | Segment |
|---|---|---|
| Transcript name | starting position | ending position |
| HUMANK_T3 (SEQ ID NO: 36) | 1929 | 2178 |
| HUMANK_T13 (SEQ ID NO: 37) | 1929 | 2178 |
| HUMANK_T23 (SEQ ID NO: 38) | 1929 | 2178 |
| HUMANK_T24 (SEQ ID NO: 39) | 1929 | 2178 |
| HUMANK_T26 (SEQ ID NO: 40) | 1929 | 2178 |
| HUMANK_T27 (SEQ ID NO: 41) | 1929 | 2178 |
| HUMANK_T28 (SEQ ID NO: 42) | 1929 | 2178 |
| HUMANK_T35 (SEQ ID NO: 43) | 1929 | 2178 |

[1727] Segment cluster HUMANK_node_{—}100 (SEQ ID NO:288) according to the present invention is supported by 1 libraries. The number of libraries was determined as previously described. This segment can be found in the following transcript(s): HUMANK_T35 (SEQ ID NO:43). Table 27 below describes the starting and ending position of this segment on each transcript.

TABLE 27
Segment location on transcripts

| | Segment | Segment |
|---|---|---|
| Transcript name | starting position | ending position |
| HUMANK_T35 (SEQ ID NO: 43) | 2356 | 2490 |

[1728] Segment cluster HUMANK_node_{—}108 (SEQ ID NO:289) according to the present invention is supported by 33 libraries. The number of libraries was determined as previously described. This segment can be found in the following transcript(s): HUMANK_T3 (SEQ ID NO:36), HUMANK_T24 (SEQ ID NO:39), HUMANK_T26 (SEQ ID NO:40) and HUMANK_T27 (SEQ ID NO:41). Table 28 below describes the starting and ending position of this segment on each transcript.

TABLE 28
Segment location on transcripts

| | Segment | Segment |
|---|---|---|
| Transcript name | starting position | ending position |
| HUMANK_T3 (SEQ ID NO: 36) | 2422 | 2556 |
| HUMANK_T24 (SEQ ID NO: 39) | 2356 | 2490 |
| HUMANK_T26 (SEQ ID NO: 40) | 2464 | 2598 |
| HUMANK_T27 (SEQ ID NO: 41) | 2497 | 2631 |

[1729] Segment cluster HUMANK_node_{—}113 (SEQ ID NO:290) according to the present invention is supported by 56 libraries. The number of libraries was determined as previously described. This segment can be found in the following transcript(s): HUMANK_T3 (SEQ ID NO:36), HUMANK_T13 (SEQ ID NO:37), HUMANK_T23 (SEQ ID NO:38), HUMANK_T24 (SEQ ID NO:39), HUMANK_T26 (SEQ ID NO:40), HUMANK_T27 (SEQ ID NO:41) and HUMANK_T28 (SEQ ID NO:42). Table 29 below describes the starting and ending position of this segment on each transcript.

TABLE 29
Segment location on transcripts

| | Segment | Segment |
|---|---|---|
| Transcript name | starting position | ending position |
| HUMANK_T3 (SEQ ID NO: 36) | 2596 | 2735 |
| HUMANK_T13 (SEQ ID NO: 37) | 2536 | 2675 |
| HUMANK_T23 (SEQ ID NO: 38) | 2395 | 2534 |
| HUMANK_T24 (SEQ ID NO: 39) | 2530 | 2669 |
| HUMANK_T26 (SEQ ID NO: 40) | 2638 | 2777 |
| HUMANK_T27 (SEQ ID NO: 41) | 2671 | 2810 |
| HUMANK_T28 (SEQ ID NO: 42) | 2503 | 2642 |

[1730] Segment cluster HUMANK_node_{—}115 (SEQ ID NO:291) according to the present invention is supported by 63 libraries. The number of libraries was determined as previously described. This segment can be found in the following transcript(s): HUMANK_T3 (SEQ ID NO:36), HUMANK_T13 (SEQ ID NO:37), HUMANK_T23 (SEQ ID NO:38), HUMANK_T24 (SEQ ID NO:39), HUMANK_T26 (SEQ ID NO:40), HUMANK_T27 (SEQ ID NO:41) and HUMANK T28 (SEQ ID NO:42). Table 30 below describes the starting and ending position of this segment on each transcript.

TABLE 30
Segment location on transcripts

| | Segment | Segment |
|---|---|---|
| Transcript name | starting position | ending position |
| HUMANK_T3 (SEQ ID NO: 36) | 2821 | 3234 |
| HUMANK_T13 (SEQ ID NO: 37) | 2761 | 3174 |
| HUMANK_T23 (SEQ ID NO: 38) | 2620 | 3033 |
| HUMANK_T24 (SEQ ID NO: 39) | 2755 | 3168 |
| HUMANK_T26 (SEQ ID NO: 40) | 2863 | 3276 |
| HUMANK_T27 (SEQ ID NO: 41) | 2896 | 3309 |
| HUMANK_T28 (SEQ ID NO: 42) | 2728 | 3141 |

[1731] Segment cluster HUMANK_node_{—}117 (SEQ ID NO:292) according to the present invention is supported by 28 libraries. The number of libraries was determined as previously described. This segment can be found in the following transcript(s): HUMANK_T3 (SEQ ID NO:36), HUMANK_T13 (SEQ ID NO:37), HUMANK_T23 (SEQ ID NO:38), HUMANK_T24 (SEQ ID NO:39), HUMANK_T26 (SEQ ID NO:40), HUMANK_T27 (SEQ ID NO:41) and HUMANK_T28 (SEQ ID NO:42). Table 31 below describes the starting and ending position of this segment on each transcript.

TABLE 31
Segment location on transcripts

| | Segment | Segment |
|---|---|---|
| Transcript name | starting position | ending position |
| HUMANK_T3 (SEQ ID NO: 36) | 3249 | 4438 |
| HUMANK_T13 (SEQ ID NO: 37) | 3175 | 4364 |
| HUMANK_T23 (SEQ ID NO: 38) | 3034 | 4223 |
| HUMANK_T24 (SEQ ID NO: 39) | 3169 | 4358 |
| HUMANK_T26 (SEQ ID NO: 40) | 3277 | 4466 |
| HUMANK_T27 (SEQ ID NO: 41) | 3310 | 4499 |
| HUMANK_T28 (SEQ ID NO: 42) | 3142 | 4331 |

[1732] Segment cluster HUMANK_node_{—}119 (SEQ ID NO:293) according to the present invention is supported by 10 libraries. The number of libraries was determined as previously described. This segment can be found in the following transcript(s): HUMANK_T3 (SEQ ID NO:36), HUMANK_T13 (SEQ ID NO:37), HUMANK_T23 (SEQ ID NO:38), HUMANK_T24 (SEQ ID NO:39), HUMANK_T26 (SEQ ID NO:40), HUMANK_T27 (SEQ ID NO:41) and HUMANK_T28 (SEQ ID NO:42). Table 32 below describes the starting and ending position of this segment on each transcript.

TABLE 32
Segment location on transcripts

| | Segment | Segment |
|---|---|---|
| Transcript name | starting position | ending position |
| HUMANK_T3 (SEQ ID NO: 36) | 4439 | 4797 |
| HUMANK_T13 (SEQ ID NO: 37) | 4365 | 4723 |
| HUMANK_T23 (SEQ ID NO: 38) | 4224 | 4582 |
| HUMANK_T24 (SEQ ID NO: 39) | 4359 | 4717 |
| HUMANK_T26 (SEQ ID NO: 40) | 4467 | 4825 |
| HUMANK_T27 (SEQ ID NO: 41) | 4500 | 4858 |
| HUMANK_T28 (SEQ ID NO: 42) | 4332 | 4690 |

[1733] Segment cluster HUMANK_node_{—}120 (SEQ ID NO:294) according to the present invention is supported by 13 libraries. The number of libraries was determined as previously described. This segment can be found in the following transcript(s): HUMANK_T3 (SEQ ID NO:36), HUMANK_T13 (SEQ ID NO:37), HUMANK_T23 (SEQ ID NO:38), HUMANK_T24 (SEQ ID NO:39), HUMANK_T26 (SEQ ID NO:40), HUMANK_T27 (SEQ ID NO:41) and HUMANK_T28 (SEQ ID NO:42). Table 33 below describes the starting and ending position of this segment on each transcript.

TABLE 33
Segment location on transcripts

| | Segment | Segment |
|---|---|---|
| Transcript name | starting position | ending position |
| HUMANK_T3 (SEQ ID NO: 36) | 4798 | 5100 |
| HUMANK_T13 (SEQ ID NO: 37) | 4724 | 5026 |
| HUMANK_T23 (SEQ ID NO: 38) | 4583 | 4885 |
| HUMANK_T24 (SEQ ID NO: 39) | 4718 | 5020 |
| HUMANK_T26 (SEQ ID NO: 40) | 4826 | 5128 |
| HUMANK_T27 (SEQ ID NO: 41) | 4859 | 5161 |
| HUMANK_T28 (SEQ ID NO: 42) | 4691 | 4993 |

[1734] According to an optional embodiment of the present invention, short segments related to the above cluster are also provided. These segments are up to about 120 bp in length, and so are included in a separate description.

[1735] Segment cluster HUMANK_node_{—}94 (SEQ ID NO:295) according to the present invention is supported by 28 libraries. The number of libraries was determined as previously described. This segment can be found in the following transcript(s): HUMANK_T3 (SEQ ID NO:36), HUMANK_T13 (SEQ ID NO:37), HUMANK_T23 (SEQ ID NO:38), HUMANK_T24 (SEQ ID NO:39), HUMANK_T26 (SEQ ID NO:40), HUMANK_T27 (SEQ ID NO:41), HUMANK_T28 (SEQ ID NO:42) and HUMANK_T35 (SEQ ID NO:43). Table 34 below describes the starting and ending position of this segment on each transcript.

TABLE 34
Segment location on transcripts

| | Segment | Segment |
|---|---|---|
| Transcript name | starting position | ending position |
| HUMANK_T3 (SEQ ID NO: 36) | 2179 | 2240 |
| HUMANK_T13 (SEQ ID NO: 37) | 2179 | 2240 |
| HUMANK_T23 (SEQ ID NO: 38) | 2179 | 2240 |
| HUMANK_T24 (SEQ ID NO: 39) | 2179 | 2240 |
| HUMANK_T26 (SEQ ID NO: 40) | 2179 | 2240 |
| HUMANK_T27 (SEQ ID NO: 41) | 2179 | 2240 |
| HUMANK_T28 (SEQ ID NO: 42) | 2179 | 2240 |
| HUMANK_T35 (SEQ ID NO: 43) | 2179 | 2240 |

[1736] Segment cluster HUMANK_node_{—}95 (SEQ ID NO:296) according to the present invention is supported by 28 libraries. The number of libraries was determined as previously described. This segment can be found in the following transcript(s): HUMANK_T3 (SEQ ID NO:36), HUMANK_T13 (SEQ ID NO:37), HUMANK_T23 (SEQ ID NO:38), HUMANK_T24 (SEQ ID NO:39), HUMANK_T26 (SEQ ID NO:40), HUMANK_T27 (SEQ ID NO:41), HUMANK_T28 (SEQ ID NO:42) and HUMANK_T35 (SEQ ID NO:43). Table 35 below describes the starting and ending position of this segment on each transcript.

TABLE 35
Segment location on transcripts

| | Segment | Segment |
|---|---|---|
| Transcript name | starting position | ending position |
| HUMANK_T3 (SEQ ID NO: 36) | 2241 | 2271 |
| HUMANK_T13 (SEQ ID NO: 37) | 2241 | 2271 |
| HUMANK_T23 (SEQ ID NO: 38) | 2241 | 2271 |
| HUMANK_T24 (SEQ ID NO: 39) | 2241 | 2271 |
| HUMANK_T26 (SEQ ID NO: 40) | 2241 | 2271 |
| HUMANK_T27 (SEQ ID NO: 41) | 2241 | 2271 |
| HUMANK_T28 (SEQ ID NO: 42) | 2241 | 2271 |
| HUMANK_T35 (SEQ ID NO: 43) | 2241 | 2271 |

[1737] Segment cluster HUMANK_node_{—}98 (SEQ ID NO:297) according to the present invention is supported by 53 libraries. The number of libraries was determined as previously described. This segment can be found in the following transcript(s): HUMANK_T3 (SEQ ID NO:36), HUMANK_T13 (SEQ ID NO:37), HUMANK_T23 (SEQ ID NO:38), HUMANK_T24 (SEQ ID NO:39), HUMANK_T26 (SEQ ID NO:40), HUMANK_T27 (SEQ ID NO:41), HUMANK_T28 (SEQ ID NO:42) and HUMANK_T35 (SEQ ID NO:43). Table 36 below describes the starting and ending position of this segment on each transcript.

TABLE 36
Segment location on transcripts

| | Segment | Segment |
|---|---|---|
| Transcript name | starting position | ending position |
| HUMANK_T3 (SEQ ID NO: 36) | 2272 | 2348 |
| HUMANK_T13 (SEQ ID NO: 37) | 2272 | 2348 |
| HUMANK_T23 (SEQ ID NO: 38) | 2272 | 2348 |
| HUMANK_T24 (SEQ ID NO: 39) | 2272 | 2348 |
| HUMANK_T26 (SEQ ID NO: 40) | 2272 | 2348 |
| HUMANK_T27 (SEQ ID NO: 41) | 2272 | 2348 |
| HUMANK_T28 (SEQ ID NO: 42) | 2272 | 2348 |
| HUMANK_T35 (SEQ ID NO: 43) | 2272 | 2348 |

[1738] Segment cluster HUMANK_node_{—}99 (SEQ ID NO:298) according to the present invention can be found in the following transcript(s): HUMANK_T3 (SEQ ID NO:36), HUMANK_T13 (SEQ ID NO:37), HUMANK_T23 (SEQ ID NO:38), HUMANK_T24 (SEQ ID NO:39), HUMANK_T26 (SEQ ID NO:40), HUMANK_T27 (SEQ ID NO:41), HUMANK_T28 (SEQ ID NO:42) and HUMANK_T35 (SEQ ID NO:43). Table 37 below describes the starting and ending position of this segment on each transcript.

TABLE 37
Segment location on transcripts

| | Segment | Segment |
|---|---|---|
| Transcript name | starting position | ending position |
| HUMANK_T3 (SEQ ID NO: 36) | 2349 | 2355 |
| HUMANK_T13 (SEQ ID NO: 37) | 2349 | 2355 |
| HUMANK_T23 (SEQ ID NO: 38) | 2349 | 2355 |
| HUMANK_T24 (SEQ ID NO: 39) | 2349 | 2355 |
| HUMANK_T26 (SEQ ID NO: 40) | 2349 | 2355 |
| HUMANK_T27 (SEQ ID NO: 41) | 2349 | 2355 |
| HUMANK_T28 (SEQ ID NO: 42) | 2349 | 2355 |
| HUMANK_T35 (SEQ ID NO: 43) | 2349 | 2355 |

[1739] Segment cluster HUMANK_node_{—}102 (SEQ ID NO:299) according to the present invention is supported by 57 libraries. The number of libraries was determined as previously described. This segment can be found in the following transcript(s): HUMANK_T3 (SEQ ID NO:36), HUMANK_T13 (SEQ ID NO:37), HUMANK_T26 (SEQ ID NO:40), HUMANK_T27 (SEQ ID NO:41) and HUMANK_T28 (SEQ ID NO:42). Table 38 below describes the starting and ending position of this segment on each transcript.

TABLE 38
Segment location on transcripts

| | Segment | Segment |
|---|---|---|
| Transcript name | starting position | ending position |
| HUMANK_T3 (SEQ ID NO: 36) | 2356 | 2387 |
| HUMANK_T13 (SEQ ID NO: 37) | 2356 | 2387 |
| HUMANK_T26 (SEQ ID NO: 40) | 2356 | 2387 |
| HUMANK_T27 (SEQ ID NO: 41) | 2356 | 2387 |
| HUMANK_T28 (SEQ ID NO: 42) | 2356 | 2387 |

[1740] Segment cluster HUMANK_node_{—}103 (SEQ ID NO:300) according to the present invention can be found in the following transcript(s): HUMANK_T3 (SEQ ID NO:36), HUMANK_T13 (SEQ ID NO:37), HUMANK_T26 (SEQ ID NO:40), HUMANK_T27 (SEQ ID NO:41) and HUMANK_T28 (SEQ ID NO:42). Table 39 below describes the starting and ending position of this segment on each transcript.

TABLE 39
Segment location on transcripts

| | Segment | Segment |
|---|---|---|
| Transcript name | starting position | ending position |
| HUMANK_T3 (SEQ ID NO: 36) | 2388 | 2409 |
| HUMANK_T13 (SEQ ID NO: 37) | 2388 | 2409 |
| HUMANK_T26 (SEQ ID NO: 40) | 2388 | 2409 |
| HUMANK_T27 (SEQ ID NO: 41) | 2388 | 2409 |
| HUMANK_T28 (SEQ ID NO: 42) | 2388 | 2409 |

[1741] Segment cluster HUMANK_node_{—}104 (SEQ ID NO:301) according to the present invention can be found in the following transcript(s): HUMANK_T3 (SEQ ID NO:36), HUMANK_T13 (SEQ ID NO:37), HUMANK_T26 (SEQ ID NO:40), HUMANK_T27 (SEQ ID NO:41) and HUMANK_T28 (SEQ ID NO:42). Table 40 below describes the starting and ending position of this segment on each transcript.

TABLE 40
Segment location on transcripts

| | Segment | Segment |
|---|---|---|
| Transcript name | starting position | ending position |
| HUMANK_T3 (SEQ ID NO: 36) | 2410 | 2421 |
| HUMANK_T13 (SEQ ID NO: 37) | 2410 | 2421 |
| HUMANK_T26 (SEQ ID NO: 40) | 2410 | 2421 |
| HUMANK_T27 (SEQ ID NO: 41) | 2410 | 2421 |
| HUMANK_T28 (SEQ ID NO: 42) | 2410 | 2421 |

[1742] Segment cluster HUMANK_node_{—}105 (SEQ ID NO:302) according to the present invention is supported by 33 libraries. The number of libraries was determined as previously described. This segment can be found in the following transcript(s): HUMANK_T13 (SEQ ID NO:37), HUMANK_T26 (SEQ ID NO:40), HUMANK_T27 (SEQ ID NO:41) and HUMANK_T28 (SEQ ID NO:42). Table 41 below describes the starting and ending position of this segment on each transcript.

TABLE 41
Segment location on transcripts

| | Segment | Segment |
|---|---|---|
| Transcript name | starting position | ending position |
| HUMANK_T13 (SEQ ID NO: 37) | 2422 | 2463 |
| HUMANK_T26 (SEQ ID NO: 40) | 2422 | 2463 |
| HUMANK_T27 (SEQ ID NO: 41) | 2422 | 2463 |
| HUMANK_T28 (SEQ ID NO: 42) | 2422 | 2463 |

[1743] Segment cluster HUMANK_node_{—}106 (SEQ ID NO:303) according to the present invention is supported by 31 libraries. The number of libraries was determined as previously described. This segment can be found in the following transcript(s): HUMANK_T13 (SEQ ID NO:37) and HUMANK_T27 (SEQ ID NO:41). Table 42 below describes the starting and ending position of this segment on each transcript.

TABLE 42
Segment location on transcripts

| | Segment | Segment |
|---|---|---|
| Transcript name | starting position | ending position |
| HUMANK_T13 (SEQ ID NO: 37) | 2464 | 2496 |
| HUMANK_T27 (SEQ ID NO: 41) | 2464 | 2496 |

[1744] Segment cluster HUMANK_node_{—}112 (SEQ ID NO:304) according to the present invention is supported by 56 libraries. The number of libraries was determined as previously described. This segment can be found in the following transcript(s): HUMANK_T3 (SEQ ID NO:36), HUMANK_T13 (SEQ ID NO:37), HUMANK_T23 (SEQ ID NO:38), HUMANK T24 (SEQ ID NO:39), HUMANK T26 (SEQ ID NO:40), HUMANK_T27 (SEQ ID NO:41) and HUMANK_T28 (SEQ ID NO:42). Table 43 below describes the starting and ending position of this segment on each transcript.

TABLE 43
Segment location on transcripts

| | Segment | Segment |
|---|---|---|
| Transcript name | starting position | ending position |
| HUMANK_T3 (SEQ ID NO: 36) | 2557 | 2595 |
| HUMANK_T13 (SEQ ID NO: 37) | 2497 | 2535 |
| HUMANK_T23 (SEQ ID NO: 38) | 2356 | 2394 |
| HUMANK_T24 (SEQ ID NO: 39) | 2491 | 2529 |
| HUMANK_T26 (SEQ ID NO: 40) | 2599 | 2637 |
| HUMANK_T27 (SEQ ID NO: 41) | 2632 | 2670 |
| HUMANK_T28 (SEQ ID NO: 42) | 2464 | 2502 |

[1745] Segment cluster HUMANK_node_{—}114 (SEQ ID NO:305) according to the present invention is supported by 55 libraries. The number of libraries was determined as previously described. This segment can be found in the following transcript(s): HUMANK_T3 (SEQ ID NO:36), HUMANK_T13 (SEQ ID NO:37), HUMANK_T23 (SEQ ID NO:38), HUMANK_T24 (SEQ ID NO:39), HUMANK_T26 (SEQ ID NO:40), HUMANK_T27 (SEQ ID NO:41) and HUMANK_T28 (SEQ ID NO:42). Table 44 below describes the starting and ending position of this segment on each transcript.

TABLE 44
Segment location on transcripts

| | Segment | Segment |
|---|---|---|
| Transcript name | starting position | ending position |
| HUMANK_T3 (SEQ ID NO: 36) | 2736 | 2820 |
| HUMANK_T13 (SEQ ID NO: 37) | 2676 | 2760 |
| HUMANK_T23 (SEQ ID NO: 38) | 2535 | 2619 |
| HUMANK_T24 (SEQ ID NO: 39) | 2670 | 2754 |
| HUMANK_T26 (SEQ ID NO: 40) | 2778 | 2862 |
| HUMANK_T27 (SEQ ID NO: 41) | 2811 | 2895 |
| HUMANK_T28 (SEQ ID NO: 42) | 2643 | 2727 |

[1746] Segment cluster HUMANK_node_{—}116 (SEQ ID NO:306) according to the present invention can be found in the following transcript(s): HUMANK_T3 (SEQ ID NO:36). Table 45 below describes the starting and ending position of this segment on each transcript.

TABLE 45
Segment location on transcripts

| | Segment | Segment |
|---|---|---|
| Transcript name | starting position | ending position |
| HUMANK_T3 (SEQ ID NO: 36) | 3235 | 3248 |

### Variant Protein Alignment to the Previously Known Protein:

[chemical structure]

[chemical structure]

[chemical structure]

[chemical structure]

[chemical structure]

[chemical structure]

[chemical structure]

[chemical structure]

[chemical structure]

[chemical structure]

[chemical structure]

[chemical structure]

[chemical structure]

[chemical structure]

[chemical structure]

[chemical structure]

[chemical structure]

[chemical structure]

[chemical structure]

[chemical structure]

[chemical structure]

[chemical structure]

[chemical structure]

[chemical structure]

[chemical structure]

[chemical structure]

[chemical structure]

[chemical structure]

[chemical structure]

[chemical structure]

[chemical structure]

[chemical structure]

[chemical structure]

[chemical structure]

[chemical structure]

[chemical structure]

[chemical structure]

[chemical structure]

[chemical structure]

[chemical structure]

[chemical structure]

[chemical structure]

[chemical structure]

[chemical structure]

[chemical structure]

[chemical structure]

[chemical structure]

[chemical structure]

[chemical structure]

[chemical structure]

[chemical structure]

[chemical structure]

[chemical structure]

[chemical structure]

### Description for Cluster Z39819

[1748] Cluster Z39819 features 1 transcript(s) and 10 segment(s) of interest, the names for which are given in Tables 1 and 2, respectively, the sequences themselves are given at the end of the application. The selected protein variants are given in table 3.

TABLE 1
Transcripts of interest

| Transcript Name | SEQ ID NO: |
|---|---|
| Z39819_PEA_1_T2 | 44 |

TABLE 2
Segments of interest

| Segment Name | SEQ ID NO: |
|---|---|
| Z39819_PEA_1_node_2 | 307 |
| Z39819_PEA_1_node_6 | 308 |
| Z39819_PEA_1_node_10 | 309 |
| Z39819_PEA_1_node_14 | 310 |
| Z39819_PEA_1_node_16 | 311 |
| Z39819_PEA_1_node_21 | 312 |
| Z39819_PEA_1_node_3 | 313 |
| Z39819_PEA_1_node_8 | 314 |
| Z39819_PEA_1_node_12 | 315 |
| Z39819_PEA_1_node_19 | 316 |

TABLE 3
Proteins of interest

| Protein Name | SEQ ID NO: | Corresponding Transcript(s) |
|---|---|---|
| Z39819_PEA_1_P6 | 575 | Z39819_PEA_1_T2 (SEQ ID |
| | | NO: 44) |

[1749] These sequences are variants of the known protein GDNF family receptor alpha 2 precursor (SwissProt accession identifier GFR2_HUMAN; known also according to the synonyms GFR-alpha 2; Neurturin receptor alpha; NTNR-alpha; NRTNR-alpha; TGF-beta related neurotrophic factor receptor 2; GDNF receptor beta; GDNFR-beta; RET ligand 2), SEQ ID NO:632, referred to herein as the previously known protein.

[1750] Protein GDNF family receptor alpha 2 precursor (SEQ ID NO:632) is known or believed to have the following function(s): Receptor for neurturin. Mediates the NRTN-induced autophosphorylation and activation of the RET receptor. Also able to mediate GDNF signaling through the RET tyrosine kinase receptor. The sequence for protein GDNF family receptor alpha 2 precursor is given at the end of the application, as “GDNF family receptor alpha 2 precursor amino acid sequence”. Known polymorphisms for this sequence are as shown in Table 4.

TABLE 4
Amino acid mutations for Known Protein

| SNP position(s) on amino | |
|---|---|
| acid sequence | Comment |
| 6 | V -> A |
| 462 | Q -> L |

[1751] Protein GDNF family receptor alpha 2 precursor (SEQ ID NO:632) localization is believed to be attached to the membrane by a GPI-anchor (By similarity).

[1752] The following GO Annotation(s) apply to the previously known protein. The following annotation(s) were found: transmembrane receptor protein tyrosine kinase signaling pathway, which are annotation(s) related to Biological Process; and receptor; glial cell line-derived neurotrophic factor receptor, which are annotation(s) related to Molecular Function.

[1753] The GO assignment relies on information from one or more of the SwissProt/TremB1 Protein knowledgebase, available from <http://www.expasy.ch/sprot/>; or Locuslink, available from <http://www.ncbi.nlm.nih.gov/projects/LocusLink/>.

[1754] As noted above, cluster Z39819 features 1 transcript(s), which were listed in Table 1 above. These transcript(s) encode for protein(s) which are variant(s) of protein GDNF family receptor alpha 2 precursor (SEQ ID NO:632). A description of each variant protein according to the present invention is now provided.

[1755] Variant protein Z39819_PEA_{—}1_P6 (SEQ ID NO:575) according to the present invention has an amino acid sequence as given at the end of the application; it is encoded by transcript(s) Z39819_PEA_{—}1_T2 (SEQ ID NO:44). An alignment is given to the known protein (GDNF family receptor alpha 2 precursor (SEQ ID NO:632)) at the end of the application. One or more alignments to one or more previously published protein sequences are given at the end of the application. A brief description of the relationship of the variant protein according to the present invention to each such aligned protein is as follows:

[1756] Comparison Report Between Z39819_PEA_{—}1_P6 (SEQ ID NO:575) and GFR2_HUMAN (SEQ ID NO:632):

[1757] 1. An isolated chimeric polypeptide encoding for Z39819_PEA_{—}1_P6 (SEQ ID NO:575), comprising a first amino acid sequence being at least 90% homologous to MILANVFCLFFFL corresponding to amino acids 1-13 of GFR2_HUMAN (SEQ ID NO:632), which also corresponds to amino acids 1-13 of Z39819_PEA_{—}1_P6 (SEQ ID NO:575), and a second amino acid sequence being at least 70%, optionally at least 80%, preferably at least 85%, more preferably at least 90% and most preferably at least 95% homologous to a polypeptide having the sequence GPRAPRLAPPSGLCPGQ (SEQ ID NO:1520) corresponding to amino acids 14-30 of Z39819_PEA_{—}1_P6 (SEQ ID NO:575), wherein said first amino acid sequence and second amino acid sequence are contiguous and in a sequential order.

[1758] 2. An isolated polypeptide encoding for a tail of Z39819_PEA_{—}1_P6 (SEQ ID NO:575), comprising a polypeptide being at least 70%, optionally at least about 80%, preferably at least about 85%, more preferably at least about 90% and most preferably at least about 95% homologous to the sequence GPRAPRLAPPSGLCPGQ (SEQ ID NO:1520) in Z39819_PEA_{—}1_P6 (SEQ ID NO:575).

[1759] The location of the variant protein was determined according to results from a number of different software programs and analyses, including analyses from SignalP and other specialized programs. The variant protein is believed to be located as follows with regard to the cell: secreted. The protein localization is believed to be secreted because both signal-peptide prediction programs predict that this protein has a signal peptide, and neither trans-membrane region prediction program predicts that this protein has a trans-membrane region.

[1760] The glycosylation sites of variant protein Z39819_PEA_{—}1_P6 (SEQ ID NO:575), as compared to the known protein GDNF family receptor alpha 2 precursor (SEQ ID NO:632), are described in Table 5 (given according to their position(s) on the amino acid sequence in the first column; the second column indicates whether the glycosylation site is present in the variant protein; and the last column indicates whether the position is different on the variant protein).

TABLE 5
Glycosylation site(s)

| Position(s) on known amino acid | |
|---|---|
| sequence | Present in variant protein? |
| 413 | No |
| 357 | No |
| 52 | No |

[1761] Variant protein Z39819_PEA_{—}1_P6 (SEQ ID NO:575) is encoded by the following transcript(s): Z39819_PEA_{—}1_T2 (SEQ ID NO:44), for which the sequence(s) is/are given at the end of the application. The coding portion of transcript Z39819_PEA_{—}1_T2 (SEQ ID NO:44) is shown in bold; this coding portion starts at position 715 and ends at position 804. The transcript also has the following SNPs as listed in Table 6 (given according to their position on the nucleotide sequence, with the alternative nucleic acid listed; the last column indicates whether the SNP is known or not; the presence of known SNPs in variant protein Z39819_PEA_{—}1_P6 (SEQ ID NO:575) sequence provides support for the deduced sequence of this variant protein according to the present invention).

TABLE 6
Nucleic acid SNPs

| SNP position on nucleotide | Alternative | Previously |
|---|---|---|
| sequence | nucleic acid | known SNP? |
| 633 | C -> G | No |
| 1088 | T -> G | No |
| 1114 | G -> C | No |
| 1120 | G -> C | No |
| 1372 | C -> | No |
| 1380 | C -> | No |
| 1872 | C -> T | No |
| 2058 | A -> T | Yes |
| 2090 | G -> T | Yes |
| 2161 | T -> C | No |
| 2165 | A -> | No |
| 2165 | A -> C | No |
| 2256 | C -> A | No |

[1762] As noted above, cluster Z39819 features 10 segment(s), which were listed in Table 2 above and for which the sequence(s) are given at the end of the application. These segment(s) are portions of nucleic acid sequence(s) which are described herein separately because they are of particular interest. A description of each segment according to the present invention is now provided.

[1763] Segment cluster Z39819_PEA_{—}1_node_{—}2 (SEQ ID NO:307) according to the present invention is supported by 17 libraries. The number of libraries was determined as previously described. This segment can be found in the following transcript(s): Z39819_PEA_{—}1_T2 (SEQ ID NO:44). Table 7 below describes the starting and ending position of this segment on each transcript.

TABLE 7
Segment location on transcripts

| | Segment | Segment |
|---|---|---|
| Transcript name | starting position | ending position |
| Z39819_PEA_1_T2 | 1 | 679 |
| (SEQ ID NO: 44) | | |

[1764] Segment cluster Z39819_PEA_{—}1_node_{—}6 (SEQ ID NO:308) according to the present invention is supported by 17 libraries. The number of libraries was determined as previously described. This segment can be found in the following transcript(s): Z39819_PEA_{—}1_T2 (SEQ ID NO:44). Table 8 below describes the starting and ending position of this segment on each transcript.

TABLE 8
Segment location on transcripts

| | Segment | Segment |
|---|---|---|
| Transcript name | starting position | ending position |
| Z39819_PEA_1_T2 | 755 | 1028 |
| (SEQ ID NO: 44) | | |

[1765] Segment cluster Z39819_PEA_{—}1_node_{—}10 (SEQ ID NO:309) according to the present invention is supported by 23 libraries. The number of libraries was determined as previously described. This segment can be found in the following transcript(s): Z39819_PEA_{—}1_T2 (SEQ ID NO:44). Table 9 below describes the starting and ending position of this segment on each transcript.

TABLE 9
Segment location on transcripts

| | Segment | Segment |
|---|---|---|
| Transcript name | starting position | ending position |
| Z39819_PEA_1_T2 | 1113 | 1467 |
| (SEQ ID NO: 44) | | |

[1766] Segment cluster Z39819_PEA_{—}1_node_{—}14 (SEQ ID NO:310) according to the present invention is supported by 25 libraries. The number of libraries was determined as previously described. This segment can be found in the following transcript(s): Z39819_PEA_{—}1_T2 (SEQ ID NO:44). Table 10 below describes the starting and ending position of this segment on each transcript.

TABLE 10
Segment location on transcripts

| | Segment | Segment |
|---|---|---|
| Transcript name | starting position | ending position |
| Z39819_PEA_1_T2 | 1578 | 1718 |
| (SEQ ID NO: 44) | | |

[1767] Segment cluster Z39819_PEA_{—}1_node_{—}16 (SEQ ID NO:311) according to the present invention is supported by 26 libraries. The number of libraries was determined as previously described. This segment can be found in the following transcript(s): Z39819_PEA_{—}1_T2 (SEQ ID NO:44). Table 11 below describes the starting and ending position of this segment on each transcript.

TABLE 11
Segment location on transcripts

| | Segment | Segment |
|---|---|---|
| Transcript name | starting position | ending position |
| Z39819_PEA_1_T2 | 1719 | 1891 |
| (SEQ ID NO: 44) | | |

[1768] Segment cluster Z39819_PEA_{—}1_node_{—}21 (SEQ ID NO:312) according to the present invention is supported by 61 libraries. The number of libraries was determined as previously described. This segment can be found in the following transcript(s): Z39819_PEA_{—}1_T2 (SEQ ID NO:44). Table 12 below describes the starting and ending position of this segment on each transcript.

TABLE 12
Segment location on transcripts

| | Segment | Segment |
|---|---|---|
| Transcript name | starting position | ending position |
| Z39819_PEA_1_T2 | 1946 | 3332 |
| (SEQ ID NO: 44) | | |

[1769] According to an optional embodiment of the present invention, short segments related to the above cluster are also provided. These segments are up to about 120 bp in length, and so are included in a separate description.

[1770] Segment cluster Z39819_PEA_{—}1_node_{—}3 (SEQ ID NO:313) according to the present invention is supported by 14 libraries. The number of libraries was determined as previously described. This segment can be found in the following transcript(s): Z39819_PEA_{—}1_T2 (SEQ ID NO:44). Table 13 below describes the starting and ending position of this segment on each transcript.

TABLE 13
Segment location on transcripts

| | Segment | Segment |
|---|---|---|
| Transcript name | starting position | ending position |
| Z39819_PEA_1_T2 | 680 | 754 |
| (SEQ ID NO: 44) | | |

[1771] Segment cluster Z39819_PEA_{—}1_node_{—}8 (SEQ ID NO:314) according to the present invention is supported by 14 libraries. The number of libraries was determined as previously described. This segment can be found in the following transcript(s): Z39819_PEA_{—}1_T2 (SEQ ID NO:44). Table 14 below describes the starting and ending position of this segment on each transcript.

TABLE 14
Segment location on transcripts

| | Segment | |
|---|---|---|
| | starting | Segment |
| Transcript name | position | ending position |
| Z39819_PEA_1_T2 (SEQ ID NO: 44) | 1029 | 1112 |

[1772] Segment cluster Z39819_PEA_{—}1_node_{—}12 (SEQ ID NO:315) according to the present invention is supported by 20 libraries. The number of libraries was determined as previously described. This segment can be found in the following transcript(s): Z39819_PEA_{—}1_T2 (SEQ ID NO:44). Table 15 below describes the starting and ending position of this segment on each transcript.

TABLE 15
Segment location on transcripts

| | Segment | |
|---|---|---|
| | starting | Segment |
| Transcript name | position | ending position |
| Z39819_PEA_1_T2 (SEQ ID NO: 44) | 1468 | 1577 |

[1773] Segment cluster Z39819_PEA_{—}1_node_{—}19 (SEQ ID NO:316) according to the present invention is supported by 27 libraries. The number of libraries was determined as previously described. This segment can be found in the following transcript(s): Z39819_PEA_{—}1_T2 (SEQ ID NO:44). Table 16 below describes the starting and ending position of this segment on each transcript.

TABLE 16
Segment location on transcripts

| | Segment | |
|---|---|---|
| | starting | Segment |
| Transcript name | position | ending position |
| Z39819_PEA_1_T2 (SEQ ID NO: 44) | 1892 | 1945 |

### Variant Protein Alignment to the Previously Known Protein:

Sequence name: GFR2_HUMAN (SEQ ID NO: 632)
Sequence documentation:
Alignment of: Z39819_PEA_1 PG (SEQ ID NO: 575) × GFR2_HUMAN (SEQ ID
NO: 632) . .
Alignment segment 1/1:

| | | | |
|---|---|---|---|
| Quality: | 146.00 | Escore: | 0 |
| Matching length: | 26 | Total length: | 26 |
| Matching Percent Similarity: | 69.23 | Matching Percent Identity: | 69.23 |
| Total Percent Similarity: | 69.23 | Total Percent Identity: | 69.23 |
| Gaps: | 0 | | |

Alignment:

[chemical structure]

### Description for Cluster HUMCA1XIA

[1775] Cluster HUMCA1XIA features 4 transcript(s) and 46 segment(s) of interest, the names for which are given in Tables 1 and 2, respectively, the sequences themselves are given at the end of the application. The selected protein variants are given in table 3.

TABLE 1
Transcripts of interest

| Transcript Name | SEQ ID NO: |
|---|---|
| HUMCA1XIA_T16 | 45 |
| HUMCA1XIA_T17 | 46 |
| HUMCA1XIA_T19 | 47 |
| HUMCA1XIA_T20 | 48 |

TABLE 2
Segments of interest

| Segment Name | SEQ ID NO: |
|---|---|
| HUMCA1XIA_node_0 | 317 |
| HUMCA1XIA_node_2 | 318 |
| HUMCA1XIA_node_4 | 319 |
| HUMCA1XIA_node_6 | 320 |
| HUMCA1XIA_node_8 | 321 |
| HUMCA1XIA_node_9 | 322 |
| HUMCA1XIA_node_18 | 323 |
| HUMCA1XIA_node_54 | 324 |
| HUMCA1XIA_node_55 | 325 |
| HUMCA1XIA_node_92 | 326 |
| HUMCA1XIA_node_11 | 327 |
| HUMCA1XIA_node_15 | 328 |
| HUMCA1XIA_node_19 | 329 |
| HUMCA1XIA_node_21 | 330 |
| HUMCA1XIA_node_23 | 331 |
| HUMCA1XIA_node_25 | 332 |
| HUMCA1XIA_node_27 | 333 |
| HUMCA1XIA_node_29 | 334 |
| HUMCA1XIA_node_31 | 335 |
| HUMCA1XIA_node_33 | 336 |
| HUMCA1XIA_node_35 | 337 |
| HUMCA1XIA_node_37 | 338 |
| HUMCA1XIA_node_39 | 339 |
| HUMCA1XIA_node_41 | 340 |
| HUMCA1XIA_node_43 | 341 |
| HUMCA1XIA_node_45 | 342 |
| HUMCA1XIA_node_47 | 343 |
| HUMCA1XIA_node_49 | 344 |
| HUMCA1XIA_node_51 | 345 |
| HUMCA1XIA_node_57 | 346 |
| HUMCA1XIA_node_59 | 347 |
| HUMCA1XIA_node_62 | 348 |
| HUMCA1XIA_node_64 | 349 |
| HUMCA1XIA_node_66 | 350 |
| HUMCA1XIA_node_68 | 351 |
| HUMCA1XIA_node_70 | 352 |
| HUMCA1XIA_node_72 | 353 |
| HUMCA1XIA_node_74 | 354 |
| HUMCA1XIA_node_76 | 355 |
| HUMCA1XIA_node_78 | 356 |
| HUMCA1XIA_node_81 | 357 |
| HUMCA1XIA_node_83 | 358 |
| HUMCA1XIA_node_85 | 359 |
| HUMCA1XIA_node_87 | 360 |
| HUMCA1XIA_node_89 | 361 |
| HUMCA1XIA_node_91 | 362 |

TABLE 3
Proteins of interest

| Protein Name | SEQ ID NO: | Corresponding Transcript(s) |
|---|---|---|
| HUMCA1XIA_P14 | 576 | HUMCA1XIA_T16 (SEQ ID |
| | | NO: 45) |
| HUMCA1XIA_P15 | 577 | HUMCA1XIA_T17 (SEQ ID |
| | | NO: 46) |
| HUMCA1XIA_P16 | 578 | HUMCA1XIA_T19 (SEQ ID |
| | | NO: 47) |
| HUMCA1XIA_P17 | 579 | HUMCA1XIA_T20 (SEQ ID |
| | | NO: 48) |

[1776] These sequences are variants of the known protein Collagen alpha 1 (SwissProt accession identifier CA1B_HUMAN; known also according to the synonyms XI), SEQ ID NO: 633, referred to herein as the previously known protein.

[1777] Protein Collagen alpha 1 (SEQ ID NO:633) is known or believed to have the following function(s): May play an important role in fibrillogenesis by controlling lateral growth of collagen II fibrils. The sequence for protein Collagen alpha 1 is given at the end of the application, as “Collagen alpha 1 amino acid sequence”. Known polymorphisms for this sequence are as shown in Table 4.

TABLE 4
Amino acid mutations for Known Protein

| SNP position(s) on | |
|---|---|
| amino acid sequence | Comment |
| 625 | G -> V (in STL2). /FTId = VAR_013583. |
| 676 | G -> R (in STL2; overlapping phenotype |
| | with Marshall syndrome). /FTId = VAR_013584. |
| 921-926 | Missing (in STL2; overlapping phenotype |
| | with Marshall syndrome). /FTId = VAR_013585. |
| 1313-1315 | Missing (in STL2; overlapping phenotype |
| | with Marshall syndrome). /FTId = VAR_013586. |
| 1516 | G -> V (in STL2; overlapping phenotype |
| | with Marshall syndrome). /FTId = VAR_013587. |
| 941-944 | KDGL -> RMGC |
| 986 | Y -> H |
| 1074 | R -> P |
| 1142 | G -> D |
| 1218 | M -> W |
| 1758 | T -> A |
| 1786 | S -> N |

[1778] The following GO Annotation(s) apply to the previously known protein. The following annotation(s) were found: cartilage condensation; vision; hearing; cell-cell adhesion; extracellular matrix organization and biogenesis, which are annotation(s) related to Biological Process; extracellular matrix structural protein; extracellular matrix protein, adhesive, which are annotation(s) related to Molecular Function; and extracellular matrix; collagen; collagen type XI, which are annotation(s) related to Cellular Component.

[1779] The GO assignment relies on information from one or more of the SwissProt/TremB1 Protein knowledgebase, available from <http://www.expasy.ch/sprot/>; or Locuslink, available from <http://www.ncbi.nlm.nih.gov/projects/LocusLink/>.

[1780] Cluster HUMCA1XIA can be used as a diagnostic marker according to overexpression of transcripts of this cluster in cancer. Expression of such transcripts in normal tissues is also given according to the previously described methods. The term “number” in the left hand column of the table and the numbers on the y-axis of the figure below refer to weighted expression of ESTs in each category, as “parts per million” (ratio of the expression of ESTs for a particular cluster to the expression of all ESTs in that category, according to parts per million).

[1781] Overall, the following results were obtained as shown with regard to the histograms in FIG. 24 and Table 5. This cluster is overexpressed (at least at a minimum level) in the following pathological conditions: bone malignant tumors, epithelial malignant tumors, a mixture of malignant tumors from different tissues and lung malignant tumors.

TABLE 5
Normal tissue distribution

| Name of Tissue | Number |
|---|---|
| adrenal | 0 |
| Bone | 207 |
| brain | 13 |
| colon | 0 |
| epithelial | 11 |
| general | 11 |
| Head and neck | 0 |
| kidney | 0 |
| Lung | 0 |
| breast | 8 |
| pancreas | 0 |
| stomach | 73 |
| uterus | 9 |

TABLE 6
P values and ratios for expression in cancerous tissue

| Name of Tissue | P1 | P2 | SP1 | R3 | SP2 | R4 |
|---|---|---|---|---|---|---|
| adrenal | 4.2e−01 | 1.9e−01 | 9.6e−02 | 3.4 | 8.2e−02 | 3.6 |
| bone | 2.4e−01 | 6.3e−01 | 7.7e−10 | 4.3 | 5.3e−03 | 1.6 |
| brain | 5.0e−01 | 6.9e−01 | 1.8e−01 | 2.1 | 4.2e−01 | 1.3 |
| colon | 1.3e−02 | 2.9e−02 | 2.4e−01 | 3.0 | 3.5e−01 | 2.4 |
| epithelial | 3.9e−04 | 3.2e−03 | 1.3e−03 | 2.3 | 1.8e−02 | 1.7 |
| general | 5.6e−05 | 1.6e−03 | 9.5e−17 | 4.5 | 1.1e−09 | 2.8 |
| head and neck | 1.2e−01 | 2.1e−01 | 1 | 1.3 | 1 | 1.1 |
| kidney | 6.5e−01 | 7.2e−01 | 3.4e−01 | 2.4 | 4.9e−01 | 1.9 |
| lung | 5.3e−02 | 9.1e−02 | 5.5e−05 | 7.3 | 5.0e−03 | 4.0 |
| breast | 4.3e−01 | 5.6e−01 | 6.9e−01 | 1.4 | 8.2e−01 | 1.1 |
| pancreas | 3.3e−01 | 1.8e−01 | 4.2e−01 | 2.4 | 1.5e−01 | 3.7 |
| stomach | 5.0e−01 | 6.1e−01 | 6.9e−01 | 1.0 | 6.7e−01 | 0.8 |
| uterus | 7.1e−01 | 7.0e−01 | 6.6e−01 | 1.1 | 6.4e−01 | 1.1 |

[1782] As noted above, cluster HUMCA1XIA features 4 transcript(s), which were listed in Table 1 above. These transcript(s) encode for protein(s) which are variant(s) of protein Collagen alpha 1 (SEQ ID NO:633). A description of each variant protein according to the present invention is now provided.

[1783] Variant protein HUMCA1XIA_P14 (SEQ ID NO:576) according to the present invention has an amino acid sequence as given at the end of the application; it is encoded by transcript(s) HUMCA1XIA_T16 (SEQ ID NO:45). An alignment is given to the known protein (Collagen alpha 1 (SEQ ID NO:633)) at the end of the application. One or more alignments to one or more previously published protein sequences are given at the end of the application. A brief description of the relationship of the variant protein according to the present invention to each such aligned protein is as follows:

[1784] Comparison Report Between HUMCA1XIA_P14 (SEQ ID NO:576) and CA1B_HUMAN_V5 (SEQ ID NO 634):

[1785] 1. An isolated chimeric polypeptide encoding for HUMCA1XIA_P14 (SEQ ID NO:576), comprising a first amino acid sequence being at least 90% homologous to MEPWSSRWKTKRWLWDFTVTTLALTFLFQAREVRGAAPVDVLKALDFHNSPEGISKTTGFCTNRKNSKG SDTAYRVSKQAQLSAPTKQLFPGGTFPEDFSILFTVKPKKGIQSFLLSIYNEHGIQQIGVEVGRSPVFLFEDH TGKPAPEDYPLFRTVNIADGKWHRVAISVEKKTVTMIVDCKKKTTKPLDRSERAIVDTNGITVFGTRILDE EVFEGDIQQFLITGDPKAAYDYCEHYSPDCDSSAPKAAQAQEPQIDEYAPEDIIEYDYEYGEAEYKEAESVT EGPTVTEETIAQTEANIVDDFQEYNYGTMESYQTEAPRHVSGTNEPNPVEEIFTEEYLTGEDYDSQRKNSE DTLYENKEIDGRDSDLLVDGDLGEYDFYEYKEYEDKPTSPPNEEFGPGVPAETDITETSINGHGAYGEKGQ KGEPAVVEPGMLVEGPPGPAGPAGIMGPPGLQGPTGPPGDPGDRGPPGRPGLPGADGLPGPPGTMLMLPF RYGGDGSKGPTISAQEAQAQAILQQARIALRGPPGPMGLTGRPGPVGGPGSSGAKGESGDPGPQGPRGVQ GPPGPTGKPGKRGRPGADGGRGMPGEPGAKGDRGFDGLPGLPGDKGHRGERGPQGPPGPPGDDGMRGE DGEIGPRGLPGEAGPRGLLGPRGTPGAPGQPGMAGVDGPPGPKGNMGPQGEPGPPGQQGNPGPQGLPGPQ GPIGPPGEKGPQGKPGLAGLPGADGPPGHPGKEGQSGEKGALGPPGPQGPIGYPGPRGVKGADGVRGLKG SKGEKGEDGFPGFKGDMGLKGDRGEVGQIGPRGEDGPEGPKGRAGPTGDPGPSGQAGEKGKLGVPGLPG YPGRQGPKGSTGFPGFPGANGEKGARGVAGKPGPRGQRGPTGPRGSRGARGPTGKPGPKGTSGGDGPPGP PGERGPQGPQGPVGFPGPKGPPGPPGKDGLPGHPGQRGETGFQGKTGPPGPGGVVGPQGPTGETGPIGERG HPGPPGPPGEQGLPGAAGKEGAKGDPGPQGISGKDGPAGLRGFPGERGLPGAQGAPGLKGGEGPQGPPGP V corresponding to amino acids 1-1056 of CA1B_HUMAN_V5 (SEQ ID NO:634), which also corresponds to amino acids 1-1056 of HUMCA1XIA_P14 (SEQ ID NO:576), and a second amino acid sequence being at least 70%, optionally at least 80%, preferably at least 85%, more preferably at least 90% and most preferably at least 95% homologous to a polypeptide having the sequence VSMMIINSQTIMVVNYSSSFITLML (SEQ ID NO:1521) corresponding to amino acids 1057-1081 of HUMCA1XIA_P14 (SEQ ID NO:576), wherein said first amino acid sequence and second amino acid sequence are contiguous and in a sequential order.

[1786] 2. An isolated polypeptide encoding for a tail of HUMCA1XIA_P14 (SEQ ID NO:576), comprising a polypeptide being at least 70%, optionally at least about 80%, preferably at least about 85%, more preferably at least about 90% and most preferably at least about 95% homologous to the sequence VSMMIINSQTIMVVNYSSSFITLML (SEQ ID NO:1521) in HUMCA1XIA_P14 (SEQ ID NO:576).

[1787] It should be noted that the known protein sequence (CA1B_HUMAN (SEQ ID NO:633)) has one or more changes than the sequence given at the end of the application and named as being the amino acid sequence for CA1B_HUMAN_V5 (SEQ ID NO:634). These changes were previously known to occur and are listed in the table below.

TABLE 7
Changes to CA1B_HUMAN_V5(SEQ ID NO: 634)

| SNP position(s) on amino | |
|---|---|
| acid sequence | Type of change |
| 987 | conflict |

[1788] The location of the variant protein was determined according to results from a number of different software programs and analyses, including analyses from SignalP and other specialized programs. The variant protein is believed to be located as follows with regard to the cell: secreted. The protein localization is believed to be secreted because both signal-peptide prediction programs predict that this protein has a signal peptide, and neither trans-membrane region prediction program predicts that this protein has a trans-membrane region.

[1789] Variant protein HUMCA1XIA_P14 (SEQ ID NO:576) also has the following non-silent SNPs (Single Nucleotide Polymorphisms) as listed in Table 8, (given according to their position(s) on the amino acid sequence, with the alternative amino acid(s) listed; the last column indicates whether the SNP is known or not; the presence of known SNPs in variant protein HUMCA1XIA_P14 (SEQ ID NO:576) sequence provides support for the deduced sequence of this variant protein according to the present invention).

TABLE 8
Amino acid mutations

| SNP position(s) on amino | Alternative | Previously |
|---|---|---|
| acid sequence | amino acid(s) | known SNP? |
| 8 | W -> G | Yes |
| 46 | D -> E | Yes |
| 559 | G -> S | Yes |
| 832 | G -> * | Yes |
| 986 | H -> Y | Yes |
| 1061 | I -> M | Yes |
| 1070 | V -> A | Yes |

[1790] Variant protein HUMCA1XIA_P14 (SEQ ID NO:576) is encoded by the following transcript(s): HUMCA1XIA_T16 (SEQ ID NO:45), for which the sequence(s) is/are given at the end of the application. The coding portion of transcript HUMCA1XIA_T16 (SEQ ID NO:45) is shown in bold; this coding portion starts at position 319 and ends at position 3561. The transcript also has the following SNPs as listed in Table 9 (given according to their position on the nucleotide sequence, with the alternative nucleic acid listed; the last column indicates whether the SNP is known or not; the presence of known SNPs in variant protein HUMCA1XIA_P14 (SEQ ID NO:576) sequence provides support for the deduced sequence of this variant protein according to the present invention).

TABLE 9
Nucleic acid SNPs

| SNP position on | Alternative | Previously |
|---|---|---|
| nucleotide sequence | nucleic acid | known SNP? |
| 157 | A -> G | No |
| 241 | T -> A | Yes |
| 340 | T -> G | Yes |
| 456 | T -> G | Yes |
| 1993 | G -> A | Yes |
| 2812 | G -> T | Yes |
| 3274 | C -> T | Yes |
| 3282 | C -> T | Yes |
| 3501 | A -> G | Yes |
| 3527 | T -> C | Yes |

[1791] Variant protein HUMCA1XIA_P15 (SEQ ID NO:577) according to the present invention has an amino acid sequence as given at the end of the application; it is encoded by transcript(s) HUMCA1XIA_T17 (SEQ ID NO:46). An alignment is given to the known protein (Collagen alpha 1 (SEQ ID NO:633)) at the end of the application. One or more alignments to one or more previously published protein sequences are given at the end of the application. A brief description of the relationship of the variant protein according to the present invention to each such aligned protein is as follows:

[1792] Comparison Report Between HUMCA1XIA_P15 (SEQ ID NO:577) and CA1B_HUMAN (SEQ ID NO:633):

[1793] 1. An isolated chimeric polypeptide encoding for HUMCA1XIA_P15 (SEQ ID NO:577), comprising a first amino acid sequence being at least 90% homologous to MEPWSSRWKTKRWLWDFTVTTLALTFLFQAREVRGAAPVDVLKALDFHNSPEGISKTTGFCTNRKNSKG SDTAYRVSKQAQLSAPTKQLFPGGTFPEDFSILFTVKPKKGIQSFLLSIYNEHGIQQIGVEVGRSPVFLFEDH TGKPAPEDYPLFRTVNIADGKWHRVAISVEKKTVTMIVDCKKKTTKPLDRSERAIVDTNGITVFGTRILDE EVFEGDIQQFLITGDPKAAYDYCEHYSPDCDSSAPKAAQAQEPQIDEYAPEDIIEYDYEYGEAEYKEAESVT EGPTVTEETIAQTEANIVDDFQEYNYGTMESYQTEAPRHVSGTNEPNPVEEIFTEEYLTGEDYDSQRKNSE DTLYENKEIDGRDSDLLVDGDLGEYDFYEYKEYEDKPTSPPNEEFGPGVPAETDITETSINGHGAYGEKGQ KGEPAVVEPGMLVEGPPGPAGPAGIMGPPGLQGPTGPPGDPGDRGPPGRPGLPGADGLPGPPGTMLMLPF RYGGDGSKGPTISAQEAQAQAILQQARIALRGPPGPMGLTGRPGPVGGPGSSGAKGESGDPGPQGPRGVQ GPPGPTGKPGKRGRPGADGGRGMPGEPGAKGDRGFDGLPGLPGDKGHRGERGPQGPPGPPGDDGMRGE DGEIGPRGLPGEAGPRGLLGPRGTPGAPGQPGMAGVDGPPGPKGNMGPQGEPGPPGQQGNPGPQGLPGPQ GPIGPPGEK corresponding to amino acids 1-714 of CA1B_HUMAN (SEQ ID NO:633), which also corresponds to amino acids 1-714 of HUMCA1XIA_P15 (SEQ ID NO:577), and a second amino acid sequence being at least 70%, optionally at least 80%, preferably at least 85%, more preferably at least 90% and most preferably at least 95% homologous to a polypeptide having the sequence MCCNLSFGILIPLQK (SEQ ID NO:1522) corresponding to amino acids 715-729 of HUMCA1XIA_P15 (SEQ ID NO:577), wherein said first amino acid sequence and second amino acid sequence are contiguous and in a sequential order.

[1794] 2. An isolated polypeptide encoding for a tail of HUMCA1XIA_P15 (SEQ ID NO:577), comprising a polypeptide being at least 70%, optionally at least about 80%, preferably at least about 85%, more preferably at least about 90% and most preferably at least about 95% homologous to the sequence MCCNLSFGILIPLQK (SEQ ID NO:1522) in HUMCA1XIA_P15 (SEQ ID NO:577).

[1795] The location of the variant protein was determined according to results from a number of different software programs and analyses, including analyses from SignalP and other specialized programs. The variant protein is believed to be located as follows with regard to the cell: secreted. The protein localization is believed to be secreted because both signal-peptide prediction programs predict that this protein has a signal peptide, and neither trans-membrane region prediction program predicts that this protein has a trans-membrane region.

[1796] Variant protein HUMCA1XIA_P15 (SEQ ID NO:577) also has the following non-silent SNPs (Single Nucleotide Polymorphisms) as listed in Table 10, (given according to their position(s) on the amino acid sequence, with the alternative amino acid(s) listed; the last column indicates whether the SNP is known or not; the presence of known SNPs in variant protein HUMCA1XIA_P15 (SEQ ID NO:577) sequence provides support for the deduced sequence of this variant protein according to the present invention).

TABLE 10
Amino acid mutations

| SNP position(s) on amino | Alternative | Previously |
|---|---|---|
| acid sequence | amino acid(s) | known SNP? |
| 8 | W -> G | Yes |
| 46 | D -> E | Yes |
| 559 | G -> S | Yes |

[1797] The glycosylation sites of variant protein HUMCA1XIA_P15 (SEQ ID NO:577), as compared to the known protein Collagen alpha 1 (SEQ ID NO:633), are described in Table 11 (given according to their position(s) on the amino acid sequence in the first column; the second column indicates whether the glycosylation site is present in the variant protein; and the last column indicates whether the position is different on the variant protein).

TABLE 11
Glycosylation site(s)

| Position(s) on known amino acid | |
|---|---|
| sequence | Present in variant protein? |
| 1640 | no |

[1798] Variant protein HUMCA1XIA_P15 (SEQ ID NO:577) is encoded by the following transcript(s): HUMCA1XIA_T17 (SEQ ID NO:46), for which the sequence(s) is/are given at the end of the application. The coding portion of transcript HUMCA1XIA_T17 (SEQ ID NO:46) is shown in bold; this coding portion starts at position 319 and ends at position 2505. The transcript also has the following SNPs as listed in Table 12 (given according to their position on the nucleotide sequence, with the alternative nucleic acid listed; the last column indicates whether the SNP is known or not; the presence of known SNPs in variant protein HUMCA1XIA_P15 (SEQ ID NO:577) sequence provides support for the deduced sequence of this variant protein according to the present invention).

TABLE 12
Nucleic acid SNPs

| SNP position on | Alternative | Previously |
|---|---|---|
| nucleotide sequence | nucleic acid | known SNP? |
| 157 | A -> G | No |
| 241 | T -> A | Yes |
| 340 | T -> G | Yes |
| 456 | T -> G | Yes |
| 1993 | G -> A | Yes |
| 2473 | C -> T | Yes |

[1799] Variant protein HUMCA1XIA_P16 (SEQ ID NO:578) according to the present invention has amino acid sequence as given at the end of the application; it is encoded by transcript(s) HUMCA1XIA_T19 (SEQ ID NO:47). An alignment is given to the known protein (Collagen alpha 1 (SEQ ID NO:633)) at the end of the application. One or more alignments to one or more previously published protein sequences are given at the end of the application. A brief description of the relationship of the variant protein according to the present invention to each such aligned protein is as follows:

[1800] Comparison Report Between HUMCA1XIA_P16 (SEQ ID NO:578) and CA1B_HUMAN (SEQ ID NO:633):

[1801] 1. An isolated chimeric polypeptide encoding for HUMCA1XIA_P16 (SEQ ID NO:578), comprising a first amino acid sequence being at least 90% homologous to MEPWSSRWKTKRWLWDFTVTTLALTFLFQAREVRGAAPVDVLKALDFHNSPEGISKTTGFCTNRKNSKG SDTAYRVSKQAQLSAPTKQLFPGGTFPEDFSILFTVKPKKGIQSFLLSIYNEHGIQQIGVEVGRSPVFLFEDH TGKPAPEDYPLFRTVNIADGKWHRVAISVEKKTVTMIVDCKKKTTKPLDRSERAIVDTNGITVFGTRILDE EVFEGDIQQFLITGDPKAAYDYCEHYSPDCDSSAPKAAQAQEPQIDEYAPEDIIEYDYEYGEAEYKEAESVT EGPTVTEETIAQTEANIVDDFQEYNYGTMESYQTEAPRHVSGTNEPNPVEEIFTEEYLTGEDYDSQRKNSE DTLYENKEIDGRDSDLLVDGDLGEYDFYEYKEYEDKPTSPPNEEFGPGVPAETDITETSINGHGAYGEKGQ KGEPAVVEPGMLVEGPPGPAGPAGIMGPPGLQGPTGPPGDPGDRGPPGRPGLPGADGLPGPPGTMLMLPF RYGGDGSKGPTISAQEAQAQAILQQARIALRGPPGPMGLTGRPGPVGGPGSSGAKGESGDPGPQGPRGVQ GPPGPTGKPGKRGRPGADGGRGMPGEPGAKGDRGFDGLPGLPGDKGHRGERGPQGPPGPPGDDGMRGE DGEIGPRGLPGEA corresponding to amino acids 1-648 of CA1B_HUMAN (SEQ ID NO:633), which also corresponds to amino acids 1-648 of HUMCA1XIA_P16 (SEQ ID NO:578), a second amino acid sequence being at least 90% homologous to GMAGVDGPPGPKGNMGPQGEPGPPGQQGNPGPQGLPGPQGPIGPPGEK corresponding to amino acids 667-714 of CA1B HUMAN (SEQ ID NO:633), which also corresponds to amino acids 649-696 of HUMCA1XIA_P16 (SEQ ID NO:578), and a third amino acid sequence being at least 70%, optionally at least 80%, preferably at least 85%, more preferably at least 90% and most preferably at least 95% homologous to a polypeptide having the sequence VSFSFSLFYKKVIKFACDKRFVGRHDERKVVKLSLPLYLIYE (SEQ ID NO:1523) corresponding to amino acids 649-696 of HUMCA1XIA_P16 (SEQ ID NO:578), wherein said first amino acid sequence, second amino acid sequence and third amino acid sequence are contiguous and in a sequential order.

[1802] 2. An isolated chimeric polypeptide encoding for an edge portion of HUMCA1XIA_P16 (SEQ ID NO:578), comprising a polypeptide having a length “n”, wherein n is at least about 10 amino acids in length, optionally at least about 20 amino acids in length, preferably at least about 30 amino acids in length, more preferably at least about 40 amino acids in length and most preferably at least about 50 amino acids in length, wherein at least two amino acids comprise AG, having a structure as follows: a sequence starting from any of amino acid numbers 648−x to 648; and ending at any of amino acid numbers 649+((n−2)−x), in which x varies from 0 to n−2.

[1803] 3. An isolated polypeptide encoding for a tail of HUMCA1XIA_P16 (SEQ ID NO:578), comprising a polypeptide being at least 70%, optionally at least about 80%, preferably at least about 85%, more preferably at least about 90% and most preferably at least about 95% homologous to the sequence VSFSFSLFYKKVIKFACDKRFVGRHDERKVVKLSLPLYLIYE (SEQ ID NO:1523) in HUMCA1XIA_P16 (SEQ ID NO:578).

[1804] The location of the variant protein was determined according to results from a number of different software programs and analyses, including analyses from SignalP and other specialized programs. The variant protein is believed to be located as follows with regard to the cell: secreted. The protein localization is believed to be secreted because both signal-peptide prediction programs predict that this protein has a signal peptide, and neither trans-membrane region prediction program predicts that this protein has a trans-membrane region.

[1805] Variant protein HUMCA1XIA_P16 (SEQ ID NO:578) also has the following non-silent SNPs (Single Nucleotide Polymorphisms) as listed in Table 13, (given according to their position(s) on the amino acid sequence, with the alternative amino acid(s) listed; the last column indicates whether the SNP is known or not; the presence of known SNPs in variant protein HUMCA1XIA_P16 (SEQ ID NO:578) sequence provides support for the deduced sequence of this variant protein according to the present invention).

TABLE 13
Amino acid mutations

| SNP position(s) on amino | Alternative | Previously |
|---|---|---|
| acid sequence | amino acid(s) | known SNP? |
| 8 | W -> G | Yes |
| 46 | D -> E | Yes |
| 559 | G -> S | Yes |

[1806] The glycosylation sites of variant protein HUMCA1XIA_P16 (SEQ ID NO:578), as compared to the known protein Collagen alpha 1 (SEQ ID NO:633), are described in Table 14 (given according to their position(s) on the amino acid sequence in the first column; the second column indicates whether the glycosylation site is present in the variant protein; and the last column indicates whether the position is different on the variant protein).

TABLE 14
Glycosylation site(s)

| Position(s) on known | Present in | Position in |
|---|---|---|
| amino acid sequence | variant protein? | variant protein? |
| 1640 | no | |

[1807] Variant protein HUMCA1XIA_P16 (SEQ ID NO:578) is encoded by the following transcript(s): HUMCA1XIA_T19 (SEQ ID NO:47), for which the sequence(s) is/are given at the end of the application. The coding portion of transcript HUMCA1XIA_T19 (SEQ ID NO:47) is shown in bold; this coding portion starts at position 319 and ends at position 2532. The transcript also has the following SNPs as listed in Table 15 (given according to their position on the nucleotide sequence, with the alternative nucleic acid listed; the last column indicates whether the SNP is known or not; the presence of known SNPs in variant protein HUMCA1XIA_P16 (SEQ ID NO:578) sequence provides support for the deduced sequence of this variant protein according to the present invention).

TABLE 15
Nucleic acid SNPs

| SNP position on | Alternative | Previously |
|---|---|---|
| nucleotide sequence | nucleic acid | known SNP? |
| 157 | A -> G | No |
| 241 | T -> A | Yes |
| 340 | T -> G | Yes |
| 456 | T -> G | Yes |
| 1993 | G -> A | Yes |
| 2606 | C -> A | Yes |
| 2677 | T -> G | Yes |
| 2849 | C -> T | Yes |

[1808] Variant protein HUMCA1XIA_P17 (SEQ ID NO:579) according to the present invention has an amino acid sequence as given at the end of the application; it is encoded by transcript(s) HUMCA1XIA_T20 (SEQ ID NO:48). An alignment is given to the known protein (Collagen alpha 1 (SEQ ID NO:633)) at the end of the application. One or more alignments to one or more previously published protein sequences are given at the end of the application. A brief description of the relationship of the variant protein according to the present invention to each such aligned protein is as follows:

[1809] Comparison Report Between HUMCA1XIA_P17 (SEQ ID NO:579) and CA1B_HUMAN (SEQ ID NO:633):

[1810] 1. An isolated chimeric polypeptide encoding for HUMCA1XIA_P17 (SEQ ID NO:579), comprising a first amino acid sequence being at least 90% homologous to MEPWSSRWKTKRWLWDFTVTTLALTFLFQAREVRGAAPVDVLKALDFHNSPEGISKTTGFCTNRKNSKG SDTAYRVSKQAQLSAPTKQLFPGGTFPEDFSILFTVKPKKGIQSFLLSIYNEHGIQQIGVEVGRSPVFLFEDH TGKPAPEDYPLFRTVNIADGKWHRVAISVEKKTVTMIVDCKKKTTKPLDRSERAIVDTNGITVFGTRILDE EVFEGDIQQFLITGDPKAAYDYCEHYSPDCDSSAPKAAQAQEPQIDE corresponding to amino acids 1-260 of CA1B_HUMAN (SEQ ID NO:633), which also corresponds to amino acids 1-260 of HUMCA1XIA_P17 (SEQ ID NO:579), and a second amino acid sequence being at least 70%, optionally at least 80%, preferably at least 85%, more preferably at least 90% and most preferably at least 95% homologous to a polypeptide having the sequence VRSTRPEKVFVFQ (SEQ ID NO:1524) corresponding to amino acids 261-273 of HUMCA1XIA_P17 (SEQ ID NO:579), wherein said first amino acid sequence and second amino acid sequence are contiguous and in a sequential order.

[1811] 2. An isolated polypeptide encoding for a tail of HUMCA1XIA_P17 (SEQ ID NO:579), comprising a polypeptide being at least 70%, optionally at least about 80%, preferably at least about 85%, more preferably at least about 90% and most preferably at least about 95% homologous to the sequence VRSTRPEKVFVFQ (SEQ ID NO:1524) in HUMCA1XIA_P17 (SEQ ID NO:579).

[1812] The location of the variant protein was determined according to results from a number of different software programs and analyses, including analyses from SignalP and other specialized programs. The variant protein is believed to be located as follows with regard to the cell: secreted. The protein localization is believed to be secreted because both signal-peptide prediction programs predict that this protein has a signal peptide, and neither trans-membrane region prediction program predicts that this protein has a trans-membrane region.

[1813] Variant protein HUMCA1XIA_P17 (SEQ ID NO:579) also has the following non-silent SNPs (Single Nucleotide Polymorphisms) as listed in Table 16, (given according to their position(s) on the amino acid sequence, with the alternative amino acid(s) listed; the last column indicates whether the SNP is known or not; the presence of known SNPs in variant protein HUMCA1XIA_P17 (SEQ ID NO:579) sequence provides support for the deduced sequence of this variant protein according to the present invention).

TABLE 16
Amino acid mutations

| SNP position(s) on | Alternative | Previously |
|---|---|---|
| amino acid sequence | amino acid(s) | known SNP? |
| 8 | W -> G | Yes |
| 46 | D -> E | Yes |

[1814] The glycosylation sites of variant protein HUMCA1XIA_P17 (SEQ ID NO:579), as compared to the known protein Collagen alpha 1 (SEQ ID NO:633), are described in Table 17 (given according to their position(s) on the amino acid sequence in the first column; the second column indicates whether the glycosylation site is present in the variant protein; and the last column indicates whether the position is different on the variant protein).

TABLE 17
Glycosylation site(s)

| Position(s) on known | Present in |
|---|---|
| amino acid sequence | variant protein? |
| 1640 | no |

[1815] Variant protein HUMCA1XIA_P17 (SEQ ID NO:579) is encoded by the following transcript(s): HUMCA1XIA_T20 (SEQ ID NO:48), for which the sequence(s) is/are given at the end of the application. The coding portion of transcript HUMCA1XIA_T20 (SEQ ID NO:48) is shown in bold; this coding portion starts at position 319 and ends at position 1137. The transcript also has the following SNPs as listed in Table 18 (given according to their position on the nucleotide sequence, with the alternative nucleic acid listed; the last column indicates whether the SNP is known or not; the presence of known SNPs in variant protein HUMCA1XIA_P17 (SEQ ID NO:579) sequence provides support for the deduced sequence of this variant protein according to the present invention).

TABLE 18
Nucleic acid SNPs

| SNP position on | Alternative | Previously |
|---|---|---|
| nucleotide sequence | nucleic acid | known SNP? |
| 157 | A -> G | No |
| 241 | T -> A | Yes |
| 340 | T -> G | Yes |
| 456 | T -> G | Yes |
| 1150 | A -> C | Yes |

[1816] As noted above, cluster HUMCA1XIA features 46 segment(s), which were listed in Table 2 above and for which the sequence(s) are given at the end of the application. These segment(s) are portions of nucleic acid sequence(s) which are described herein separately because they are of particular interest. A description of each segment according to the present invention is now provided.

[1817] Segment cluster HUMCA1XIA_node_{—}0 (SEQ ID NO:317) according to the present invention is supported by 13 libraries. The number of libraries was determined as previously described. This segment can be found in the following transcript(s): HUMCA1XIA_T16 (SEQ ID NO:45), HUMCA1XIA_T17 (SEQ ID NO:46), HUMCA1XIA_T19 (SEQ ID NO:47) and HUMCA1XIA_T20 (SEQ ID NO:48). Table 19 below describes the starting and ending position of this segment on each transcript.

TABLE 19
Segment location on transcripts

| | Segment | Segment |
|---|---|---|
| | starting | ending |
| Transcript name | position | position |
| HUMCA1XIA_T16 (SEQ ID NO: 45) | 1 | 424 |
| HUMCA1XIA_T17 (SEQ ID NO: 46) | 1 | 424 |
| HUMCA1XIA_T19 (SEQ ID NO: 47) | 1 | 424 |
| HUMCA1XIA_T20 (SEQ ID NO: 48) | 1 | 424 |

[1818] Segment cluster HUMCA1XIA_node_{—}2 (SEQ ID NO:318) according to the present invention is supported by 9 libraries. The number of libraries was determined as previously described. This segment can be found in the following transcript(s): HUMCA1XIA_T16 (SEQ ID NO:45), HUMCA1XIA_T17 (SEQ ID NO:46), HUMCA1XIA_T19 (SEQ ID NO:47) and HUMCA1XIA_T20 (SEQ ID NO:48). Table 20 below describes the starting and ending position of this segment on each transcript.

TABLE 20
Segment location on transcripts

| | Segment | Segment |
|---|---|---|
| | starting | ending |
| Transcript name | position | position |
| HUMCA1XIA_T16 (SEQ ID NO: 45) | 425 | 592 |
| HUMCA1XIA_T17 (SEQ ID NO: 46) | 425 | 592 |
| HUMCA1XIA_T19 (SEQ ID NO: 47) | 425 | 592 |
| HUMCA1XIA_T20 (SEQ ID NO: 48) | 425 | 592 |

[1819] Segment cluster HUMCA1XIA_node_{—}4 (SEQ ID NO:319) according to the present invention is supported by 5 libraries. The number of libraries was determined as previously described. This segment can be found in the following transcript(s): HUMCA1XIA_T16 (SEQ ID NO:45), HUMCA1XIA_T17 (SEQ ID NO:46), HUMCA1XIA_T19 (SEQ ID NO:47) and HUMCA1XIA_T20 (SEQ ID NO:48). Table 21 below describes the starting and ending position of this segment on each transcript.

TABLE 21
Segment location on transcripts

| | Segment | Segment |
|---|---|---|
| | starting | ending |
| Transcript name | position | position |
| HUMCA1XIA_T16 (SEQ ID NO: 45) | 593 | 806 |
| HUMCA1XIA_T17 (SEQ ID NO: 46) | 593 | 806 |
| HUMCA1XIA_T19 (SEQ ID NO: 47) | 593 | 806 |
| HUMCA1XIA_T20 (SEQ ID NO: 48) | 593 | 806 |

[1820] Microarray (chip) data is also available for this segment as follows. As described above with regard to the cluster itself, various oligonucleotides were tested for being differentially expressed in various disease conditions, particularly cancer. The following oligonucleotides were found to hit this segment (in relation to colon cancer), shown in Table 22.

TABLE 22
Oligonucleotides related to this segment

| | Overexpressed | Chip |
|---|---|---|
| Oligonucleotide name | in cancers | reference |
| HUMCA1XIA_0_18_0 | colorectal cancer | Colon |
| (SEQ ID NO: 1412) | | |

[1821] Segment cluster HUMCA1XIA_node_{—}6 (SEQ ID NO:320) according to the present invention is supported by 5 libraries. The number of libraries was determined as previously described. This segment can be found in the following transcript(s): HUMCA1XIA_T16 (SEQ ID NO:45), HUMCA1XIA_T17 (SEQ ID NO:46), HUMCA1XIA_T19 (SEQ ID NO:47) and HUMCA1XIA_T20 (SEQ ID NO:48). Table 23 below describes the starting and ending position of this segment on each transcript.

TABLE 23
Segment location on transcripts

| | Segment | Segment |
|---|---|---|
| | starting | ending |
| Transcript name | position | position |
| HUMCA1XIA_T16 (SEQ ID NO: 45) | 807 | 969 |
| HUMCA1XIA_T17 (SEQ ID NO: 46) | 807 | 969 |
| HUMCA1XIA_T19 (SEQ ID NO: 47) | 807 | 969 |
| HUMCA1XIA_T20 (SEQ ID NO: 48) | 807 | 969 |

[1822] Microarray (chip) data is also available for this segment as follows. As described above with regard to the cluster itself, various oligonucleotides were tested for being differentially expressed in various disease conditions, particularly cancer. The following oligonucleotides were found to hit this segment, shown in Table 24.

TABLE 24
Oligonucleotides related to this segment

| | | Chip |
|---|---|---|
| Oligonucleotide name | Overexpressed in cancers | reference |
| HUMCA1XIA_0_18_0 | breast malignant tumors | BRS |
| (SEQ ID NO: 1412) | | |
| HUMCA1XIA_0_18_0 | colorectal cancer | Colon |
| (SEQ ID NO: 1412) | | |
| HUMCA1XIA_0_18_0 | lung malignant tumors | LUN |
| (SEQ ID NO: 1412) | | |

[1823] Segment cluster HUMCA1XIA_node_{—}8 (SEQ ID NO:321) according to the present invention is supported by 5 libraries. The number of libraries was determined as previously described. This segment can be found in the following transcript(s): HUMCA1XIA_T16 (SEQ ID NO:45), HUMCA1XIA_T17 (SEQ ID NO:46), HUMCA1XIA_T19 (SEQ ID NO:47) and HUMCA1XIA_T20 (SEQ ID NO:48). Table 25 below describes the starting and ending position of this segment on each transcript.

TABLE 25
Segment location on transcripts

| | Segment | Segment |
|---|---|---|
| | starting | ending |
| Transcript name | position | position |
| HUMCA1XIA_T16 (SEQ ID NO: 45) | 970 | 1098 |
| HUMCA1XIA_T17 (SEQ ID NO: 46) | 970 | 1098 |
| HUMCA1XIA_T19 (SEQ ID NO: 47) | 970 | 1098 |
| HUMCA1XIA_T20 (SEQ ID NO: 48) | 970 | 1098 |

[1824] Segment cluster HUMCA1XIA_node_{—}9 (SEQ ID NO:322) according to the present invention is supported by 2 libraries. The number of libraries was determined as previously described. This segment can be found in the following transcript(s): HUMCA1XIA_T20 (SEQ ID NO:48). Table 26 below describes the starting and ending position of this segment on each transcript.

TABLE 26
Segment location on transcripts

| | Segment | Segment |
|---|---|---|
| | starting | ending |
| Transcript name | position | position |
| HUMCA1XIA_T20 (SEQ ID NO: 48) | 1099 | 1271 |

[1825] Segment cluster HUMCA1XIA_node_{—}18 (SEQ ID NO:323) according to the present invention is supported by 6 libraries. The number of libraries was determined as previously described. This segment can be found in the following transcript(s): HUMCA1XIA_T16 (SEQ ID NO:45), HUMCA1XIA_T17 (SEQ ID NO:46) and HUMCA1XIA_T19 (SEQ ID NO:47). Table 27 below describes the starting and ending position of this segment on each transcript.

TABLE 27
Segment location on transcripts

| | Segment | Segment |
|---|---|---|
| | starting | ending |
| Transcript name | position | position |
| HUMCA1XIA_T16 (SEQ ID NO: 45) | 1309 | 1522 |
| HUMCA1XIA_T17 (SEQ ID NO: 46) | 1309 | 1522 |
| HUMCA1XIA_T19 (SEQ ID NO: 47) | 1309 | 1522 |

[1826] Segment cluster HUMCA1XIA_node_{—}54 (SEQ ID NO:324) according to the present invention is supported by 2 libraries. The number of libraries was determined as previously described. This segment can be found in the following transcript(s): HUMCA1XIA_T19 (SEQ ID NO:47). Table 28 below describes the starting and ending position of this segment on each transcript.

TABLE 28
Segment location on transcripts

| | Segment | Segment |
|---|---|---|
| | starting | ending |
| Transcript name | position | position |
| HUMCA1XIA_T19 (SEQ ID NO: 47) | 2407 | 2836 |

[1827] Segment cluster HUMCA1XIA_node_{—}55 (SEQ ID NO:325) according to the present invention is supported by 4 libraries. The number of libraries was determined as previously described. This segment can be found in the following transcript(s): HUMCA1XIA_T17 (SEQ ID NO:46) and HUMCA1XIA_T19 (SEQ ID NO:47). Table 29 below describes the starting and ending position of this segment on each transcript.

TABLE 29
Segment location on transcripts

| | Segment | |
|---|---|---|
| | starting | Segment |
| Transcript name | position | ending position |
| HUMCA1XIA_T17 (SEQ ID NO: 46) | 2461 | 2648 |
| HUMCA1XIA_T19 (SEQ ID NO: 47) | 2837 | 3475 |

[1828] Segment cluster HUMCA1XIA_node_{—}92 (SEQ ID NO:326) according to the present invention is supported by 2 libraries. The number of libraries was determined as previously described. This segment can be found in the following transcript(s): HUMCA1XIA_T16 (SEQ ID NO:45). Table 31 below describes the starting and ending position of this segment on each transcript.

TABLE 31
Segment location on transcripts

| | Segment | |
|---|---|---|
| | starting | Segment |
| Transcript name | position | ending position |
| HUMCA1XIA_T16 (SEQ ID NO: 45) | 3487 | 3615 |

[1829] According to an optional embodiment of the present invention, short segments related to the above cluster are also provided. These segments are up to about 120 bp in length, and so are included in a separate description.

[1830] Segment cluster HUMCA1XIA_node_{—}11 (SEQ ID NO:327) according to the present invention is supported by 3 libraries. The number of libraries was determined as previously described. This segment can be found in the following transcript(s): HUMCA1XIA_T16 (SEQ ID NO:45), HUMCA1XIA_T17 (SEQ ID NO:46) and HUMCA1XIA_T19 (SEQ ID NO:47). Table 32 below describes the starting and ending position of this segment on each transcript.

TABLE 32
Segment location on transcripts

| | Segment | |
|---|---|---|
| | starting | Segment |
| Transcript name | position | ending position |
| HUMCA1XIA_T16 (SEQ ID NO: 45) | 1099 | 1215 |
| HUMCA1XIA_T17 (SEQ ID NO: 46) | 1099 | 1215 |
| HUMCA1XIA_T19 (SEQ ID NO: 47) | 1099 | 1215 |

[1831] Segment cluster HUMCA1XIA_node_{—}15 (SEQ ID NO:328) according to the present invention is supported by 5 libraries. The number of libraries was determined as previously described. This segment can be found in the following transcript(s): HUMCA1XIA_T16 (SEQ ID NO:45), HUMCA1XIA_T17 (SEQ ID NO:46) and HUMCA1XIA_T19 (SEQ ID NO:47). Table 33 below describes the starting and ending position of this segment on each transcript.

TABLE 33
Segment location on transcripts

| | Segment | |
|---|---|---|
| | starting | Segment |
| Transcript name | position | ending position |
| HUMCA1XIA_T16 (SEQ ID NO: 45) | 1216 | 1308 |
| HUMCA1XIA_T17 (SEQ ID NO: 46) | 1216 | 1308 |
| HUMCA1XIA_T19 (SEQ ID NO: 47) | 1216 | 1308 |

[1832] Segment cluster HUMCA1XIA_node_{—}19 (SEQ ID NO:329) according to the present invention is supported by 3 libraries. The number of libraries was determined as previously described. This segment can be found in the following transcript(s): HUMCA1XIA_T16 (SEQ ID NO:45), HUMCA1XIA_T17 (SEQ ID NO:46) and HUMCA1XIA_T19 (SEQ ID NO:47). Table 34 below describes the starting and ending position of this segment on each transcript.

TABLE 34
Segment location on transcripts

| | Segment | |
|---|---|---|
| | starting | Segment |
| Transcript name | position | ending position |
| HUMCA1XIA_T16 (SEQ ID NO: 45) | 1523 | 1563 |
| HUMCA1XIA_T17 (SEQ ID NO: 46) | 1523 | 1563 |
| HUMCA1XIA_T19 (SEQ ID NO: 47) | 1523 | 1563 |

[1833] Segment cluster HUMCA1XIA_node_{—}21 (SEQ ID NO:330) according to the present invention is supported by 2 libraries. The number of libraries was determined as previously described. This segment can be found in the following transcript(s): HUMCA1XIA_T16 (SEQ ID NO:45), HUMCA1XIA_T17 (SEQ ID NO:46) and HUMCA1XIA_T19 (SEQ ID NO:47). Table 35 below describes the starting and ending position of this segment on each transcript.

TABLE 35
Segment location on transcripts

| | Segment | |
|---|---|---|
| | starting | Segment |
| Transcript name | position | ending position |
| HUMCA1XIA_T16 (SEQ ID NO: 45) | 1564 | 1626 |
| HUMCA1XIA_T17 (SEQ ID NO: 46) | 1564 | 1626 |
| HUMCA1XIA_T19 (SEQ ID NO: 47) | 1564 | 1626 |

[1834] Segment cluster HUMCA1XIA_node_{—}23 (SEQ ID NO:331) according to the present invention is supported by 3 libraries. The number of libraries was determined as previously described. This segment can be found in the following transcript(s): HUMCA1XIA_T16 (SEQ ID NO:45), HUMCA1XIA_T17 (SEQ ID NO:46) and HUMCA1XIA_T19 (SEQ ID NO:47). Table 36 below describes the starting and ending position of this segment on each transcript.

TABLE 36
Segment location on transcripts

| | Segment | |
|---|---|---|
| | starting | Segment |
| Transcript name | position | ending position |
| HUMCA1XIA_T16 (SEQ ID NO: 45) | 1627 | 1668 |
| HUMCA1XIA_T17 (SEQ ID NO: 46) | 1627 | 1668 |
| HUMCA1XIA_T19 (SEQ ID NO: 47) | 1627 | 1668 |

[1835] Segment cluster HUMCA1XIA_node_{—}25 (SEQ ID NO:332) according to the present invention is supported by 3 libraries. The number of libraries was determined as previously described. This segment can be found in the following transcript(s): HUMCA1XIA_T16 (SEQ ID NO:45), HUMCA1XIA_T17 (SEQ ID NO:46) and HUMCA1XIA_T19 (SEQ ID NO:47). Table 37 below describes the starting and ending position of this segment on each transcript.

TABLE 37
Segment location on transcripts

| | Segment | |
|---|---|---|
| | starting | Segment |
| Transcript name | position | ending position |
| HUMCA1XIA_T16 (SEQ ID NO: 45) | 1669 | 1731 |
| HUMCA1XIA_T17 (SEQ ID NO: 46) | 1669 | 1731 |
| HUMCA1XIA_T19 (SEQ ID NO: 47) | 1669 | 1731 |

[1836] Segment cluster HUMCA1XIA_node_{—}27 (SEQ ID NO:333) according to the present invention is supported by 2 libraries. The number of libraries was determined as previously described. This segment can be found in the following transcript(s): HUMCA1XIA_T16 (SEQ ID NO:45), HUMCA1XIA_T17 (SEQ ID NO:46) and HUMCA1XIA_T19 (SEQ ID NO:47). Table 38 below describes the starting and ending position of this segment on each transcript.

TABLE 38
Segment location on transcripts

| | Segment | |
|---|---|---|
| | starting | Segment |
| Transcript name | position | ending position |
| HUMCA1XIA_T16 (SEQ ID NO: 45) | 1732 | 1806 |
| HUMCA1XIA_T17 (SEQ ID NO: 46) | 1732 | 1806 |
| HUMCA1XIA_T19 (SEQ ID NO: 47) | 1732 | 1806 |

[1837] Segment cluster HUMCA1XIA_node_{—}29 (SEQ ID NO:334) according to the present invention is supported by 3 libraries. The number of libraries was determined as previously described. This segment can be found in the following transcript(s): HUMCA1XIA_T16 (SEQ ID NO:45), HUMCA1XIA_T17 (SEQ ID NO:46) and HUMCA1XIA_T19 (SEQ ID NO:47). Table 39 below describes the starting and ending position of this segment on each transcript.

TABLE 39
Segment location on transcripts

| | Segment | |
|---|---|---|
| | starting | Segment |
| Transcript name | position | ending position |
| HUMCA1XIA_T16 (SEQ ID NO: 45) | 1807 | 1890 |
| HUMCA1XIA_T17 (SEQ ID NO: 46) | 1807 | 1890 |
| HUMCA1XIA_T19 (SEQ ID NO: 47) | 1807 | 1890 |

[1838] Segment cluster HUMCA1XIA_node_{—}31 (SEQ ID NO:335) according to the present invention is supported by 3 libraries. The number of libraries was determined as previously described. This segment can be found in the following transcript(s): HUMCA1XIA_T16 (SEQ ID NO:45), HUMCA1XIA_T17 (SEQ ID NO:46) and HUMCA1XIA_T19 (SEQ ID NO:47). Table 40 below describes the starting and ending position of this segment on each transcript.

TABLE 40
Segment location on transcripts

| | Segment | |
|---|---|---|
| | starting | Segment |
| Transcript name | position | ending position |
| HUMCA1XIA_T16 (SEQ ID NO: 45) | 1891 | 1947 |
| HUMCA1XIA_T17 (SEQ ID NO: 46) | 1891 | 1947 |
| HUMCA1XIA_T19 (SEQ ID NO: 47) | 1891 | 1947 |

[1839] Segment cluster HUMCA1XIA_node_{—}33 (SEQ ID NO:336) according to the present invention is supported by 3 libraries. The number of libraries was determined as previously described. This segment can be found in the following transcript(s): HUMCA1XIA_T16 (SEQ ID NO:45), HUMCA1XIA_T17 (SEQ ID NO:46) and HUMCA1XIA_T19 (SEQ ID NO:47). Table 41 below describes the starting and ending position of this segment on each transcript.

TABLE 41
Segment location on transcripts

| | Segment | |
|---|---|---|
| | starting | Segment |
| Transcript name | position | ending position |
| HUMCA1XIA_T16 (SEQ ID NO: 45) | 1948 | 2001 |
| HUMCA1XIA_T17 (SEQ ID NO: 46) | 1948 | 2001 |
| HUMCA1XIA_T19 (SEQ ID NO: 47) | 1948 | 2001 |

[1840] Segment cluster HUMCA1XIA_node_{—}35 (SEQ ID NO:337) according to the present invention is supported by 4 libraries. The number of libraries was determined as previously described. This segment can be found in the following transcript(s): HUMCA1XIA_T16 (SEQ ID NO:45), HUMCA1XIA_T17 (SEQ ID NO:46) and HUMCA1XIA_T19 (SEQ ID NO:47). Table 42 below describes the starting and ending position of this segment on each transcript.

TABLE 42
Segment location on transcripts

| | Segment | |
|---|---|---|
| | starting | Segment |
| Transcript name | position | ending position |
| HUMCA1XIA_T16 (SEQ ID NO: 45) | 2002 | 2055 |
| HUMCA1XIA_T17 (SEQ ID NO: 46) | 2002 | 2055 |
| HUMCA1XIA_T19 (SEQ ID NO: 47) | 2002 | 2055 |

[1841] Segment cluster HUMCA1XIA_node_{—}37 (SEQ ID NO:338) according to the present invention is supported by 4 libraries. The number of libraries was determined as previously described. This segment can be found in the following transcript(s): HUMCA1XIA_T16 (SEQ ID NO:45), HUMCA1XIA_T17 (SEQ ID NO:46) and HUMCA1XIA_T19 (SEQ ID NO:47). Table 43 below describes the starting and ending position of this segment on each transcript.

TABLE 43
Segment location on transcripts

| | Segment | |
|---|---|---|
| | starting | Segment |
| Transcript name | position | ending position |
| HUMCA1XIA_T16 (SEQ ID NO: 45) | 2056 | 2109 |
| HUMCA1XIA_T17 (SEQ ID NO: 46) | 2056 | 2109 |
| HUMCA1XIA_T19 (SEQ ID NO: 47) | 2056 | 2109 |

[1842] Segment cluster HUMCA1XIA_node_{—}39 (SEQ ID NO:339) according to the present invention is supported by 5 libraries. The number of libraries was determined as previously described. This segment can be found in the following transcript(s): HUMCA1XIA_T16 (SEQ ID NO:45), HUMCA1XIA_T17 (SEQ ID NO:46) and HUMCA1XIA_T19 (SEQ ID NO:47). Table 44 below describes the starting and ending position of this segment on each transcript.

TABLE 44
Segment location on transcripts

| | Segment | |
|---|---|---|
| | starting | Segment |
| Transcript name | position | ending position |
| HUMCA1XIA_T16 (SEQ ID NO: 45) | 2110 | 2163 |
| HUMCA1XIA_T17 (SEQ ID NO: 46) | 2110 | 2163 |
| HUMCA1XIA_T19 (SEQ ID NO: 47) | 2110 | 2163 |

[1843] Segment cluster HUMCA1XIA_node_{—}41 (SEQ ID NO:340) according to the present invention is supported by 4 libraries. The number of libraries was determined as previously described. This segment can be found in the following transcript(s): HUMCA1XIA_T16 (SEQ ID NO:45), HUMCA1XIA_T17 (SEQ ID NO:46) and HUMCA1XIA_T19 (SEQ ID NO:47). Table 45 below describes the starting and ending position of this segment on each transcript.

TABLE 45
Segment location on transcripts

| | | |
|---|---|---|
| | Segment | Segment |
| | starting | ending |
| Transcript name | position | position |

| | | |
|---|---|---|
| HUMCA1XIA_T16 (SEQ ID NO: 45) | 2164 | 2217 |
| HUMCA1XIA_T17 (SEQ ID NO: 46) | 2164 | 2217 |
| HUMCA1XIA_T19 (SEQ ID NO: 47) | 2164 | 2217 |

[1844] Segment cluster HUMCA1XIA_node_{—}43 (SEQ ID NO:341) according to the present invention is supported by 5 libraries. The number of libraries was determined as previously described. This segment can be found in the following transcript(s): HUMCA1XIA_T16 (SEQ ID NO:45), HUMCA1XIA_T17 (SEQ ID NO:46) and HUMCA1XIA_T19 (SEQ ID NO:47). Table 46 below describes the starting and ending position of this segment on each transcript.

TABLE 46
Segment location on transcripts

| | Segment | Segment |
|---|---|---|
| | starting | ending |
| Transcript name | position | position |
| HUMCA1XIA_T16 (SEQ ID NO: 45) | 2218 | 2262 |
| HUMCA1XIA_T17 (SEQ ID NO: 46) | 2218 | 2262 |
| HUMCA1XIA_T19 (SEQ ID NO: 47) | 2218 | 2262 |

[1845] Segment cluster HUMCA1XIA_node_{—}45 (SEQ ID NO:342) according to the present invention is supported by 4 libraries. The number of libraries was determined as previously described. This segment can be found in the following transcript(s): HUMCA1XIA_T16 (SEQ ID NO:45) and HUMCA1XIA_T17 (SEQ ID NO:46). Table 47 below describes the starting and ending position of this segment on each transcript.

TABLE 47
Segment location on transcripts

| | Segment | Segment |
|---|---|---|
| | starting | ending |
| Transcript name | position | position |
| HUMCA1XIA_T16 (SEQ ID NO: 45) | 2263 | 2316 |
| HUMCA1XIA_T17 (SEQ ID NO: 46) | 2263 | 2316 |

[1846] Segment cluster HUMCA1XIA_node_{—}47 (SEQ ID NO:343) according to the present invention is supported by 5 libraries. The number of libraries was determined as previously described. This segment can be found in the following transcript(s): HUMCA1XIA_T16 (SEQ ID NO:45), HUMCA1XIA_T17 (SEQ ID NO:46) and HUMCA1XIA_T19 (SEQ ID NO:47). Table 48 below describes the starting and ending position of this segment on each transcript.

TABLE 48
Segment location on transcripts

| | Segment | Segment |
|---|---|---|
| | starting | ending |
| Transcript name | position | position |
| HUMCA1XIA_T16 (SEQ ID NO: 45) | 2317 | 2361 |
| HUMCA1XIA_T17 (SEQ ID NO: 46) | 2317 | 2361 |
| HUMCA1XIA_T19 (SEQ ID NO: 47) | 2263 | 2307 |

[1847] Segment cluster HUMCA1XIA_node_{—}49 (SEQ ID NO:344) according to the present invention is supported by 5 libraries. The number of libraries was determined as previously described. This segment can be found in the following transcript(s): HUMCA1XIA_T16 (SEQ ID NO:45), HUMCA1XIA_T17 (SEQ ID NO:46) and HUMCA1XIA_T19 (SEQ ID NO:47). Table 49 below describes the starting and ending position of this segment on each transcript.

TABLE 49
Segment location on transcripts

| | Segment | Segment |
|---|---|---|
| | starting | ending |
| Transcript name | position | position |
| HUMCA1XIA_T16 (SEQ ID NO: 45) | 2362 | 2415 |
| HUMCA1XIA_T17 (SEQ ID NO: 46) | 2362 | 2415 |
| HUMCA1XIA_T19 (SEQ ID NO: 47) | 2308 | 2361 |

[1848] Segment cluster HUMCA1XIA_node_{—}51 (SEQ ID NO:345) according to the present invention is supported by 7 libraries. The number of libraries was determined as previously described. This segment can be found in the following transcript(s): HUMCA1XIA_T16 (SEQ ID NO:45), HUMCA1XIA_T17 (SEQ ID NO:46) and HUMCA1XIA_T19 (SEQ ID NO:47). Table 50 below describes the starting and ending position of this segment on each transcript.

TABLE 50
Segment location on transcripts

| | Segment | Segment |
|---|---|---|
| | starting | ending |
| Transcript name | position | position |
| HUMCA1XIA_T16 (SEQ ID NO: 45) | 2416 | 2460 |
| HUMCA1XIA_T17 (SEQ ID NO: 46) | 2416 | 2460 |
| HUMCA1XIA_T19 (SEQ ID NO: 47) | 2362 | 2406 |

[1849] Segment cluster HUMCA1XIA_node_{—}57 (SEQ ID NO:346) according to the present invention is supported by 4 libraries. The number of libraries was determined as previously described. This segment can be found in the following transcript(s): HUMCA1XIA_T16 (SEQ ID NO:45). Table 51 below describes the starting and ending position of this segment on each transcript.

TABLE 51
Segment location on transcripts

| | Segment | Segment |
|---|---|---|
| | starting | ending |
| Transcript name | position | position |
| HUMCA1XIA_T16 (SEQ ID NO: 45) | 2461 | 2514 |

[1850] Segment cluster HUMCA1XIA_node_{—}59 (SEQ ID NO:347) according to the present invention is supported by 3 libraries. The number of libraries was determined as previously described. This segment can be found in the following transcript(s): HUMCA1XIA_T16 (SEQ ID NO:45). Table 52 below describes the starting and ending position of this segment on each transcript.

TABLE 52
Segment location on transcripts

| | Segment | Segment |
|---|---|---|
| | starting | ending |
| Transcript name | position | position |
| HUMCA1XIA_T16 (SEQ ID NO: 45) | 2515 | 2559 |

[1851] Segment cluster HUMCA1XIA_node_{—}62 (SEQ ID NO:348) according to the present invention is supported by 3 libraries. The number of libraries was determined as previously described. This segment can be found in the following transcript(s): HUMCA1XIA_T16 (SEQ ID NO:45). Table 53 below describes the starting and ending position of this segment on each transcript.

TABLE 53
Segment location on transcripts

| | Segment | Segment |
|---|---|---|
| | starting | ending |
| Transcript name | position | position |
| HUMCA1XIA_T16 (SEQ ID NO: 45) | 2560 | 2613 |

[1852] Segment cluster HUMCA1XIA_node_{—}64 (SEQ ID NO:349) according to the present invention is supported by 4 libraries. The number of libraries was determined as previously described. This segment can be found in the following transcript(s): HUMCA1XIA_T16 (SEQ ID NO:45). Table 54 below describes the starting and ending position of this segment on each transcript.

TABLE 54
Segment location on transcripts

| | Segment | Segment |
|---|---|---|
| | starting | ending |
| Transcript name | position | position |
| HUMCA1XIA_T16 (SEQ ID NO: 45) | 2614 | 2658 |

[1853] Segment cluster HUMCA1XIA_node_{—}66 (SEQ ID NO:350) according to the present invention is supported by 4 libraries. The number of libraries was determined as previously described. This segment can be found in the following transcript(s): HUMCA1XIA_T16 (SEQ ID NO:45). Table 55 below describes the starting and ending position of this segment on each transcript.

TABLE 55
Segment location on transcripts

| | Segment | Segment |
|---|---|---|
| | starting | ending |
| Transcript name | position | position |
| HUMCA1XIA_T16 (SEQ ID NO: 45) | 2659 | 2712 |

[1854] Segment cluster HUMCA1XIA_node_{—}68 (SEQ ID NO:351) according to the present invention is supported by 7 libraries. The number of libraries was determined as previously described. This segment can be found in the following transcript(s): HUMCA1XIA_T16 (SEQ ID NO:45). Table 56 below describes the starting and ending position of this segment on each transcript.

TABLE 56
Segment location on transcripts

| | Segment | Segment |
|---|---|---|
| | starting | ending |
| Transcript name | position | position |
| HUMCA1XIA_T16 (SEQ ID NO: 45) | 2713 | 2820 |

[1855] Segment cluster HUMCA1XIA_node_{—}70 (SEQ ID NO:352) according to the present invention is supported by 6 libraries. The number of libraries was determined as previously described. This segment can be found in the following transcript(s): HUMCA1XIA_T16 (SEQ ID NO:45). Table 57 below describes the starting and ending position of this segment on each transcript.

TABLE 57
Segment location on transcripts

| | Segment | Segment |
|---|---|---|
| | starting | ending |
| Transcript name | position | position |
| HUMCA1XIA_T16 (SEQ ID NO: 45) | 2821 | 2874 |

[1856] Segment cluster HUMCA1XIA_node_{—}72 (SEQ ID NO:353) according to the present invention is supported by 6 libraries. The number of libraries was determined as previously described. This segment can be found in the following transcript(s): HUMCA1XIA_T16 (SEQ ID NO:45). Table 58 below describes the starting and ending position of this segment on each transcript.

TABLE 58
Segment location on transcripts

| | Segment | Segment |
|---|---|---|
| | starting | ending |
| Transcript name | position | position |
| HUMCA1XIA_T16 (SEQ ID NO: 45) | 2875 | 2928 |

[1857] Segment cluster HUMCA1XIA_node_{—}74 (SEQ ID NO:354) according to the present invention is supported by 5 libraries. The number of libraries was determined as previously described. This segment can be found in the following transcript(s): HUMCA1XIA_T16 (SEQ ID NO:45). Table 59 below describes the starting and ending position of this segment on each transcript.

TABLE 59
Segment location on transcripts

| | Segment | Segment |
|---|---|---|
| | starting | ending |
| Transcript name | position | position |
| HUMCA1XIA_T16 (SEQ ID NO: 45) | 2929 | 2973 |

[1858] Segment cluster HUMCA1XIA_node_{—}76 (SEQ ID NO:355) according to the present invention is supported by 6 libraries. The number of libraries was determined as previously described. This segment can be found in the following transcript(s): HUMCA1XIA_T16 (SEQ ID NO:45). Table 60 below describes the starting and ending position of this segment on each transcript.

TABLE 60
Segment location on transcripts

| | Segment | |
|---|---|---|
| | starting | Segment |
| Transcript name | position | ending position |
| HUMCA1XIA_T16 (SEQ ID NO: 45) | 2974 | 3027 |

[1859] Segment cluster HUMCA1XIA_node_{—}78 (SEQ ID NO:356) according to the present invention is supported by 6 libraries. The number of libraries was determined as previously described. This segment can be found in the following transcript(s): HUMCA1XIA_T16 (SEQ ID NO:45). Table 61 below describes the starting and ending position of this segment on each transcript.

TABLE 61
Segment location on transcripts

| | Segment | |
|---|---|---|
| | starting | Segment |
| Transcript name | position | ending position |
| HUMCA1XIA_T16 (SEQ ID NO: 45) | 3028 | 3072 |

[1860] Segment cluster HUMCA1XIA_node_{—}81 (SEQ ID NO:357) according to the present invention is supported by 8 libraries. The number of libraries was determined as previously described. This segment can be found in the following transcript(s): HUMCA1XIA_T16 (SEQ ID NO:45). Table 62 below describes the starting and ending position of this segment on each transcript.

TABLE 62
Segment location on transcripts

| | Segment | |
|---|---|---|
| | starting | Segment |
| Transcript name | position | ending position |
| HUMCA1XIA_T16 (SEQ ID NO: 45) | 3073 | 3126 |

[1861] Segment cluster HUMCA1XIA_node_{—}83 (SEQ ID NO:358) according to the present invention is supported by 7 libraries. The number of libraries was determined as previously described. This segment can be found in the following transcript(s): HUMCA1XIA_T16 (SEQ ID NO:45). Table 63 below describes the starting and ending position of this segment on each transcript.

TABLE 63
Segment location on transcripts

| | Segment | |
|---|---|---|
| | starting | Segment |
| Transcript name | position | ending position |
| HUMCA1XIA_T16 (SEQ ID NO: 45) | 3127 | 3180 |

[1862] Segment cluster HUMCA1XIA_node_{—}85 (SEQ ID NO:359) according to the present invention is supported by 6 libraries. The number of libraries was determined as previously described. This segment can be found in the following transcript(s): HUMCA1XIA_T16 (SEQ ID NO:45). Table 64 below describes the starting and ending position of this segment on each transcript.

TABLE 64
Segment location on transcripts

| | Segment | |
|---|---|---|
| | starting | Segment |
| Transcript name | position | ending position |
| HUMCA1XIA_T16 (SEQ ID NO: 45) | 3181 | 3234 |

[1863] Segment cluster HUMCA1XIA_node_{—}87 (SEQ ID NO:360) according to the present invention is supported by 10 libraries. The number of libraries was determined as previously described. This segment can be found in the following transcript(s): HUMCA1XIA_T16 (SEQ ID NO:45). Table 65 below describes the starting and ending position of this segment on each transcript.

TABLE 65
Segment location on transcripts

| | Segment | |
|---|---|---|
| | starting | Segment |
| Transcript name | position | ending position |
| HUMCA1XIA_T16 (SEQ ID NO: 45) | 3235 | 3342 |

[1864] Segment cluster HUMCA1XIA_node_{—}89 (SEQ ID NO:361) according to the present invention is supported by 9 libraries. The number of libraries was determined as previously described. This segment can be found in the following transcript(s): HUMCA1XIA_T16 (SEQ ID NO:45). Table 66 below describes the starting and ending position of this segment on each transcript.

TABLE 66
Segment location on transcripts

| | Segment | |
|---|---|---|
| | starting | Segment |
| Transcript name | position | ending position |
| HUMCA1XIA_T16 (SEQ ID NO: 45) | 3343 | 3432 |

[1865] Segment cluster HUMCA1XIA_node_{—}91 (SEQ ID NO:362) according to the present invention is supported by 11 libraries. The number of libraries was determined as previously described. This segment can be found in the following transcript(s): HUMCA1XIA_T16 (SEQ ID NO:45). Table 67 below describes the starting and ending position of this segment on each transcript.

TABLE 67
Segment location on transcripts

| | Segment | |
|---|---|---|
| | starting | Segment |
| Transcript name | position | ending position |
| HUMCA1XIA_T16 (SEQ ID NO: 45) | 3433 | 3486 |

### Variant Protein Alignment to the Previously Known Protein:

Sequence name: CA1B_HUMAN_V5 (SEQ ID NO: 634)
Sequence documentation:
Alignment of: HUMCA1XIA_P14 (SEQ ID NO: 576) × CA1B_HUMAN_V5 (SEQ ID
NO: 634)
Alignment segment 1/1:

| | | | |
|---|---|---|---|
| Quality: | 10456.00 | Escore: | 0 |
| Matching length: | 1058 | Total length: | 1058 |
| Matching Percent Similarity: | 99.91 | Matching Percent Identity: | 99.91 |
| Total Percent Similarity: | 99.91 | Total Percent Identity: | 99.91 |
| Gaps: | 0 | | |

Alignment:

[chemical structure]

[chemical structure]

[chemical structure]

[chemical structure]

[chemical structure]

[chemical structure]

[chemical structure]

[chemical structure]

[chemical structure]

[chemical structure]

[chemical structure]

[chemical structure]

[chemical structure]

[chemical structure]

[chemical structure]

[chemical structure]

[chemical structure]

[chemical structure]

[chemical structure]

[chemical structure]

[chemical structure]

[chemical structure]

Sequence name: CA1B_HUMAN (SEQ ID NO: 633)
Sequence documentation:
Alignment of:
HUMCA1XIA_P15 (SEQ ID NO: 577) × CA1B_HUMAN (SEQ ID NO: 633)
Alignment segment 1/1:

| | | | |
|---|---|---|---|
| Quality: | 7073.00 | Escore: | 0 |
| Matching length: | 714 | Total length: | 714 |
| Matching Percent Similarity: | 100.00 | Matching Percent Identity: | 100.00 |
| Total Percent Similarity: | 100.00 | Total Percent Identity: | 100.00 |
| Gaps: | 0 | | |

Alignment:

[chemical structure]

[chemical structure]

[chemical structure]

[chemical structure]

[chemical structure]

[chemical structure]

[chemical structure]

[chemical structure]

[chemical structure]

[chemical structure]

[chemical structure]

[chemical structure]

[chemical structure]

[chemical structure]

[chemical structure]

Sequence name: CA1B_HUMAN (SEQ ID NO: 633)
Sequence documentation:
Alignment of:
HUMCA1XIA_P16 (SEQ ID NO: 578) × CA1B_HUMAN (SEQ ID NO: 633)
Alignment segment 1/1:

| | | | |
|---|---|---|---|
| Quality: | 6795.00 | Escore: | 0 |
| Matching length: | 696 | Total length: | 714 |
| Matching Percent Similarity: | 100.00 | Matching Percent Identity: | 100.00 |
| Total Percent Similarity: | 97.48 | Total Percent Identity: | 97.48 |
| Gaps: | 1 | | |

Alignment:

[chemical structure]

[chemical structure]

[chemical structure]

[chemical structure]

[chemical structure]

[chemical structure]

[chemical structure]

[chemical structure]

[chemical structure]

[chemical structure]

[chemical structure]

[chemical structure]

[chemical structure]

[chemical structure]

[chemical structure]

Sequence name: CA1B HUMAN (SEQ ID NO: 633)
Sequence documentation:
Alignment of:
HUMCA1XIA_P17 (SEQ ID NO: 579) × CA1B_HUMAN (SEQ ID NO: 633)
Alignment segment 1/1:

| | | | |
|---|---|---|---|
| Quality: | 2561.00 | Escore: | 0 |
| Matching length: | 260 | Total length: | 260 |
| Matching Percent Similarity: | 100.00 | Matching Percent Identity: | 100.00 |
| Total Percent Similarity: | 100.00 | Total Percent Identity: | 100.00 |
| Gaps: | 0 | | |

Alignment:

[chemical structure]

[chemical structure]

[chemical structure]

[chemical structure]

[chemical structure]

[chemical structure]

### Experimental Results for Seg55 Amplicon Expression in Cancerous Colon Tissue

[1867] Expression of Homo sapiens collagen, type XI, alpha 1 (COL11A1) transcripts detectable by or according to seg55—HUMCA1XIA_seg55 amplicon (SEQ ID NO:1586) and primers HUMCA1XIA_seg55F (SEQ ID NO: 1584) and HUMCA1XIA_seg55R (SEQ ID NO:1585) was measured by real time PCR. Non-detected sample no. 63 was assigned Ct value of 41 and was calculated accordingly. In parallel the expression of several housekeeping genes —HPRT1 (GenBank Accession No. NM_{—}000194 (SEQ ID NO: 1577); amplicon—HPRT1-amplicon (SEQ ID NO: 612)), PBGD (GenBank Accession No. BC019323 (SEQ ID NO: 1576); amplicon—PBGD-amplicon (SEQ ID NO: 531)), and G6PD (GenBank Accession No. NM_{—}000402 (SEQ ID NO: 1578); G6PD amplicon (SEQ ID NO: 615)) was measured similarly. For each RT sample, the expression of the above amplicon was normalized to the normalization factor calculated from the expression of these house keeping genes as described in normalization method 2 in the “materials and methods” section. The normalized quantity of each RT sample was then divided by the median of the quantities of the normal samples (sample numbers 42, 43, 44, 45, 46, 47, 48, 49, 50, 51, 52, 53, 54 and 55, Table 1_{—}1 above), to obtain a value of fold up-regulation for each sample relative to median of the normal samples.

[1868] FIG. 77 is a histogram showing over expression of the above-indicated Homo sapiens collagen, type XI, alpha 1 (COL11A1) transcripts in cancerous Colon samples relative to the normal samples.

[1869] As is evident from FIG. 77, the expression of Homo sapiens collagen, type XI, alpha 1 (COL11A1) transcripts detectable by the above amplicon in cancer samples was significantly higher than in the non-cancerous samples (sample numbers 42, 43, 44, 45, 46, 47, 48, 49, 50, 51, 52, 53, 54 and 55, Table 1_{—}1 above). Notably an over-expression of at least 5 fold was found in 18 out of 37 adenocarcinoma samples.

[1870] Statistical analysis was applied to verify the significance of these results, as described below.

[1871] The P value for the difference in the expression levels of Homo sapiens collagen, type XI, alpha 1 (COL11A1) transcripts detectable by the above amplicon in Colon cancer samples versus the normal tissue samples was determined by T test as 3.33e-005.

[1872] Threshold of 5 fold over expression was found to differentiate between cancer and normal samples with P value of 2.58e-006 as checked by exact Fisher test.

[1873] The above values demonstrate statistical significance of the results.

[1874] Primer pairs are also optionally and preferably encompassed within the present invention; for example, for the above experiment, the following primer pair was used as a non-limiting illustrative example only of a suitable primer pair: HUMCA1XIA_seg55F (SEQ ID NO: 1584) forward primer; and HUMCA1XIA_seg55R (SEQ ID NO: 1585) reverse primer.

[1875] The present invention also preferably encompasses any amplicon obtained through the use of any suitable primer pair; for example, for the above experiment, the following amplicon was obtained as a non-limiting illustrative example only of a suitable amplicon: HUMCA1XIA_seg55 (SEQ ID NO: 1586).

Forward Primer
(HUMCA1XIA_seg55F (SEQ ID NO: 1584)):
>HUMCA1XIA_seg55F

(SEQ ID NO: 1584)

TTCTCATAGTATTCCATTGATTGGGTA
Reverse Primer
(HUMCA1XIA_seg55R (SEQ ID NO: 1585)):
>HUMCA1XIA_seg55R

(SEQ ID NO: 1585)

CACCGGTATGGAGAATAGCGA
Amplicon (HUMCA1XIA_seg55) (SEQ ID NO: 1586):
>HUMCA1XIA_seg55

(SEQ ID NO: 1586)

TTCTCATAGTATTCCATTGATTGGGTATACCAGGTTCTGTTTACTTTTAC
TTGGCAGTTGATAGAATAGGTGTAGTTTATACTTTTTCGCTATTCTCCAT
ACCGGTG

### Experimental Results for Seg55 Amplicon Expression in Normal Tissue

[1876] Expression of Homo sapiens collagen, type XI, alpha 1 (COL11 A1) transcripts detectable by or according to seg55—HUMCA1XIA_seg55 amplicon (SEQ ID NO: 1586) and primers HUMCA1XIA_seg55F (SEQ ID NO: 1584) and HUMCA1XIA_seg55R (SEQ ID NO: 1585) was measured by real time PCR. In parallel the expression of several housekeeping genes—SDHA (GenBank Accession No. NM_{—}004168 (SEQ ID NO: 1583); amplicon —SDHA-amplicon (SEQ ID NO: 1273)), Ubiquitin (GenBank Accession No. BC000449 (SEQ ID NO: 1582); amplicon—Ubiquitin-amplicon (SEQ ID NO: 1270)) and TATA box (GenBank Accession No. NM_{—}003194 (SEQ ID NO: 1581); TATA amplicon (SEQ ID NO: 1267)) was measured similarly. For each RT sample, the expression of the above amplicon was normalized to the normalization factor calculated from the expression of these house keeping genes as described in normalization method 2 in the “materials and methods” section. The normalized quantity of each RT sample was then divided by the median of the quantities of the colon samples (sample numbers 3, 4 and 5, Table 2_{—}1 above), to obtain a value of relative expression of each sample relative to median of the colon samples.

[1877] Results are shown in FIG. 78. Low expression was seen in all normal tissues, although a certain level of expression was seen in brain tissue samples.

Forward Primer
(HUMCA1XIA_seg55F (SEQ ID NO: 1584)):
>HUMCA1XIA_seg55F

(SEQ ID NO: 1584)

TTCTCATAGTATTCCATTGATTGGGTA
Reverse Primer
(HUMCA1XIA_seg55R (SEQ ID NO: 1585)):
>HUMCA1XIA_seg55R

(SEQ ID NO: 1585)

CACCGGTATGGAGAATAGCGA
Amplicon (HUMCA1XIA_seg55) (SEQ ID NO: 1586):
>HUMCA1XIA_seg55

(SEQ ID NO: 1586)

TTCTCATAGTATTCCATTGATTGGGTATACCAGGTTCTGTTTACTTTTAC
TTGGCAGTTGATAGAATAGGTGTAGTTTATACTTTTTCGCTATTCTCCAT
ACCGGTG

Expression of Homo sapiens Collagen, Type XI, Alpha 1 (COL11A1) HUMCA1XIA Transcripts which are Detectable by Amplicon as Depicted in Sequence Name HUMCA1XIA_Seg54-55F2R2 (SEQ ID NO: 1589) in Normal and Cancerous Colon Tissues

[1878] Expression of Homo sapiens collagen, type XI, alpha 1 (COL11A1) transcripts detectable by or according to seg54-55F2R2—HUMCA1XIA_seg54-55F2R2 (SEQ ID NO: 1589) amplicon and primers HUMCA1XIA_seg54-55F2 (SEQ ID NO: 1587) and HUMCA1XIA_seg54-55R2 (SEQ ID NO: 1588) was measured by real time PCR. Non-detected samples (sample(s) no. 28, 36 and 63) were assigned Ct value of 41 and were calculated accordingly. In parallel the expression of several housekeeping genes —HPRT1 (GenBank Accession No. NM_{—}000194 (SEQ ID NO: 1577); amplicon—HPRT1-amplicon (SEQ ID NO: 612)), PBGD (GenBank Accession No. BC019323 (SEQ ID NO: 1576); amplicon—PBGD-amplicon (SEQ ID NO: 531)), RPS27A (GenBank Accession No. NM_{—}002954 (SEQ ID NO: 1579); RPS27A amplicon (SEQ ID NO: 1261)) and G6PD (GenBank Accession No. NM_{—}000402 (SEQ ID NO: 1578); G6PD amplicon (SEQ ID NO: 615)) was measured similarly. For each RT sample, the expression of the above amplicon was normalized to the normalization factor calculated from the expression of these house keeping genes as described in normalization method 2 in the “materials and methods” section. The normalized quantity of each RT sample was then divided by the median of the quantities of the normal samples (sample numbers 42, 43, 44, 45, 46, 47, 48, 49, 50, 51, 52, 53, 54 and 55, Table 1_{—}1 above), to obtain a value of fold up-regulation for each sample relative to median of the normal samples.

[1879] FIG. 79 is a histogram showing over expression of the above-indicated Homo sapiens collagen, type XI, alpha 1 (COL11A1) transcripts in cancerous Colon samples relative to the normal samples.

[1880] As is evident from FIG. 79, the expression of Homo sapiens collagen, type XI, alpha 1 (COL11A1) transcripts detectable by the above amplicon in cancer samples was significantly higher than in the non-cancerous samples (sample numbers 42, 43, 44, 45, 46, 47, 48, 49, 50, 51, 52, 53, 54 and 55, Table 1_{—}1 above). Notably an over-expression of at least 5 fold was found in 27 out of 55 adenocarcinoma samples.

[1881] Statistical analysis was applied to verify the significance of these results, as described below.

[1882] The P value for the difference in the expression levels of Homo sapiens collagen, type XI, alpha 1 (COL11A1) transcripts detectable by the above amplicon in Colon cancer samples versus the normal tissue samples was determined by T test as 7.01e-005.

[1883] Threshold of 5 fold over expression was found to differentiate between cancer and normal samples with P value of 5.09e-007 as checked by exact Fisher test.

[1884] The above values demonstrate statistical significance of the results.

[1885] Primer pairs are also optionally and preferably encompassed within the present invention; for example, for the above experiment, the following primer pair was used as a non-limiting illustrative example only of a suitable primer pair: HUMCA1XIA_seg54-55F2 (SEQ ID NO: 1587) forward primer; and HUMCA1XIA_seg54-55R2 (SEQ ID NO: 1588) reverse primer.

[1886] The present invention also preferably encompasses any amplicon obtained through the use of any suitable primer pair; for example, for the above experiment, the following amplicon was obtained as a non-limiting illustrative example only of a suitable amplicon: HUMCA1XIA_seg54-55F2R2 (SEQ ID NO: 1588).

Forward Primer
(HUMCA1XIA_seg54-55F2 (SEQ ID NO: 1587)):
>HUMCA1XIA_seg54-55F2

(SEQ ID MO: 1587)

TCGAAGTGTAATTTAAATACTATAAATATTCCCTT
Reverse Primer
(HUMCA1XIA_seg54-55R2 (SEQ ID NO: 1588)):
>HUMCA1XIA_seg54-55R2

(SEQ ID NO: 1588)

GGAAACATGGACTGAATATTAACACG
Amplicon
(HUMCA1XIA_seg54-55F2R2 (SEQ ID NO: 1589)):
>HUMCA1XIA_seg54-55F2R2

(SEQ ID NO: 1589)

TCGAAGTGTAATTTAAATACTATAAATATTCCCTTGTTTTAAGTGTACAA
GTGAATTATTTTTACTAAATTTACAGATGTGCTGCAATCTAAGTTTCGGA
ATACTTATACCACTCCAGAAATAATCCTCGTGTTAATATTCAGTCCATGT
TTCC

Expression of Homo sapiens Collagen, Type XI, Alpha 1 (COL11A1) HUMCA1XIA Transcripts which are Detectable by Amplicon as Depicted in Sequence Name HUMCA1XIA_Seg54-55F2R2 (SEQ ID NO:1589) in Different Normal Tissues

[1887] Expression of Homo sapiens collagen, type XI, alpha 1 (COL11A1) transcripts detectable by or according to seg54-55F2R2—HUMCA1XIA_seg54-55F2R2 amplicon (SEQ ID NO: 1589) and primers HUMCA1XIA_seg54-55F2 (SEQ ID NO: 1587) and HUMCA1XIA_seg54-55R2 (SEQ ID NO: 1588) was measured by real time PCR. Non-detected samples (samples no. 16, 19, 50, 51, 52, 56, 65, 67 and 70) were assigned Ct value of 41 and were calculated accordingly. In parallel the expression of several housekeeping genes—SDHA (GenBank Accession No. NM_{—}004168 (SEQ ID NO: 1583); amplicon—SDHA-amplicon (SEQ ID NO: 1273)), Ubiquitin (GenBank Accession No. BC000449 (SEQ ID NO: 1582); amplicon—Ubiquitin-amplicon (SEQ ID NO: 1270)), RPL19 (GenBank Accession No. NM_{—}000981 (SEQ ID NO: 1580); RPL19 amplicon (SEQ ID NO: 1264)) and TATA box (GenBank Accession No. NM_{—}003194 (SEQ ID NO: 1581); TATA amplicon (SEQ ID NO: 1267)) was measured similarly. For each RT sample, the expression of the above amplicon was normalized to the normalization factor calculated from the expression of these house keeping genes as described in normalization method 2 in the “materials and methods” section. The normalized quantity of each RT sample was then divided by the median of the quantities of the colon samples (sample numbers 3, 4 and 5, Table 2_{—}1 above), to obtain a value of relative expression of each sample relative to median of the colon samples.

Forward Primer
(HUMCA1XIA_seg54-55F2 (SEQ ID NO: 1587)):
>HUMCA1XIA_seg54-55F2

(SEQ ID NO: 1587)

TCGAAGTGTAATTTAAATACTATAAATATTCCCTT
Reverse Primer
(HUMCA1XIA_seg54-55R2 (SEQ ID NO: 1588)):
>HUMCA1XIA_seg54-55R2

(SEQ ID NO: 1588)

GGAAACATGGACTGAATATTAACACG
Amplicon
(HUMCA1XIA_seg54-55F2R2) (SEQ ID NO: 1589):
>HUMCA1XIA_seg54-55F2R2

(SEQ ID NO: 1589)

TCGAAGTGTAATTTAAATACTATAAATATTCCCTTGTTTTAAGTGTACAA
GTGAATTATTTTTACTAAATTTACAGATGTGCTGCAATCTAAGTTTCGGA
ATACTTATACCACTCCAGAAATAATCCTCGTGTTAATATTCAGTCCATGT
TTCC

[1888] The results are shown in FIG. 80, demonstrating expression of Homo sapiens collagen, type XI, alpha 1 (COL11A1) HUMCA1XIA transcripts which are detectable by amplicon as depicted in sequence name HUMCA1XIA_seg54-55F2R2 (SEQ ID NO: 1589) in different normal tissues.

Expression of Homo sapiens Collagen, Type XI, Alpha 1 (COL11A1) HUMCA1XIA Transcripts which are Detectable by Amplicon as Depicted in Sequence Name HUMCA1XIA_Seg52-56F1R1 (SEQ ID NO: 1592) in Normal and Cancerous Colon Tissues

[1889] Expression of Homo sapiens collagen, type XI, alpha 1 (COL11A1) transcripts detectable by or according to seg52-56F1R1—HUMCA1XIA_seg52-56F1R1 (SEQ ID NO: 1592) amplicon and primers HUMCA1XIA_seg52-56F1 (SEQ ID NO: 1590) and HUMCA1XIA_seg52-56R1 (SEQ ID NO: 1591) was measured by real time PCR. In parallel the expression of several housekeeping genes —HPRT1 (GenBank Accession No. NM_{—}000194 (SEQ ID NO: 1577); amplicon—HPRT1-amplicon (SEQ ID NO: 612)), PBGD (GenBank Accession No. BC019323 (SEQ ID NO: 1576); amplicon—PBGD-amplicon (SEQ ID NO: 531)), RPS27A (GenBank Accession No. NM_{—}002954 (SEQ ID NO: 1579); RPS27A amplicon (SEQ ID NO: 1261)) and G6PD (GenBank Accession No. NM_{—}000402 (SEQ ID NO: 1578); G6PD amplicon (SEQ ID NO: 615)) was measured similarly. For each RT sample, the expression of the above amplicon was normalized to the normalization factor calculated from the expression of these house keeping genes as described in normalization method 2 in the “materials and methods” section. The normalized quantity of each RT sample was then divided by the median of the quantities of the normal samples (sample numbers 42-70, Table 1_{—}1 above), to obtain a value of fold differential expression for each sample relative to median of the normal samples.

[1890] In one experiment that was carried out no differential expression in the cancerous samples relative to the normal samples was observed.

[1891] Primer pairs are also optionally and preferably encompassed within the present invention; for example, for the above experiment, the following primer pair was used as a non-limiting illustrative example only of a suitable primer pair: HUMCA1XIA_seg52-56F1 (SEQ ID NO: 1590) forward primer; and HUMCA1XIA_seg52-56R1 (SEQ ID NO: 1591) reverse primer.

[1892] The present invention also preferably encompasses any amplicon obtained through the use of any suitable primer pair; for example, for the above experiment, the following amplicon was obtained as a non-limiting illustrative example only of a suitable amplicon: HUMCA1XIA_seg52-56F1R1 (SEQ ID NO: 1592).

Forward Primer
(HUMCA1XIA_seg52-56F1 (SEQ ID NO: 1590)):
>HUMCA1XIA_seg52-56F1

(SEQ ID NO: 1590)

GGTCTTCCTGGTCCACAAGGT
Reverse Primer
(HUMCA1XIA_seg52-56R1 (SEQ ID NO: 1591)):
>HUMCA1XIA_seg52-56R1

(SEQ ID NO: 1591)

GAATATTAACACGAGGATTATTTCTGGAG
Amplicon
(HUMCA1XIA_seg52-56F1R1 (SEQ ID NO: 1592)):
>HUMCA1XIA_seg52-5GF1R1

(SEQ ID NO: 1592)

GGTCTTCCTGGTCCACAAGGTCCAATTGGTCCTCCTGGTGAAAAAATGTG
CTGCAATCTAAGTTTCGGAATACTTATACCACTCCAGAAATAATCCTCGT
GTTAATATTC

### Description for Cluster HSS100PCB

[1893] Cluster HSS100PCB features 1 transcript(s) and 3 segment(s) of interest, the names for which are given in Tables 1 and 2, respectively, the sequences themselves are given at the end of the application. The selected protein variants are given in table 3.

TABLE 1
Transcripts of interest

| Transcript Name | SEQ ID NO: |
|---|---|
| HSS100PCB_T1 | 49 |

TABLE 2
Segments of interest

| Segment Name | SEQ ID NO: |
|---|---|
| HSS100PCB_node_3 | 363 |
| HSS100PCB_node_4 | 364 |
| HSS100PCB_node_5 | 365 |

TABLE 3
Proteins of interest

| Protein Name | SEQ ID NO: | Corresponding Transcript(s) |
|---|---|---|
| HSS100PCB_P3 | 580 | HSS100PCB_T1 (SEQ ID NO: 49) |

[1894] These sequences are variants of the known protein S-100P protein (SwissProt accession identifier S10P_HUMAN), SEQ ID NO: 635, referred to herein as the previously known protein.

[1895] The sequence for protein S-100P protein (SEQ ID NO:635) is given at the end of the application, as “S-100P protein amino acid sequence”. Known polymorphisms for this sequence are as shown in Table 4.

TABLE 4
Amino acid mutations for Known Protein

| SNP position(s) on amino | |
|---|---|
| acid sequence | Comment |
| 32 | E -> T |
| 44 | F -> E |

[1896] The following GO Annotation(s) apply to the previously known protein. The following annotation(s) were found: calcium binding; protein binding, which are annotation(s) related to Molecular Function.

[1897] The GO assignment relies on information from one or more of the SwissProt/TremB1 Protein knowledgebase, available from <http://www.expasy.ch/sprot/>; or Locuslink, available from <http://www.ncbi.nlm.nih.gov/projects/LocusLink/>.

[1898] Cluster HSS100PCB can be used as a diagnostic marker according to overexpression of transcripts of this cluster in cancer. Expression of such transcripts in normal tissues is also given according to the previously described methods. The term “number” in the left hand column of the table and the numbers on the y-axis of the figure below refer to weighted expression of ESTs in each category, as “parts per million” (ratio of the expression of ESTs for a particular cluster to the expression of all ESTs in that category, according to parts per million).

[1899] Overall, the following results were obtained as shown with regard to the histograms in FIG. 25 and Table 5. This cluster is overexpressed (at least at a minimum level) in the following pathological conditions: a mixture of malignant tumors from different tissues.

TABLE 5
Normal tissue distribution

| Name of Tissue | Number |
|---|---|
| bladder | 41 |
| colon | 37 |
| epithelial | 38 |
| general | 22 |
| kidney | 0 |
| liver | 0 |
| Lung | 18 |
| breast | 0 |
| bone marrow | 0 |
| ovary | 0 |
| pancreas | 0 |
| prostate | 46 |
| stomach | 553 |
| uterus | 13 |

TABLE 6
P values and ratios for expression in cancerous tissue

| Name of Tissue | P1 | P2 | SP1 | R3 | SP2 | R4 |
|---|---|---|---|---|---|---|
| bladder | 3.3e−01 | 2.9e−01 | 2.9e−02 | 2.8 | 3.5e−02 | 2.8 |
| colon | 3.0e−01 | 1.9e−01 | 5.2e−01 | 1.2 | 2.4e−01 | 1.7 |
| epithelial | 4.7e−02 | 1.6e−02 | 2.0e−01 | 1.2 | 6.1e−02 | 1.3 |
| general | 1.1e−03 | 6.8e−05 | 1.4e−02 | 1.5 | 4.9e−04 | 1.7 |
| kidney | 6.5e−01 | 7.2e−01 | 5.8e−01 | 1.7 | 7.0e−01 | 1.4 |
| liver | 9.1e−01 | 4.9e−01 | 1 | 1.0 | 7.7e−02 | 2.1 |
| lung | 6.8e−01 | 7.3e−01 | 2.2e−02 | 2.9 | 1.3e−01 | 1.7 |
| breast | 2.8e−01 | 3.2e−01 | 4.7e−01 | 2.0 | 6.8e−01 | 1.5 |
| bone marrow | 1 | 6.7e−01 | 1 | 1.0 | 2.8e−01 | 2.8 |
| ovary | 2.6e−01 | 3.0e−01 | 4.7e−01 | 2.0 | 5.9e−01 | 1.7 |
| pancreas | 3.3e−01 | 4.4e−01 | 7.6e−02 | 3.7 | 1.5e−01 | 2.8 |
| prostate | 9.1e−01 | 9.3e−01 | 5.8e−01 | 0.6 | 7.6e−01 | 0.5 |
| stomach | 3.7e−01 | 3.2e−01 | 1 | 0.1 | 1 | 0.3 |
| uterus | 9.4e−01 | 7.0e−01 | 1 | 0.6 | 4.1e−01 | 1.1 |

[1900] As noted above, cluster HSS100PCB features 1 transcript(s), which were listed in Table 1 above. These transcript(s) encode for protein(s) which are variant(s) of protein S-100P protein (SEQ ID NO:635). A description of each variant protein according to the present invention is now provided.

[1901] Variant protein HSS100PCB_P3 (SEQ ID NO:580) according to the present invention has an amino acid sequence as given at the end of the application; it is encoded by transcript(s) HSS100PCB_T1 (SEQ ID NO:49). The location of the variant protein was determined according to results from a number of different software programs and analyses, including analyses from SignalP and other specialized programs. The variant protein is believed to be located as follows with regard to the cell: secreted. The protein localization is believed to be secreted because both signal-peptide prediction programs predict that this protein has a signal peptide, and neither trans-membrane region prediction program predicts that this protein has a trans-membrane region.

[1902] Variant protein HSS100PCB_P3 (SEQ ID NO:580) also has the following non-silent SNPs (Single Nucleotide Polymorphisms) as listed in Table 7, (given according to their position(s) on the amino acid sequence, with the alternative amino acid(s) listed; the last column indicates whether the SNP is known or not; the presence of known SNPs in variant protein HSS100PCB_P3 (SEQ ID NO:580) sequence provides support for the deduced sequence of this variant protein according to the present invention).

TABLE 7
Amino acid mutations

| SNP position(s) on amino | | Previously known |
|---|---|---|
| acid sequence | Alternative amino acid(s) | SNP? |
| 1 | M -> R | Yes |
| 11 | M -> L | Yes |
| 20 | L -> F | Yes |

[1903] Variant protein HSS100PCB_P3 (SEQ ID NO:580) is encoded by the following transcript(s): HSS100PCB_T1 (SEQ ID NO:49), for which the sequence(s) is/are given at the end of the application. The coding portion of transcript HSS100PCB_T1 (SEQ ID NO:49) is shown in bold; this coding portion starts at position 1057 and ends at position 1533. The transcript also has the following SNPs as listed in Table 8 (given according to their position on the nucleotide sequence, with the alternative nucleic acid listed; the last column indicates whether the SNP is known or not; the presence of known SNPs in variant protein HSS100PCB_P3 (SEQ ID NO:580) sequence provides support for the deduced sequence of this variant protein according to the present invention).

TABLE 8
Nucleic acid SNPs

| SNP position on nucleotide | | Previously known |
|---|---|---|
| sequence | Alternative nucleic acid | SNP? |
| 52 | C -> T | Yes |
| 107 | A -> C | Yes |
| 458 | C -> T | Yes |
| 468 | A -> G | Yes |
| 648 | C -> T | Yes |
| 846 | C -> G | Yes |
| 882 | G -> A | Yes |
| 960 | C -> T | No |
| 965 | C -> T | Yes |
| 1058 | T -> G | Yes |
| 1087 | A -> C | Yes |
| 1114 | C -> T | Yes |
| 1968 | G -> A | Yes |
| 1971 | C -> T | Yes |
| 2010 | C -> A | Yes |
| 2099 | G -> | No |

[1904] As noted above, cluster HSS100PCB features 3 segment(s), which were listed in Table 2 above and for which the sequence(s) are given at the end of the application. These segment(s) are portions of nucleic acid sequence(s) which are described herein separately because they are of particular interest. A description of each segment according to the present invention is now provided.

[1905] Segment cluster HSS100PCB_node_{—}3 (SEQ ID NO:363) according to the present invention is supported by 16 libraries. The number of libraries was determined as previously described. This segment can be found in the following transcript(s): HSS100PCB_T1 (SEQ ID NO:49). Table 9 below describes the starting and ending position of this segment on each transcript.

TABLE 9
Segment location on transcripts

| | Segment | Segment |
|---|---|---|
| Transcript name | starting position | ending position |
| HSS100PCB_T1 (SEQ ID NO: 49) | 1 | 1133 |

[1906] Segment cluster HSS100PCB_node_{—}4 (SEQ ID NO:364) according to the present invention is supported by 29 libraries. The number of libraries was determined as previously described. This segment can be found in the following transcript(s): HSS100PCB_T1 (SEQ ID NO:49). Table 10 below describes the starting and ending position of this segment on each transcript.

TABLE 10
Segment location on transcripts

| | Segment | Segment |
|---|---|---|
| Transcript name | starting position | ending position |
| HSS100PCB_T1 (SEQ ID NO: 49) | 1134 | 1923 |

[1907] Microarray (chip) data is also available for this segment as follows. As described above with regard to the cluster itself, various oligonucleotides were tested for being differentially expressed in various disease conditions, particularly cancer. The following oligonucleotides were found to hit this segment (related to colon cancer), shown in Table 11.

TABLE 11
Oligonucleotides related to this segment

| Oligonucleotide name | Overexpressed in cancers | Chip reference |
|---|---|---|
| HSS100PCB_0_0_12280 | colorectal cancer | Colon |
| (SEQ ID NO: 1413) | | |

[1908] Segment cluster HSS100PCB_node_{—}5 (SEQ ID NO:365) according to the present invention is supported by 141 libraries. The number of libraries was determined as previously described. This segment can be found in the following transcript(s): HSS100PCB_T1 (SEQ ID NO:49). Table 12 below describes the starting and ending position of this segment on each transcript.

TABLE 12
Segment location on transcripts

| | Segment | Segment |
|---|---|---|
| Transcript name | starting position | ending position |
| HSS100PCB_T1 (SEQ ID NO: 49) | 1924 | 2201 |

### Description for Cluster HUMPHOSLIP

[1909] Cluster HUMPHOSLIP features 7 transcript(s) and 53 segment(s) of interest, the names for which are given in Tables 1 and 2, respectively, the sequences themselves are given at the end of the application. The selected protein variants are given in table 3.

TABLE 1
Transcripts of interest

| Transcript Name | SEQ ID NO: |
|---|---|
| HUMPHOSLIP_PEA_2_T6 | 50 |
| HUMPHOSLIP_PEA_2_T7 | 51 |
| HUMPHOSLIP_PEA_2_T14 | 52 |
| HUMPHOSLIP_PEA_2_T16 | 53 |
| HUMPHOSLIP_PEA_2_T17 | 54 |
| HUMPHOSLIP_PEA_2_T18 | 55 |
| HUMPHOSLIP_PEA_2_T19 | 56 |

TABLE 2
Segments of interest

| Segment Name | SEQ ID NO: |
|---|---|
| HUMPHOSLIP_PEA_2_node_0 | 366 |
| HUMPHOSLIP_PEA_2_node_19 | 367 |
| HUMPHOSLIP_PEA_2_node_34 | 368 |
| HUMPHOSLIP_PEA_2_node_68 | 369 |
| HUMPHOSLIP_PEA_2_node_70 | 370 |
| HUMPHOSLIP_PEA_2_node_75 | 371 |
| HUMPHOSLIP_PEA_2_node_2 | 372 |
| HUMPHOSLIP_PEA_2_node_3 | 373 |
| HUMPHOSLIP_PEA_2_node_4 | 374 |
| HUMPHOSLIP_PEA_2_node_6 | 375 |
| HUMPHOSLIP_PEA_2_node_7 | 376 |
| HUMPHOSLIP_PEA_2_node_8 | 377 |
| HUMPHOSLIP_PEA_2_node_9 | 378 |
| HUMPHOSLIP_PEA_2_node_14 | 379 |
| HUMPHOSLIP_PEA_2_node_15 | 380 |
| HUMPHOSLIP_PEA_2_node_16 | 381 |
| HUMPHOSLIP_PEA_2_node_17 | 382 |
| HUMPHOSLIP_PEA_2_node_23 | 383 |
| HUMPHOSLIP_PEA_2_node_24 | 384 |
| HUMPHOSLIP_PEA_2_node_25 | 385 |
| HUMPHOSLIP_PEA_2_node_26 | 386 |
| HUMPHOSLIP_PEA_2_node_29 | 387 |
| HUMPHOSLIP_PEA_2_node_30 | 388 |
| HUMPHOSLIP_PEA_2_node_33 | 389 |
| HUMPHOSLIP_PEA_2_node_36 | 390 |
| HUMPHOSLIP_PEA_2_node_37 | 391 |
| HUMPHOSLIP_PEA_2_node_39 | 392 |
| HUMPHOSLIP_PEA_2_node_40 | 393 |
| HUMPHOSLIP_PEA_2_node_41 | 394 |
| HUMPHOSLIP_PEA_2_node_42 | 395 |
| HUMPHOSLIP_PEA_2_node_44 | 396 |
| HUMPHOSLIP_PEA_2_node_45 | 397 |
| HUMPHOSLIP_PEA_2_node_47 | 398 |
| HUMPHOSLIP_PEA_2_node_51 | 399 |
| HUMPHOSLIP_PEA_2_node_52 | 400 |
| HUMPHOSLIP_PEA_2_node_53 | 401 |
| HUMPHOSLIP_PEA_2_node_54 | 402 |
| HUMPHOSLIP_PEA_2_node_55 | 403 |
| HUMPHOSLIP_PEA_2_node_58 | 404 |
| HUMPHOSLIP_PEA_2_node_59 | 405 |
| HUMPHOSLIP_PEA_2_node_60 | 406 |
| HUMPHOSLIP_PEA_2_node_61 | 407 |
| HUMPHOSLIP_PEA_2_node_62 | 408 |
| HUMPHOSLIP_PEA_2_node_63 | 409 |
| HUMPHOSLIP_PEA_2_node_64 | 410 |
| HUMPHOSLIP_PEA_2_node_65 | 411 |
| HUMPHOSLIP_PEA_2_node_66 | 412 |
| HUMPHOSLIP_PEA_2_node_67 | 413 |
| HUMPHOSLIP_PEA_2_node_69 | 414 |
| HUMPHOSLIP_PEA_2_node_71 | 415 |
| HUMPHOSLIP_PEA_2_node_72 | 416 |
| HUMPHOSLIP_PEA_2_node_73 | 417 |
| HUMPHOSLIP_PEA_2_node_74 | 418 |

TABLE 3
Proteins of interest

| | SEQ | |
|---|---|---|
| | ID | |
| Protein Name | NO: | Corresponding Transcript(s) |
| HUMPHOSLIP_PEA_2_P10 | 581 | HUMPHOSLIP_PEA_2_T17 |
| | | (SEQ ID NO: 54) |
| HUMPHOSLIP_PEA_2_P12 | 582 | HUMPHOSLIP_PEA_2_T19 |
| | | (SEQ ID NO: 56) |
| HUMPHOSLIP_PEA_2_P30 | 583 | HUMPHOSLIP_PEA_2_T6 |
| | | (SEQ ID NO: 50) |
| HUMPHOSLIP_PEA_2_P31 | 584 | HUMPHOSLIP_PEA_2_T7 |
| | | (SEQ ID NO: 51) |
| HUMPHOSLIP_PEA_2_P33 | 585 | HUMPHOSLIP_PEA_2_T14 |
| | | (SEQ ID NO: 52) |
| HUMPHOSLIP_PEA_2_P34 | 586 | HUMPHOSLIP_PEA_2_T16 |
| | | (SEQ ID NO: 53) |
| HUMPHOSLIP_PEA_2_P35 | 587 | HUMPHOSLIP_PEA_2_T18 |
| | | (SEQ ID NO: 55) |

[1910] These sequences are variants of the known protein Phospholipid transfer protein precursor (SwissProt accession identifier PLTP_HUMAN; known also according to the synonyms Lipid transfer protein II), SEQ ID NO: 636, referred to herein as the previously known protein.

[1911] Protein Phospholipid transfer protein precursor (SEQ ID NO:636) is known or believed to have the following function(s): Converts HDL into larger and smaller particles. May play a key role in extracellular phospholipid transport and modulation of hdl particles. The sequence for protein Phospholipid transfer protein precursor is given at the end of the application, as “Phospholipid transfer protein precursor amino acid sequence”. Known polymorphisms for this sequence are as shown in Table 4.

TABLE 4
Amino acid mutations for Known Protein

| SNP position(s) | |
|---|---|
| on amino | |
| acid sequence | Comment |
| 282 | R -> Q. /FTId = VAR_017020. |
| 372 | R -> H. /FTId = VAR_017021. |
| 380 | R -> W (in dbSNP: 6065903). /FTId = VAR_017022. |
| 444 | F -> L (in dbSNP: 1804161). /FTId = VAR_012073. |
| 487 | T -> K (in dbSNP: 1056929). /FTId = VAR_012074. |
| 18 | E -> V |

[1912] Protein Phospholipid transfer protein precursor (SEQ ID NO:636) localization is believed to be secreted.

[1913] The following GO Annotation(s) apply to the previously known protein. The following annotation(s) were found: lipid metabolism; lipid transport, which are annotation(s) related to Biological Process; lipid binding, which are annotation(s) related to Molecular Function; and extracellular, which are annotation(s) related to Cellular Component.

[1914] The GO assignment relies on information from one or more of the SwissProt/TremB1 Protein knowledgebase, available from <http://www.expasy.ch/sprot/>; or Locuslink, available from <http://www.ncbi.nlm.nih.gov/projects/LocusLink/>.

[1915] For this cluster, at least one oligonucleotide was found to demonstrate overexpression of the cluster, although not of at least one transcript/segment as listed below. Microarray (chip) data is also available for this cluster as follows. Various oligonucleotides were tested for being differentially expressed in various disease conditions, particularly cancer, as previously described. The following oligonucleotides were found to hit this cluster (in relation to colon cancer) but not other segments/transcripts below, shown in Table 5.

TABLE 5
Oligonucleotides related to this cluster

| Oligonucleotide name | Overexpressed in cancers | Chip reference |
|---|---|---|
| HUMPHOSLIP_0_0_18458 | colorectal cancer | Colon |
| (SEQ ID NO: 1414) | | |

[1916] AS noted above, cluster HUMPHOSLIP features/transcript(s), which were listed in Table 1 above. These transcript(s) encode for protein(s) which are variant(s) of protein Phospholipid transfer protein precursor (SEQ ID NO:636). A description of each variant protein according to the present invention is now provided.

[1917] Variant protein HUMPHOSLIP_PEA_{—}2_P10 (SEQ ID NO:581) according to the present invention has an amino acid sequence as given at the end of the application; it is encoded by transcript(s) HUMPHOSLIP_PEA_{—}2_T17 (SEQ ID NO:54). An alignment is given to the known protein (Phospholipid transfer protein precursor (SEQ ID NO:636)) at the end of the application. One or more alignments to one or more previously published protein sequences are given at the end of the application. A brief description of the relationship of the variant protein according to the present invention to each such aligned protein is as follows:

[1918] Comparison Report Between HUMPHOSLIP_PEA_{—}2_P10 (SEQ ID NO:581) and PLTP_HUMAN (SEQ ID NO:636):

[1919] 1. An isolated chimeric polypeptide encoding for HUMPHOSLIP_PEA_{—}2_P10 (SEQ ID NO:581) comprising a first amino acid sequence being at least 90% homologous to MALFGALFLALLAGAHAEFPGCKIRVTSKALELVKQEGLRFLEQELETITIPDLRGKEGBIFYYNISE corresponding to amino acids 1-67 of PLTP_HUMAN (SEQ ID NO:636), which also corresponds to amino acids 1-67 of HUMPHOSLIP_PEA_{—}2_P10 (SEQ ID NO:581), and a second amino acid sequence being at least 90% homologous to KVYDFLSTFITSGMRFLLNQQICPVLYHAGTVLLNSLLDTVPVRSSVDELVGIDYSLMKDPVASTSNLDMD FRGAFFPLTERNWSLPNRAVEPQLQEEERMVYVAFSEFFFDSAMESYFRAGALQLLLVGDKVPHDLDMLL RATYFGSIVLLSPAVIDSPLKLELRVLAPPRCTIKPSGTTISVTASVTIALVPPDQPEVQLSSMTMDARLSAK MALRGKALRTQLDLRRFRIYSNHSALESLALIPLQAPLKTMLQIGVMPMLNERTWRGVQIPLPEGINFVHE VVTNHAGFLTIGADLHFAKGLREVIEKNRPADVRASTAPTPSTAAV corresponding to amino acids 163-493 of PLTP_HUMAN (SEQ ID NO:636), which also corresponds to amino acids 68-398 of HUMPHOSLIP_PEA_{—}2_P10 (SEQ ID NO:581), wherein said first amino acid sequence and second amino acid sequence are contiguous and in a sequential order.

[1920] 2. An isolated chimeric polypeptide encoding for an edge portion of HUMPHOSLIP_PEA_{—}2_P10 (SEQ ID NO:581), comprising a polypeptide having a length “n”, wherein n is at least about 10 amino acids in length, optionally at least about 20 amino acids in length, preferably at least about 30 amino acids in length, more preferably at least about 40 amino acids in length and most preferably at least about 50 amino acids in length, wherein at least two amino acids comprise EK, having a structure as follows: a sequence starting from any of amino acid numbers 67−x to 67; and ending at any of amino acid numbers 68+((n−2)−x), in which x varies from 0 to n−2.

[1921] The location of the variant protein was determined according to results from a number of different software programs and analyses, including analyses from SignalP and other specialized programs. The variant protein is believed to be located as follows with regard to the cell: secreted. The protein localization is believed to be secreted because both signal-peptide prediction programs predict that this protein has a signal peptide, and neither trans-membrane region prediction program predicts that this protein has a trans-membrane region.

[1922] Variant protein HUMPHOSLIP_PEA_{—}2_P10 (SEQ ID NO:581) also has the following non-silent SNPs (Single Nucleotide Polymorphisms) as listed in Table 6, (given according to their position(s) on the amino acid sequence, with the alternative amino acid(s) listed; the last column indicates whether the SNP is known or not; the presence of known SNPs in variant protein HUMPHOSLIP_PEA_{—}2_P10 (SEQ ID NO:581) sequence provides support for the deduced sequence of this variant protein according to the present invention).

TABLE 6
Amino acid mutations

| SNP position(s) on | Alternative | Previously |
|---|---|---|
| amino acid sequence | amino acid(s) | known SNP? |
| 16 | H -> R | Yes |
| 18 | E -> V | Yes |
| 113 | S -> F | Yes |
| 118 | V -> | No |
| 140 | R -> | No |
| 140 | R -> P | No |
| 150 | N -> | No |
| 160 | P -> | No |
| 201 | P -> | No |
| 274 | M -> | No |
| 285 | R -> W | Yes |
| 292 | Q -> | No |
| 315 | L -> * | No |
| 330 | M -> I | Yes |
| 349 | F -> L | Yes |
| 392 | T -> K | Yes |

[1923] The glycosylation sites of variant protein HUMPHOSLIP_PEA_{—}2_P10 (SEQ ID NO:581), as compared to the known protein Phospholipid transfer protein precursor (SEQ ID NO:636), are described in Table 7 (given according to their position(s) on the amino acid sequence in the first column; the second column indicates whether the glycosylation site is present in the variant protein; and the last column indicates whether the position is different on the variant protein).

TABLE 7
Glycosylation site(s)

| Position(s) on known | Precent in | Position in |
|---|---|---|
| amino acid sequence | variant protein? | variant protein? |
| 94 | No | |
| 143 | No | |
| 64 | Yes | 64 |
| 245 | Yes | 150 |
| 398 | Yes | 303 |
| 117 | No | |

[1924] Variant protein HUMPHOSLIP_PEA_{—}2_P10 (SEQ ID NO:581) is encoded by the following transcript(s): HUMPHOSLIP_PEA_{—}2_T17 (SEQ ID NO:54), for which the sequence(s) is/are given at the end of the application. The coding portion of transcript HUMPHOSLIP_PEA_{—}2_T17 (SEQ ID NO:54) is shown in bold; this coding portion starts at position 276 and ends at position 1469. The transcript also has the following SNPs as listed in Table 8 (given according to their position on the nucleotide sequence, with the alternative nucleic acid listed; the last column indicates whether the SNP is known or not; the presence of known SNPs in variant protein HUMPHOSLIP_PEA_{—}2_P10 (SEQ ID NO:581) sequence provides support for the deduced sequence of this variant protein according to the present invention).

TABLE 8
Nucleic acid SNPs

| SNP position on | Alternative | Previously |
|---|---|---|
| nucleotide sequence | nucleic acid | known SNP? |
| 174 | G -> T | No |
| 175 | A -> T | No |
| 322 | A -> G | Yes |
| 328 | A -> T | Yes |
| 431 | G -> A | Yes |
| 551 | C -> T | Yes |
| 613 | C -> T | Yes |
| 628 | T -> | No |
| 694 | G -> | No |
| 694 | G -> C | No |
| 723 | A -> | No |
| 753 | C -> | No |
| 876 | C -> | No |
| 1037 | C -> T | Yes |
| 1097 | G -> | No |
| 1128 | C -> T | Yes |
| 1149 | C -> | No |
| 1219 | T -> A | No |
| 1230 | C -> T | Yes |
| 1265 | G -> C | Yes |
| 1322 | T -> A | Yes |
| 1450 | C -> A | Yes |
| 1469 | C -> T | No |
| 1549 | C -> T | Yes |
| 1565 | A -> G | No |
| 1565 | A -> T | No |
| 1630 | A -> G | Yes |
| 1654 | T -> A | No |
| 1731 | G -> T | Yes |
| 1864 | G -> A | Yes |
| 1893 | G -> T | Yes |
| 2073 | G -> A | Yes |
| 2269 | C -> T | Yes |
| 2325 | G -> T | Yes |
| 2465 | C -> T | Yes |
| 2566 | C -> T | Yes |
| 2881 | A -> G | No |

[1925] Variant protein HUMPHOSLIP_PEA_{—}2_P12 (SEQ ID NO:582) according to the present invention has an amino acid sequence as given at the end of the application; it is encoded by transcript(s) HUMPHOSLIP_PEA_{—}2_T19 (SEQ ID NO:56). An alignment is given to the known protein (Phospholipid transfer protein precursor (SEQ ID NO:636)) at the end of the application. One or more alignments to one or more previously published protein sequences are given at the end of the application. A brief description of the relationship of the variant protein according to the present invention to each such aligned protein is as follows:

[1926] Comparison Report Between HUMPHOSLIP_PEA_{—}2_P12 (SEQ ID NO:582) and PLTP_HUMAN (SEQ ID NO:636):

[1927] 1. An isolated chimeric polypeptide encoding for HUMPHOSLIP_PEA_{—}2_P12 (SEQ ID NO:582) comprising a first amino acid sequence being at least 90% homologous to MALFGALFLALLAGAHAEFPGCKIRVTSKALELVKQEGLRFLEQELETITIPDLRGKEGHFYYNISEVKVTE LQLTSSELDFQPQQELMLQITNASLGLRFRRQLLYWFFYDGGYINASAEGVSIRTGLELSRDPAGRMKVSN VSCQASVSRMHAAFGGTFKKVYDFLSTFITSGMRFLLNQQICPVLYHAGTVLLNSLLDTVPVRSSVDELVG IDYSLMKDPVASTSNLDMDFRGAFFPLTERNWSLPNRAVEPQLQEEERMVYVAFSEFFFDSAMESYFRAG ALQLLLVGDKVPHDLDMLLRATYFGSIVLLSPAVIDSPLKLELRVLAPPRCTIKPSGTTISVTASVTIALVPP DQPEVQLSSMTMDARLSAKMALRGKALRTQLDLRRFRIYSNHSALESLALIPLQAPLKTMLQIGVMPMLN corresponding to amino acids 1-427 of PLTP_HUMAN (SEQ ID NO:636), which also corresponds to amino acids 1-427 of HUMPHOSLIP_PEA_{—}2_P12 (SEQ ID NO:582), and a second amino acid sequence being at least 70%, optionally at least 80%, preferably at least 85%, more preferably at least 90% and most preferably at least 95% homologous to a polypeptide having the sequence GKAGV (SEQ ID NO:1525) corresponding to amino acids 428-432 of HUMPHOSLIP_PEA_{—}2_P12 (SEQ ID NO:582), wherein said first amino acid sequence and second amino acid sequence are contiguous and in a sequential order.

[1928] 2. An isolated polypeptide encoding for a tail of HUMPHOSLIP_PEA_{—}2_P12 (SEQ ID NO:582) comprising a polypeptide being at least 70%, optionally at least about 80%, preferably at least about 85%, more preferably at least about 90% and most preferably at least about 95% homologous to the sequence GKAGV (SEQ ID NO:1525) in HUMPHOSLIP_PEA_{—}2_P12 (SEQ ID NO:582).

[1929] The location of the variant protein was determined according to results from a number of different software programs and analyses, including analyses from SignalP and other specialized programs. The variant protein is believed to be located as follows with regard to the cell: secreted. The protein localization is believed to be secreted because both signal-peptide prediction programs predict that this protein has a signal peptide, and neither trans-membrane region prediction program predicts that this protein has a trans-membrane region.

[1930] Variant protein HUMPHOSLIP_PEA_{—}2_P12 (SEQ ID NO:582) also has the following non-silent SNPs (Single Nucleotide Polymorphisms) as listed in Table 9, (given according to their position(s) on the amino acid sequence, with the alternative amino acid(s) listed; the last column indicates whether the SNP is known or not; the presence of known SNPs in variant protein HUMPHOSLIP_PEA_{—}2_P12 (SEQ ID NO:582) sequence provides support for the deduced sequence of this variant protein according to the present invention).

TABLE 9
Amino acid mutations

| SNP position(s) on | Alternative | Previously |
|---|---|---|
| amino acid sequence | amino acid(s) | known SNP? |
| 16 | H -> R | Yes |
| 18 | E -> V | Yes |
| 81 | D -> H | Yes |
| 124 | S -> Y | Yes |
| 160 | T -> | No |
| 160 | T -> N | No |
| 208 | S -> F | Yes |
| 213 | V -> | No |
| 235 | R -> P | No |
| 235 | R -> | No |
| 245 | N -> | No |
| 255 | P -> | No |
| 296 | P -> | No |
| 369 | M -> | No |
| 380 | R -> W | Yes |
| 387 | Q -> | No |
| 410 | L -> * | No |
| 425 | M -> I | Yes |

[1931] The glycosylation sites of variant protein HUMPHOSLIP_PEA_{—}2_P12 (SEQ ID NO:582), as compared to the known protein Phospholipid transfer protein precursor (SEQ ID NO:636), are described in Table 10 (given according to their position(s) on the amino acid sequence in the first column; the second column indicates whether the glycosylation site is present in the variant protein; and the last column indicates whether the position is different on the variant protein).

TABLE 10
Glycosylation site(s)

| Position(s) on known | Present in | Position in |
|---|---|---|
| amino acid sequence | variant protein? | variant protein? |
| 94 | Yes | 94 |
| 143 | Yes | 143 |
| 64 | Yes | 64 |
| 245 | Yes | 245 |
| 398 | Yes | 398 |
| 117 | Yes | 117 |

[1932] Variant protein HUMPHOSLIP_PEA_{—}2_P12 (SEQ ID NO:582) is encoded by the following transcript(s): HUMPHOSLIP_PEA_{—}2_T19 (SEQ ID NO:56), for which the sequence(s) is/are given at the end of the application. The coding portion of transcript HUMPHOSLIP_PEA_{—}2_T19 (SEQ ID NO:56) is shown in bold; this coding portion starts at position 276 and ends at position 1571. The transcript also has the following SNPs as listed in Table 11 (given according to their position on the nucleotide sequence, with the alternative nucleic acid listed; the last column indicates whether the SNP is known or not; the presence of known SNPs in variant protein HUMPHOSLIP_PEA_{—}2_P12 (SEQ ID NO:582) sequence provides support for the deduced sequence of this variant protein according to the present invention).

TABLE 11
Nucleic acid SNPs

| SNP position on | Alternative | Previously |
|---|---|---|
| nucleotide sequence | nucleic acid | known SNP? |
| 174 | G -> T | No |
| 175 | A -> T | No |
| 322 | A -> G | Yes |
| 328 | A -> T | Yes |
| 431 | G -> A | Yes |
| 516 | G -> C | Yes |
| 644 | G -> A | Yes |
| 646 | C -> A | Yes |
| 754 | C -> | No |
| 754 | C -> A | No |
| 836 | C -> T | Yes |
| 898 | C -> T | Yes |
| 913 | T -> | No |
| 979 | G -> | No |
| 979 | G -> C | No |
| 1008 | A -> | No |
| 1038 | C -> | No |
| 1161 | C -> | No |
| 1322 | C -> T | Yes |
| 1382 | G -> | No |
| 1413 | C -> T | Yes |
| 1434 | C -> | No |
| 1504 | T -> A | No |
| 1515 | C -> T | Yes |
| 1550 | G -> C | Yes |
| 1690 | T -> A | Yes |
| 1818 | C -> A | Yes |
| 1837 | C -> T | No |
| 1917 | C -> T | Yes |
| 1933 | A -> G | No |
| 1933 | A -> T | No |
| 1998 | A -> G | Yes |
| 2022 | T -> A | No |
| 2099 | G -> T | Yes |
| 2232 | G -> A | Yes |
| 2261 | G -> T | Yes |
| 2441 | G -> A | Yes |
| 2637 | C -> T | Yes |
| 2693 | G -> T | Yes |
| 2833 | C -> T | Yes |
| 2934 | C -> T | Yes |
| 3249 | A -> G | No |

[1933] Variant protein HUMPHOSLIP_PEA_{—}2_P30 (SEQ ID NO:583) according to the present invention has an amino acid sequence as given at the end of the application; it is encoded by transcript(s) HUMPHOSLIP_PEA_{—}2_T6 (SEQ ID NO:50). The location of the variant protein was determined according to results from a number of different software programs and analyses, including analyses from SignalP and other specialized programs. The variant protein is believed to be located as follows with regard to the cell: secreted. The protein localization is believed to be secreted because both signal-peptide prediction programs predict that this protein has a signal peptide, and neither trans-membrane region prediction program predicts that this protein has a trans-membrane region.

[1934] Variant protein HUMPHOSLIP_PEA_{—}2_P30 (SEQ ID NO:583) also has the following non-silent SNPs (Single Nucleotide Polymorphisms) as listed in Table 12, (given according to their position(s) on the amino acid sequence, with the alternative amino acid(s) listed; the last column indicates whether the SNP is known or not; the presence of known SNPs in variant protein HUMPHOSLIP_PEA_{—}2_P30 (SEQ ID NO:583) sequence provides support for the deduced sequence of this variant protein according to the present invention).

TABLE 12
Amino acid mutations

| SNP position(s) on | Alternative | Previously |
|---|---|---|
| amino acid sequence | amino acid(s) | known SNP? |
| 16 | H -> R | Yes |
| 18 | E -> V | Yes |
| 37 | R -> Q | Yes |

[1935] Variant protein HUMPHOSLIP_PEA_{—}2_P30 (SEQ ID NO:583) is encoded by the following transcript(s): HUMPHOSLIP_PEA_{—}2_T6 (SEQ ID NO:50), for which the sequence(s) is/are given at the end of the application. The coding portion of transcript HUMPHOSLIP_PEA_{—}2_T6 (SEQ ID NO:50) is shown in bold; this coding portion starts at position 276 and ends at position 431. The transcript also has the following SNPs as listed in Table 13 (given according to their position on the nucleotide sequence, with the alternative nucleic acid listed; the last column indicates whether the SNP is known or not; the presence of known SNPs in variant protein HUMPHOSLIP_PEA_{—}2_P30 (SEQ ID NO:583) sequence provides support for the deduced sequence of this variant protein according to the present invention).

TABLE 13
Nucleic acid SNPs

| SNP position on | Alternative | Previously |
|---|---|---|
| nucleotide sequence | nucleic acid | known SNP? |
| 174 | G -> T | No |
| 175 | A -> T | No |
| 322 | A -> G | Yes |
| 328 | A -> T | Yes |
| 385 | G -> A | Yes |
| 470 | G -> C | Yes |
| 598 | G -> A | Yes |
| 600 | C -> A | Yes |
| 708 | C -> | No |
| 708 | C -> A | No |
| 790 | C -> T | Yes |
| 852 | C -> T | Yes |
| 867 | T -> | No |
| 933 | G -> | No |
| 933 | G -> C | No |
| 962 | A -> | No |
| 992 | C -> | No |
| 1115 | C -> | No |
| 1276 | C -> T | Yes |
| 1336 | G -> | No |
| 1367 | C -> T | Yes |
| 1388 | C -> | No |
| 1458 | T -> A | No |
| 1469 | C -> T | Yes |
| 1504 | G -> C | Yes |
| 1561 | T -> A | Yes |
| 1689 | C -> A | Yes |
| 1708 | C -> T | No |
| 1788 | C -> T | Yes |
| 1804 | A -> G | No |
| 1804 | A -> T | No |
| 1869 | A -> G | Yes |
| 1893 | T -> A | No |
| 1970 | G -> T | Yes |
| 2103 | G -> A | Yes |
| 2132 | G -> T | Yes |
| 2312 | G -> A | Yes |
| 2508 | C -> T | Yes |
| 2564 | G -> T | Yes |
| 2704 | C -> T | Yes |
| 2805 | C -> T | Yes |
| 3120 | A -> G | No |

[1936] Variant protein HUMPHOSLIP_PEA_{—}2_P31 (SEQ ID NO:584) according to the present invention has an amino acid sequence as given at the end of the application; it is encoded by transcript(s) HUMPHOSLIP_PEA_{—}2_T7 (SEQ ID NO:51). An alignment is given to the known protein (Phospholipid transfer protein precursor (SEQ ID NO:636)) at the end of the application. One or more alignments to one or more previously published protein sequences are given at the end of the application. A brief description of the relationship of the variant protein according to the present invention to each such aligned protein is as follows:

[1937] Comparison Report Between HUMPHOSLIP_PEA_{—}2_P31 (SEQ ID NO:584) and PLTP_HUMAN (SEQ ID NO:636):

[1938] 1. An isolated chimeric polypeptide encoding for HUMPHOSLIP_PEA_{—}2_P31 (SEQ ID NO:584) comprising a first amino acid sequence being at least 90% homologous to MALFGALFLALLAGAHAEFPGCKIRVTSKALELVKQEGLRFLEQELETITIPDLRGKEGHFYYNISE corresponding to amino acids 1-67 of PLTP_HUMAN (SEQ ID NO:636), which also corresponds to amino acids 1-67 of HUMPHOSLIP_PEA_{—}2_P31 (SEQ ID NO:584), and a second amino acid sequence being at least 70%, optionally at least 80%, preferably at least 85%, more preferably at least 90% and most preferably at least 95% homologous to a polypeptide having the sequence PGLERGADKFPVVGGSSLFLALDLTLRPPVG (SEQ ID NO:1526) corresponding to amino acids 68-98 of HUMPHOSLIP_PEA_{—}2_P31 (SEQ ID NO:584), wherein said first amino acid sequence and second amino acid sequence are contiguous and in a sequential order.

[1939] 2. An isolated polypeptide encoding for a tail of HUMPHOSLIP_PEA_{—}2_P31 (SEQ ID NO:584) comprising a polypeptide being at least 70%, optionally at least about 80%, preferably at least about 85%, more preferably at least about 90% and most preferably at least about 95% homologous to the sequence PGLERGADKFPVVGGSSLFLALDLTLRPPVG (SEQ ID NO:1526) in HUMPHOSLIP_PEA_{—}2_P31 (SEQ ID NO:584).

[1940] The location of the variant protein was determined according to results from a number of different software programs and analyses, including analyses from SignalP and other specialized programs. The variant protein is believed to be located as follows with regard to the cell: secreted. The protein localization is believed to be secreted because both signal-peptide prediction programs predict that this protein has a signal peptide, and neither trans-membrane region prediction program predicts that this protein has a trans-membrane region.

[1941] Variant protein HUMPHOSLIP_PEA_{—}2_P31 (SEQ ID NO:584) also has the following non-silent SNPs (Single Nucleotide Polymorphisms) as listed in Table 14, (given according to their position(s) on the amino acid sequence, with the alternative amino acid(s) listed; the last column indicates whether the SNP is known or not; the presence of known SNPs in variant protein HUMPHOSLIP_PEA_{—}2_P31 (SEQ ID NO:584) sequence provides support for the deduced sequence of this variant protein according to the present invention).

TABLE 14
Amino acid mutations

| SNP position(s) on | Alternative | Previously |
|---|---|---|
| amino acid sequence | amino acid(s) | known SNP? |
| 16 | H -> R | Yes |
| 18 | E -> V | Yes |

[1942] The glycosylation sites of variant protein HUMPHOSLIP_PEA_{—}2_P31 (SEQ ID NO:584), as compared to the known protein Phospholipid transfer protein precursor (SEQ ID NO:636), are described in Table 15 (given according to their position(s) on the amino acid sequence in the first column; the second column indicates whether the glycosylation site is present in the variant protein; and the last column indicates whether the position is different on the variant protein).

TABLE 15
Glycosylation site(s)

| Position(s) on known | Present in | Position in |
|---|---|---|
| amino acid sequence | variant protein? | variant protein? |
| 94 | No | |
| 143 | No | |
| 64 | Yes | 64 |
| 245 | No | |
| 398 | No | |
| 117 | No | |

[1943] Variant protein HUMPHOSLIP_PEA_{—}2_P31 (SEQ ID NO:584) is encoded by the following transcript(s): HUMPHOSLIP_PEA_{—}2_T7 (SEQ ID NO:51), for which the sequence(s) is/are given at the end of the application. The coding portion of transcript HUMPHOSLIP_PEA_{—}2_T7 (SEQ ID NO:51) is shown in bold; this coding portion starts at position 276 and ends at position 569. The transcript also has the following SNPs as listed in Table 16 (given according to their position on the nucleotide sequence, with the alternative nucleic acid listed; the last column indicates whether the SNP is known or not; the presence of known SNPs in variant protein HUMPHOSLIP_PEA_{—}2_P31 (SEQ ID NO:584) sequence provides support for the deduced sequence of this variant protein according to the present invention).

TABLE 16
Nucleic acid SNPs

| SNP position on | Alternative | Previously |
|---|---|---|
| nucleotide sequence | nucleic acid | known SNP? |
| 174 | G -> T | No |
| 175 | A -> T | No |
| 322 | A -> G | Yes |
| 328 | A -> T | Yes |
| 431 | G -> A | Yes |
| 608 | G -> C | Yes |
| 736 | G -> A | Yes |
| 738 | C -> A | Yes |
| 846 | C -> | No |
| 846 | C -> A | No |
| 928 | C -> T | Yes |
| 990 | C -> T | Yes |
| 1005 | T -> | No |
| 1071 | G -> | No |
| 1071 | G -> C | No |
| 1100 | A -> | No |
| 1130 | C -> | No |
| 1253 | C -> | No |
| 1414 | C -> T | Yes |
| 1474 | G -> | No |
| 1505 | C -> T | Yes |
| 1526 | C -> | No |
| 1596 | T -> A | No |
| 1607 | C -> T | Yes |
| 1642 | G -> C | Yes |
| 1699 | T -> A | Yes |
| 1827 | C -> A | Yes |
| 1846 | C -> T | No |
| 1926 | C -> T | Yes |
| 1942 | A -> G | No |
| 1942 | A -> T | No |
| 2007 | A -> G | Yes |
| 2031 | T -> A | No |
| 2108 | G -> T | Yes |
| 2241 | G -> A | Yes |
| 2270 | G -> T | Yes |
| 2450 | G -> A | Yes |
| 2646 | C -> T | Yes |
| 2702 | G -> T | Yes |
| 2842 | C -> T | Yes |
| 2943 | C -> T | Yes |
| 3258 | A -> G | No |

[1944] Variant protein HUMPHOSLIP_PEA_{—}2_P33 (SEQ ID NO:585) according to the present invention has an amino acid sequence as given at the end of the application; it is encoded by transcript(s) HUMPHOSLIP_PEA_{—}2_T14 (SEQ ID NO:52). An alignment is given to the known protein (Phospholipid transfer protein precursor (SEQ ID NO:636)) at the end of the application. One or more alignments to one or more previously published protein sequences are given at the end of the application. A brief description of the relationship of the variant protein according to the present invention to each such aligned protein is as follows:

[1945] Comparison Report Between HUMPHOSLIP_PEA_{—}2_P33 (SEQ ID NO:585) and PLTP_HUMAN (SEQ ID NO:636):

[1946] 1. An isolated chimeric polypeptide encoding for HUMPHOSLIP_PEA_{—}2_P33 (SEQ ID NO:585) comprising a first amino acid sequence being at least 90% homologous to MALFGALFLALLAGAHAEFPGCKIRVTSKALELVKQEGLRFLEQELETITIPDLRGKEGHFYYNISEVKVTE LQLTSSELDFQPQQELMLQITNASLGLRFRRQLLYWFFYDGGYINASAEGVSIRTGLELSRDPAGRMKVSN VSCQASVSRMHAAFGGTFKKVYDFLSTFITSGMRFLLNQQ corresponding to amino acids 1-183 of PLTP_HUMAN (SEQ ID NO:636), which also corresponds to amino acids 1-183 of HUMPHOSLIP_PEA_{—}2_P33 (SEQ ID NO:585), and a second amino acid sequence being at least 70%, optionally at least 80%, preferably at least 85%, more preferably at least 90% and most preferably at least 95% homologous to a polypeptide having the sequence VWAATGRRVARVGMLSL (SEQ ID NO:1527) corresponding to amino acids 184-200 of HUMPHOSLIP_PEA_{—}2_P33 (SEQ ID NO:585), wherein said first amino acid sequence and second amino acid sequence are contiguous and in a sequential order.

[1947] 2. An isolated polypeptide encoding for a tail of HUMPHOSLIP_PEA_{—}2_P33 (SEQ ID NO:585) comprising a polypeptide being at least 70%, optionally at least about 80%, preferably at least about 85%, more preferably at least about 90% and most preferably at least about 95% homologous to the sequence VWAATGRRVARVGMLSL (SEQ ID NO:1527) in HUMPHOSLIP_PEA_{—}2_P33 (SEQ ID NO:585).

[1948] The location of the variant protein was determined according to results from a number of different software programs and analyses, including analyses from SignalP and other specialized programs. The variant protein is believed to be located as follows with regard to the cell: secreted. The protein localization is believed to be secreted because both signal-peptide prediction programs predict that this protein has a signal peptide, and neither trans-membrane region prediction program predicts that this protein has a trans-membrane region.

[1949] Variant protein HUMPHOSLIP_PEA_{—}2_P33 (SEQ ID NO:585) also has the following non-silent SNPs (Single Nucleotide Polymorphisms) as listed in Table 17, (given according to their position(s) on the amino acid sequence, with the alternative amino acid(s) listed; the last column indicates whether the SNP is known or not; the presence of known SNPs in variant protein HUMPHOSLIP_PEA_{—}2_P33 (SEQ ID NO:585) sequence provides support for the deduced sequence of this variant protein according to the present invention).

TABLE 17
Amino acid mutations

| SNP position(s) on | Alternative | Previously |
|---|---|---|
| amino acid sequence | amino acid(s) | known SNP? |
| 16 | H -> R | Yes |
| 18 | E -> V | Yes |
| 81 | D -> H | Yes |
| 124 | S -> Y | Yes |
| 160 | T -> | No |
| 160 | T -> N | No |

[1950] The glycosylation sites of variant protein HUMPHOSLIP_PEA_{—}2_P33 (SEQ ID NO:585), as compared to the known protein Phospholipid transfer protein precursor (SEQ ID NO:636), are described in Table 18 (given according to their position(s) on the amino acid sequence in the first column; the second column indicates whether the glycosylation site is present in the variant protein; and the last column indicates whether the position is different on the variant protein).

TABLE 18
Glycosylation site(s)

| Position(s) on known | Present in | Position in |
|---|---|---|
| amino acid sequence | variant protein? | variant protein? |
| 94 | Yes | 94 |
| 143 | Yes | 143 |
| 64 | Yes | 64 |
| 245 | No | |
| 398 | No | |
| 117 | Yes | 117 |

[1951] Variant protein HUMPHOSLIP_PEA_{—}2_P33 (SEQ ID NO:585) is encoded by the following transcript(s): HUMPHOSLIP_PEA_{—}2_T14 (SEQ ID NO:52), for which the sequence(s) is/are given at the end of the application. The coding portion of transcript HUMPHOSLIP_PEA_{—}2_T14 (SEQ ID NO:52) is shown in bold; this coding portion starts at position 276 and ends at position 875. The transcript also has the following SNPs as listed in Table 19 (given according to their position on the nucleotide sequence, with the alternative nucleic acid listed; the last column indicates whether the SNP is known or not; the presence of known SNPs in variant protein HUMPHOSLIP_PEA_{—}2_P33 (SEQ ID NO:585) sequence provides support for the deduced sequence of this variant protein according to the present invention).

TABLE 19
Nucleic acid SNPs

| SNP position on | Alternative | Previously |
|---|---|---|
| nucleotide sequence | nucleic acid | known SNP? |
| 174 | G -> T | No |
| 175 | A -> T | No |
| 322 | A -> G | Yes |
| 328 | A -> T | Yes |
| 431 | G -> A | Yes |
| 516 | G -> C | Yes |
| 644 | G -> A | Yes |
| 646 | C -> A | Yes |
| 754 | C -> | No |
| 754 | C -> A | No |
| 921 | C -> T | Yes |
| 983 | C -> T | Yes |
| 998 | T -> | No |
| 1064 | G -> | No |
| 1064 | G -> C | No |
| 1093 | A -> | No |
| 1123 | C -> | No |
| 1246 | C -> | No |
| 1407 | C -> T | Yes |
| 1467 | G -> | No |
| 1498 | C -> T | Yes |
| 1519 | C -> | No |
| 1589 | T -> A | No |
| 1600 | C -> T | Yes |
| 1635 | G -> C | Yes |
| 1692 | T -> A | Yes |
| 1820 | C -> A | Yes |
| 1839 | C -> T | No |
| 1919 | C -> T | Yes |
| 1935 | A -> G | No |
| 1935 | A -> T | No |
| 2000 | A -> G | Yes |
| 2024 | T -> A | No |
| 2101 | G -> T | Yes |
| 2234 | G -> A | Yes |
| 2263 | G -> T | Yes |
| 2443 | G -> A | Yes |
| 2639 | C -> T | Yes |
| 2695 | G -> T | Yes |
| 2835 | C -> T | Yes |
| 2936 | C -> T | Yes |
| 3251 | A -> G | No |

[1952] Variant protein HUMPHOSLIP_PEA_{—}2_P34 (SEQ ID NO:586) according to the present invention has an amino acid sequence as given at the end of the application; it is encoded by transcript(s) HUMPHOSLIP_PEA_{—}2_T16 (SEQ ID NO:53). An alignment is given to the known protein (Phospholipid transfer protein precursor (SEQ ID NO:636)) at the end of the application. One or more alignments to one or more previously published protein sequences are given at the end of the application. A brief description of the relationship of the variant protein according to the present invention to each such aligned protein is as follows:

[1953] Comparison Report Between HUMPHOSLIP_PEA_{—}2_P34 (SEQ ID NO:586) and PLTP_HUMAN (SEQ ID NO:636):

[1954] 1. An isolated chimeric polypeptide encoding for HUMPHOSLIP_PEA_{—}2_P34 (SEQ ID NO:586) comprising a first amino acid sequence being at least 90% homologous to MALFGALFLALLAGAHAEFPGCKIRVTSKALELVKQEGLRFLEQELETITIPDLRGKEGHFYYNISEVKVTE LQLTSSELDFQPQQELMLQITNASLGLRFRRQLLYWFFYDGGYINASAEGVSIRTGLELSRDPAGRMKVSN VSCQASVSRMHAAFGGTFKKVYDFLSTFITSGMRFLLNQQICPVLYHAGTVLLNSLLDTVPV corresponding to amino acids 1-205 of PLTP_HUMAN (SEQ ID NO:636), which also corresponds to amino acids 1-205 of HUMPHOSLIP_PEA_{—}2_P34 (SEQ ID NO:586), and a second amino acid sequence being at least 70%, optionally at least 80%, preferably at least 85%, more preferably at least 90% and most preferably at least 95% homologous to a polypeptide having the sequence LWTSLLALTIPS (SEQ ID NO:1528) corresponding to amino acids 206-217 of HUMPHOSLIP_PEA_{—}2_P34 (SEQ ID NO:586), wherein said first amino acid sequence and second amino acid sequence are contiguous and in a sequential order.

[1955] 2. An isolated polypeptide encoding for a tail of HUMPHOSLIP_PEA_{—}2_P34 (SEQ ID NO:586) comprising a polypeptide being at least 70%, optionally at least about 80%, preferably at least about 85%, more preferably at least about 90% and most preferably at least about 95% homologous to the sequence LWTSLLALTIPS (SEQ ID NO:1528) in HUMPHOSLIP_PEA_{—}2_P34 (SEQ ID NO:586).

[1956] The location of the variant protein was determined according to results from a number of different software programs and analyses, including analyses from SignalP and other specialized programs. The variant protein is believed to be located as follows with regard to the cell: secreted. The protein localization is believed to be secreted because both signal-peptide prediction programs predict that this protein has a signal peptide, and neither trans-membrane region prediction program predicts that this protein has a trans-membrane region.

[1957] Variant protein HUMPHOSLIP_PEA_{—}2_P34 (SEQ ID NO:586) also has the following non-silent SNPs (Single Nucleotide Polymorphisms) as listed in Table 20, (given according to their position(s) on the amino acid sequence, with the alternative amino acid(s) listed; the last column indicates whether the SNP is known or not; the presence of known SNPs in variant protein HUMPHOSLIP_PEA_{—}2_P34 (SEQ ID NO:586) sequence provides support for the deduced sequence of this variant protein according to the present invention).

TABLE 20
Amino acid mutations

| SNP position(s) on | Alternative | Previously |
|---|---|---|
| amino acid sequence | amino acid(s) | kn own SNP? |
| 16 | H -> R | Yes |
| 18 | E -> V | Yes |
| 81 | D -> H | Yes |
| 124 | S -> Y | Yes |
| 160 | T -> | No |
| 160 | T -> N | No |
| 211 | L -> | No |

[1958] The glycosylation sites of variant protein HUMPHOSLIP_PEA_{—}2_P34 (SEQ ID NO:586), as compared to the known protein Phospholipid transfer protein precursor (SEQ ID NO:636), are described in Table 21 (given according to their position(s) on the amino acid sequence in the first column; the second column indicates whether the glycosylation site is present in the variant protein; and the last column indicates whether the position is different on the variant protein).

TABLE 21
Glycosylation site(s)

| Position(s) on known | Present in | Position in |
|---|---|---|
| amino acid sequence | variant protein? | variant protein? |
| 94 | Yes | 94 |
| 143 | Yes | 143 |
| 64 | Yes | 64 |
| 245 | No | |
| 398 | No | |
| 117 | Yes | 117 |

[1959] Variant protein HUMPHOSLIP_PEA_{—}2_P34 (SEQ ID NO:586) is encoded by the following transcript(s): HUMPHOSLIP_PEA_{—}2_T16 (SEQ ID NO:53), for which the sequence(s) is/are given at the end of the application. The coding portion of transcript HUMPHOSLIP_PEA_{—}2_T16 (SEQ ID NO:53) is shown in bold; this coding portion starts at position 276 and ends at position 926. The transcript also has the following SNPs as listed in Table 22 (given according to their position on the nucleotide sequence, with the alternative nucleic acid listed; the last column indicates whether the SNP is known or not; the presence of known SNPs in variant protein HUMPHOSLIP_PEA_{—}2_P34 (SEQ ID NO:586) sequence provides support for the deduced sequence of this variant protein according to the present invention).

TABLE 22
Nucleic acid SNPs

| SNP position on | Alternative | Previously |
|---|---|---|
| nucleotide sequence | nucleic acid | known SNP? |
| 174 | G -> T | No |
| 175 | A -> T | No |
| 322 | A -> G | Yes |
| 328 | A -> T | Yes |
| 431 | G -> A | Yes |
| 516 | G -> C | Yes |
| 644 | G -> A | Yes |
| 646 | C -> A | Yes |
| 754 | C -> | No |
| 754 | C -> A | No |
| 836 | C -> T | Yes |
| 891 | C -> T | Yes |
| 906 | T -> | No |
| 972 | G -> | No |
| 972 | G -> C | No |
| 1001 | A -> | No |
| 1031 | C -> | No |
| 1154 | C -> | No |
| 1315 | C -> T | Yes |
| 1375 | G -> | No |
| 1406 | C -> T | Yes |
| 1427 | C -> | No |
| 1497 | T -> A | No |
| 1508 | C -> T | Yes |
| 1543 | G -> C | Yes |
| 1600 | T -> A | Yes |
| 1728 | C -> A | Yes |
| 1747 | C -> T | No |
| 1827 | C -> T | Yes |
| 1843 | A -> G | No |
| 1843 | A -> T | No |
| 1908 | A -> G | Yes |
| 1932 | T -> A | No |
| 2009 | G -> T | Yes |
| 2142 | G -> A | Yes |
| 2171 | G -> T | Yes |
| 2351 | G -> A | Yes |
| 2547 | C -> T | Yes |
| 2603 | G -> T | Yes |
| 2743 | C -> T | Yes |
| 2844 | C -> T | Yes |
| 3159 | A -> G | No |

[1960] Variant protein HUMPHOSLIP_PEA_{—}2_P35 (SEQ ID NO:587) according to the present invention has an amino acid sequence as given at the end of the application; it is encoded by transcript(s) HUMPHOSLIP_PEA_{—}2_T18 (SEQ ID NO:55). An alignment is given to the known protein (Phospholipid transfer protein precursor (SEQ ID NO:636)) at the end of the application. One or more alignments to one or more previously published protein sequences are given at the end of the application. A brief description of the relationship of the variant protein according to the present invention to each such aligned protein is as follows:

[1961] Comparison Report Between HUMPHOSLIP_PEA_{—}2_P35 (SEQ ID NO:587) and PLTP_HUMAN (SEQ ID NO:636):

[1962] 1. An isolated chimeric polypeptide encoding for HUMPHOSLIP_PEA_{—}2_P35 (SEQ ID NO:587) comprising a first amino acid sequence being at least 90% homologous to MALFGALFLALLAGAHAEFPGCKIRVTSKALELVKQEGLRFLEQELETITIPDLRGKEGHFYYNISEVKVTE LQLTSSELDFQPQQELMLQITNASLGLRFRRQLLYWF corresponding to amino acids 1-109 of PLTP_HUMAN (SEQ ID NO:636), which also corresponds to amino acids 1-109 of HUMPHOSLIP_PEA_{—}2_P35 (SEQ ID NO:587), a second amino acid sequence bridging amino acid sequence comprising of L, a third amino acid sequence being at least 90% homologous to KVYDFLSTFITSGMRFLLNQQ corresponding to amino acids 163-183 of PLTP_HUMAN (SEQ ID NO:636), which also corresponds to amino acids 111-131 of HUMPHOSLIP_PEA_{—}2_P35 (SEQ ID NO:587), and a fourth amino acid sequence being at least 70%, optionally at least 80%, preferably at least 85%, more preferably at least 90% and most preferably at least 95% homologous to a polypeptide having the sequence VWAATGRRVARVGMLSL (SEQ ID NO:1527) corresponding to amino acids 132-148 of HUMPHOSLIP_PEA_{—}2_P35 (SEQ ID NO:587), wherein said first amino acid sequence, second amino acid sequence, third amino acid sequence and fourth amino acid sequence are contiguous and in a sequential order.

[1963] 2. An isolated polypeptide encoding for an edge portion of HUMPHOSLIP_PEA_{—}2_P35 (SEQ ID NO:587), comprising a polypeptide having a length “n”, wherein n is at least about 10 amino acids in length, optionally at least about 20 amino acids in length, preferably at least about 30 amino acids in length, more preferably at least about 40 amino acids in length and most preferably at least about 50 amino acids in length, wherein at least two amino acids comprise

[1964] FLK having a structure as follows (numbering according to HUMPHOSLIP_PEA_{—}2_P35 (SEQ ID NO:587)): a sequence starting from any of amino acid numbers 109−x to 109; and ending at any of amino acid numbers 111+((n−2)−x), in which x varies from 0 to n−2.

[1965] 3. An isolated polypeptide encoding for a tail of HUMPHOSLIP_PEA_{—}2_P35 (SEQ ID NO:587) comprising a polypeptide being at least 70%, optionally at least about 80%, preferably at least about 85%, more preferably at least about 90% and most preferably at least about 95% homologous to the sequence VWAATGRRVARVGMLSL (SEQ ID NO:1527) in HUMPHOSLIP_PEA_{—}2_P35 (SEQ ID NO:587).

[1966] The location of the variant protein was determined according to results from a number of different software programs and analyses, including analyses from SignalP and other specialized programs. The variant protein is believed to be located as follows with regard to the cell: secreted. The protein localization is believed to be secreted because both signal-peptide prediction programs predict that this protein has a signal peptide, and neither trans-membrane region prediction program predicts that this protein has a trans-membrane region.

[1967] Variant protein HUMPHOSLIP_PEA_{—}2_P35 (SEQ ID NO:587) also has the following non-silent SNPs (Single Nucleotide Polymorphisms) as listed in Table 23, (given according to their position(s) on the amino acid sequence, with the alternative amino acid(s) listed; the last column indicates whether the SNP is known or not; the presence of known SNPs in variant protein HUMPHOSLIP_PEA_{—}2_P35 (SEQ ID NO:587) sequence provides support for the deduced sequence of this variant protein according to the present invention).

TABLE 23
Amino acid mutations

| SNP position(s) on | Alternative | Previously |
|---|---|---|
| amino acid sequence | amino acid(s) | known SNP? |
| 16 | H -> R | Yes |
| 18 | E -> V | Yes |
| 81 | D -> H | Yes |

[1968] The glycosylation sites of variant protein HUMPHOSLIP_PEA_{—}2_P35 (SEQ ID NO:587), as compared to the known protein Phospholipid transfer protein precursor (SEQ ID NO:636), are described in Table 24 (given according to their position(s) on the amino acid sequence in the first column; the second column indicates whether the glycosylation site is present in the variant protein; and the last column indicates whether the position is different on the variant protein).

TABLE 24
Glycosylation site(s)

| Position(s) on known | Present in | Position in |
|---|---|---|
| amino acid sequence | variant protein? | variant protein? |
| 94 | Yes | 94 |
| 143 | No | |
| 64 | Yes | 64 |
| 245 | No | |
| 398 | No | |
| 117 | No | |

[1969] Variant protein HUMPHOSLIP_PEA_{—}2_P35 (SEQ ID NO:587) is encoded by the following transcript(s): HUMPHOSLIP_PEA_{—}2_T18 (SEQ ID NO:55), for which the sequence(s) is/are given at the end of the application. The coding portion of transcript HUMPHOSLIP_PEA_{—}2_T18 (SEQ ID NO:55) is shown in bold; this coding portion starts at position 276 and ends at position 719. The transcript also has the following SNPs as listed in Table 25 (given according to their position on the nucleotide sequence, with the alternative nucleic acid listed; the last column indicates whether the SNP is known or not; the presence of known SNPs in variant protein HUMPHOSLIP_PEA_{—}2_P35 (SEQ ID NO:587) sequence provides support for the deduced sequence of this variant protein according to the present invention).

TABLE 25
Nucleic acid SNPs

| SNP position on | Alternative | Previously |
|---|---|---|
| nucleotide sequence | nucleic acid | known SNP? |
| 174 | G -> T | No |
| 175 | A -> T | No |
| 322 | A -> G | Yes |
| 328 | A -> T | Yes |
| 431 | G -> A | Yes |
| 516 | G -> C | Yes |
| 765 | C -> T | Yes |
| 827 | C -> T | Yes |
| 842 | T -> | No |
| 908 | G -> | No |
| 908 | G -> C | No |
| 937 | A -> | No |
| 967 | C -> | No |
| 1090 | C -> | No |
| 1251 | C -> T | Yes |
| 1311 | G -> | No |
| 1342 | C -> T | Yes |
| 1363 | C -> | No |
| 1433 | T -> A | No |
| 1444 | C -> T | Yes |
| 1479 | G -> C | Yes |
| 1536 | T -> A | Yes |
| 1664 | C -> A | Yes |
| 1683 | C -> T | No |
| 1763 | C -> T | Yes |
| 1779 | A -> G | No |
| 1779 | A -> T | No |
| 1844 | A -> G | Yes |
| 1868 | T -> A | No |
| 1945 | G -> T | Yes |
| 2078 | G -> A | Yes |
| 2107 | G -> T | Yes |
| 2287 | G -> A | Yes |
| 2483 | C -> T | Yes |
| 2539 | G -> T | Yes |
| 2679 | C -> T | Yes |
| 2780 | C -> T | Yes |
| 3095 | A -> G | No |

[1970] As noted above, cluster HUMPHOSLIP features 53 segment(s), which were listed in Table 2 above and for which the sequence(s) are given at the end of the application. These segment(s) are portions of nucleic acid sequence(s) which are described herein separately because they are of particular interest. A description of each segment according to the present invention is now provided.

[1971] Segment cluster HUMPHOSLIP_PEA_{—}2_node_{—}0 (SEQ ID NO:366) according to the present invention is supported by 150 libraries. The number of libraries was determined as previously described. This segment can be found in the following transcript(s): HUMPHOSLIP_PEA_{—}2_T6 (SEQ ID NO:50), HUMPHOSLIP_PEA_{—}2_T7 (SEQ ID NO:51), HUMPHOSLIP_PEA_{—}2_T14 (SEQ ID NO:52), HUMPHOSLIP_PEA_{—}2_T16 (SEQ ID NO:53), HUMPHOSLIP_PEA_{—}2_T17 (SEQ ID NO:54), HUMPHOSLIP_PEA_{—}2_T18 (SEQ ID NO:55) and HUMPHOSLIP_PEA_{—}2_T19 (SEQ ID NO:56). Table 26 below describes the starting and ending position of this segment on each transcript.

TABLE 26
Segment location on transcripts

| | Segment | Segment |
|---|---|---|
| | starting | ending |
| Transcript name | position | position |
| HUMPHOSLIP_PEA_2_T6 (SEQ ID NO: 50) | 1 | 264 |
| HUMPHOSLIP_PEA_2_T7 (SEQ ID NO: 51) | 1 | 264 |
| HUMPHOSLIP_PEA_2_T14 (SEQ ID NO: 52) | 1 | 264 |
| HUMPHOSLIP_PEA_2_T16 (SEQ ID NO: 53) | 1 | 264 |
| HUMPHOSLIP_PEA_2_T17 (SEQ ID NO: 54) | 1 | 264 |
| HUMPHOSLIP_PEA_2_T18 (SEQ ID NO: 55) | 1 | 264 |
| HUMPHOSLIP_PEA_2_T19 (SEQ ID NO: 56) | 1 | 264 |

[1972] Segment cluster HUMPHOSLIP_PEA_{—}2_node_{—}19 (SEQ ID NO:367) according to the present invention is supported by 186 libraries. The number of libraries was determined as previously described. This segment can be found in the following transcript(s): HUMPHOSLIP_PEA_{—}2_T6 (SEQ ID NO:50), HUMPHOSLIP_PEA_{—}2_T7 (SEQ ID NO:51), HUMPHOSLIP_PEA_{—}2_T14 (SEQ ID NO:52), HUMPHOSLIP_PEA_{—}2_T16 (SEQ ID NO:53) and HUMPHOSLIP_PEA_{—}2_T19 (SEQ ID NO:56). Table 27 below describes the starting and ending position of this segment on each transcript.

TABLE 27
Segment location on transcripts

| | Segment | Segment |
|---|---|---|
| | starting | ending |
| Transcript name | position | position |
| HUMPHOSLIP_PEA_2_T6 (SEQ ID NO: 50) | 559 | 714 |
| HUMPHOSLIP_PEA_2_T7 (SEQ ID NO: 51) | 697 | 852 |
| HUMPHOSLIP_PEA_2_T14 (SEQ ID NO: 52) | 605 | 760 |
| HUMPHOSLIP_PEA_2_T16 (SEQ ID NO: 53) | 605 | 760 |
| HUMPHOSLIP_PEA_2_T19 (SEQ ID NO: 56) | 605 | 760 |

[1973] Segment cluster HUMPHOSLIP_PEA_{—}2_node_{—}34 (SEQ ID NO:368) according to the present invention is supported by 191 libraries. The number of libraries was determined as previously described. This segment can be found in the following transcript(s): HUMPHOSLIP_PEA_{—}2_T6 (SEQ ID NO:50), HUMPHOSLIP_PEA_{—}2_T7 (SEQ ID NO:51), HUMPHOSLIP_PEA_{—}2_T14 (SEQ ID NO:52), HUMPHOSLIP_PEA_{—}2_T16 (SEQ ID NO:53), HUMPHOSLIP_PEA_{—}2_T17 (SEQ ID NO:54), HUMPHOSLIP_PEA_{—}2_T18 (SEQ ID NO:55) and HUMPHOSLIP_PEA_{—}2_T19 (SEQ ID NO:56). Table 28 below describes the starting and ending position of this segment on each transcript.

TABLE 28
Segment location on transcripts

| | Segment | Segment |
|---|---|---|
| | starting | ending |
| Transcript name | position | position |
| HUMPHOSLIP_PEA_2_T6 (SEQ ID NO: 50) | 971 | 1111 |
| HUMPHOSLIP_PEA_2_T7 (SEQ ID NO: 51) | 1109 | 1249 |
| HUMPHOSLIP_PEA_2_T14 (SEQ ID NO: 52) | 1102 | 1242 |
| HUMPHOSLIP_PEA_2_T16 (SEQ ID NO: 53) | 1010 | 1150 |
| HUMPHOSLIP_PEA_2_T17 (SEQ ID NO: 54) | 732 | 872 |
| HUMPHOSLIP_PEA_2_T18 (SEQ ID NO: 55) | 946 | 1086 |
| HUMPHOSLIP_PEA_2_T19 (SEQ ID NO: 56) | 1017 | 1157 |

[1974] Segment cluster HUMPHOSLIP_PEA_{—}2_node_{—}68 (SEQ ID NO:369) according to the present invention is supported by 131 libraries. The number of libraries was determined as previously described. This segment can be found in the following transcript(s): HUMPHOSLIP_PEA_{—}2_T6 (SEQ ID NO:50), HUMPHOSLIP_PEA_{—}2_T7 (SEQ ID NO:51), HUMPHOSLIP_PEA_{—}2_T14 (SEQ ID NO:52), HUMPHOSLIP_PEA_{—}2_T16 (SEQ ID NO:53), HUMPHOSLIP_PEA_{—}2_T17 (SEQ ID NO:54), HUMPHOSLIP_PEA_{—}2_T18 (SEQ ID NO:55) and HUMPHOSLIP_PEA_{—}2_T19 (SEQ ID NO:56). Table 29 below describes the starting and ending position of this segment on each transcript.

TABLE 29
Segment location on transcripts

| | Segment | Segment |
|---|---|---|
| | starting | ending |
| Transcript name | position | position |
| HUMPHOSLIP_PEA_2_T6 (SEQ ID NO: 50) | 1867 | 2285 |
| HUMPHOSLIP_PEA_2_T7 (SEQ ID NO: 51) | 2005 | 2423 |
| HUMPHOSLIP_PEA_2_T14 (SEQ ID NO: 52) | 1998 | 2416 |
| HUMPHOSLIP_PEA_2_T16 (SEQ ID NO: 53) | 1906 | 2324 |
| HUMPHOSLIP_PEA_2_T17 (SEQ ID NO: 54) | 1628 | 2046 |
| HUMPHOSLIP_PEA_2_T18 (SEQ ID NO: 55) | 1842 | 2260 |
| HUMPHOSLIP_PEA_2_T19 (SEQ ID NO: 56) | 1996 | 2414 |

[1975] Segment cluster HUMPHOSLIP_PEA_{—}2_node_{—}70 (SEQ ID NO:370) according to the present invention is supported by 5 libraries. The number of libraries was determined as previously described. This segment can be found in the following transcript(s): HUMPHOSLIP_PEA_{—}2_T6 (SEQ ID NO:50), HUMPHOSLIP_PEA_{—}2_T7 (SEQ ID NO:51), HUMPHOSLIP_PEA_{—}2_T14 (SEQ ID NO:52), HUMPHOSLIP_PEA_{—}2_T16 (SEQ ID NO:53), HUMPHOSLIP_PEA_{—}2_T17 (SEQ ID NO:54), HUMPHOSLIP_PEA_{—}2_T18 (SEQ ID NO:55) and HUMPHOSLIP_PEA_{—}2_T19 (SEQ ID NO:56). Table 30 below describes the starting and ending position of this segment on each transcript.

TABLE 30
Segment location on transcripts

| | Segment | Segment |
|---|---|---|
| | starting | ending |
| Transcript name | position | position |
| HUMPHOSLIP_PEA_2_T6 (SEQ ID NO: 50) | 2298 | 2529 |
| HUMPHOSLIP_PEA_2_T7 (SEQ ID NO: 51) | 2436 | 2667 |
| HUMPHOSLIP_PEA_2_T14 (SEQ ID NO: 52) | 2429 | 2660 |
| HUMPHOSLIP_PEA_2_T16 (SEQ ID NO: 53) | 2337 | 2568 |
| HUMPHOSLIP_PEA_2_T17 (SEQ ID NO: 54) | 2059 | 2290 |
| HUMPHOSLIP_PEA_2_T18 (SEQ ID NO: 55) | 2273 | 2504 |
| HUMPHOSLIP_PEA_2_T19 (SEQ ID NO: 56) | 2427 | 2658 |

[1976] Segment cluster HUMPHOSLIP_PEA_{—}2_node_{—}75 (SEQ ID NO:371) according to the present invention is supported by 14 libraries. The number of libraries was determined as previously described. This segment can be found in the following transcript(s): HUMPHOSLIP_PEA_{—}2_T6 (SEQ ID NO:50), HUMPHOSLIP_PEA_{—}2_T7 (SEQ ID NO:51), HUMPHOSLIP_PEA_{—}2_T14 (SEQ ID NO:52), HUMPHOSLIP_PEA_{—}2_T16 (SEQ ID NO:53), HUMPHOSLIP_PEA_{—}2_T17 (SEQ ID NO:54), HUMPHOSLIP_PEA_{—}2_T18 (SEQ ID NO:55) and HUMPHOSLIP_PEA_{—}2_T19 (SEQ ID NO:56). Table 31 below describes the starting and ending position of this segment on each transcript.

TABLE 31
Segment location on transcripts

| | Segment | Segment |
|---|---|---|
| | starting | ending |
| Transcript name | position | position |
| HUMPHOSLIP_PEA_2_T6 (SEQ ID NO: 50) | 2846 | 3125 |
| HUMPHOSLIP_PEA_2_T7 (SEQ ID NO: 51) | 2984 | 3263 |
| HUMPHOSLIP_PEA_2_T14 (SEQ ID NO: 52) | 2977 | 3256 |
| HUMPHOSLIP_PEA_2_T16 (SEQ ID NO: 53) | 2885 | 3164 |
| HUMPHOSLIP_PEA_2_T17 (SEQ ID NO: 54) | 2607 | 2886 |
| HUMPHOSLIP_PEA_2_T18 (SEQ ID NO: 55) | 2821 | 3100 |
| HUMPHOSLIP_PEA_2_T19 (SEQ ID NO: 56) | 2975 | 3254 |

[1977] According to an optional embodiment of the present invention, short segments related to the above cluster are also provided. These segments are up to about 120 bp in length, and so are included in a separate description.

[1978] Segment cluster HUMPHOSLIP_PEA_{—}2_node_{—}2 (SEQ ID NO:372) according to the present invention is supported by 159 libraries. The number of libraries was determined as previously described. This segment can be found in the following transcript(s): HUMPHOSLIP_PEA_{—}2_T6 (SEQ ID NO:50), HUMPHOSLIP_PEA_{—}2_T7 (SEQ ID NO:51), HUMPHOSLIP_PEA_{—}2_T14 (SEQ ID NO:52), HUMPHOSLIP_PEA_{—}2_T16 (SEQ ID NO:53), HUMPHOSLIP_PEA_{—}2_T17 (SEQ ID NO:54), HUMPHOSLIP_PEA_{—}2_T18 (SEQ ID NO:55) and HUMPHOSLIP_PEA_{—}2_T19 (SEQ ID NO:56). Table 32 below describes the starting and ending position of this segment on each transcript.

TABLE 32
Segment location on transcripts

| | Segment | Segment |
|---|---|---|
| | starting | ending |
| Transcript name | position | position |
| HUMPHOSLIP_PEA_2_T6 (SEQ ID NO: 50) | 265 | 337 |
| HUMPHOSLIP_PEA_2_T7 (SEQ ID NO: 51) | 265 | 337 |
| HUMPHOSLIP_PEA_2_T14 (SEQ ID NO: 52) | 265 | 337 |
| HUMPHOSLIP_PEA_2_T16 (SEQ ID NO: 53) | 265 | 337 |
| HUMPHOSLIP_PEA_2_T17 (SEQ ID NO: 54) | 265 | 337 |
| HUMPHOSLIP_PEA_2_T18 (SEQ ID NO: 55) | 265 | 337 |
| HUMPHOSLIP_PEA_2_T19 (SEQ ID NO: 56) | 265 | 337 |

[1979] Segment cluster HUMPHOSLIP_PEA_{—}2_node_{—}3 (SEQ ID NO:373) according to the present invention can be found in the following transcript(s): HUMPHOSLIP_PEA_{—}2_T7 (SEQ ID NO:51) (SEQ ID NO:52), HUMPHOSLIP_PEA_{—}2_T16 (SEQ ID NO:53) (SEQ ID NO:54), HUMPHOSLIP_PEA_{—}2_T18 (SEQ ID NO:55) and HUMPHOSLIP_PEA_{—}2_T19 (SEQ ID NO:56). Table 33 below describes the starting and ending position of this segment on each transcript.

TABLE 33
Segment location on transcripts

| | Segment | Segment |
|---|---|---|
| | starting | ending |
| Transcript name | position | position |
| HUMPHOSLIP_PEA_2_T7 (SEQ ID NO: 51) | 338 | 355 |
| HUMPHOSLIP_PEA_2_T14 (SEQ ID NO: 52) | 338 | 355 |
| HUMPHOSLIP_PEA_2_T16 (SEQ ID NO: 53) | 338 | 355 |
| HUMPHOSLIP_PEA_2_T17 (SEQ ID NO: 54) | 338 | 355 |
| HUMPHOSLIP_PEA_2_T18 (SEQ ID NO: 55) | 338 | 355 |
| HUMPHOSLIP_PEA_2_T19 (SEQ ID NO: 56) | 338 | 355 |

[1980] Segment cluster HUMPHOSLIP_PEA_{—}2_node_{—}4 (SEQ ID NO:374) according to the present invention can be found in the following transcript(s): HUMPHOSLIP_PEA_{—}2_T7 (SEQ ID NO:51), HUMPHOSLIP_PEA_{—}2_T14 (SEQ ID NO:52), HUMPHOSLIP_PEA_{—}2_T16 (SEQ ID NO:53), HUMPHOSLIP_PEA_{—}2_T17 (SEQ ID NO:54), HUMPHOSLIP_PEA_{—}2_T18 (SEQ ID NO:55) and HUMPHOSLIP_PEA_{—}2_T19 (SEQ ID NO:56). Table 34 below describes the starting and ending position of this segment on each transcript.

TABLE 34
Segment location on transcripts

| | Segment | Segment |
|---|---|---|
| | starting | ending |
| Transcript name | position | position |
| HUMPHOSLIP_PEA_2_T7 (SEQ ID NO: 51) | 356 | 375 |
| HUMPHOSLIP_PEA_2_T14 (SEQ ID NO: 52) | 356 | 375 |
| HUMPHOSLIP_PEA_2_T16 (SEQ ID NO: 53) | 356 | 375 |
| HUMPHOSLIP_PEA_2_T17 (SEQ ID NO: 54) | 356 | 375 |
| HUMPHOSLIP_PEA_2_T18 (SEQ ID NO: 55) | 356 | 375 |
| HUMPHOSLIP_PEA_2_T19 (SEQ ID NO: 56) | 356 | 375 |

[1981] Segment cluster HUMPHOSLIP_PEA_{—}2_node_{—}6 (SEQ ID NO:375) according to the present invention can be found in the following transcript(s): HUMPHOSLIP_PEA_{—}2_T7 (SEQ ID NO:51), HUMPHOSLIP_PEA_{—}2_T14 (SEQ ID NO:52), HUMPHOSLIP_PEA_{—}2_T16 (SEQ ID NO:53), HUMPHOSLIP_PEA_{—}2_T17 (SEQ ID NO:54), HUMPHOSLIP_PEA_{—}2_T18 (SEQ ID NO:55) and HUMPHOSLIP_PEA_{—}2_T19 (SEQ ID NO:56). Table 35 below describes the starting and ending position of this segment on each transcript.

TABLE 35
Segment location on transcripts

| | Segment | Segment |
|---|---|---|
| | starting | ending |
| Transcript name | position | position |
| HUMPHOSLIP_PEA_2_T7 (SEQ ID NO: 51) | 376 | 383 |
| HUMPHOSLIP_PEA_2_T14 (SEQ ID NO: 52) | 376 | 383 |
| HUMPHOSLIP_PEA_2_T16 (SEQ ID NO: 53) | 376 | 383 |
| HUMPHOSLIP_PEA_2_T17 (SEQ ID NO: 54) | 376 | 383 |
| HUMPHOSLIP_PEA_2_T18 (SEQ ID NO: 55) | 376 | 383 |
| HUMPHOSLIP_PEA_2_T19 (SEQ ID NO: 56) | 376 | 383 |

[1982] Segment cluster HUMPHOSLIP_PEA_{—}2_node_{—}7 (SEQ ID NO:376) according to the present invention can be found in the following transcript(s): HUMPHOSLIP_PEA_{—}2_T6 (SEQ ID NO:50), HUMPHOSLIP_PEA_{—}2_T7 (SEQ ID NO:51), HUMPHOSLIP_PEA_{—}2_T14 (SEQ ID NO:52), HUMPHOSLIP_PEA_{—}2_T16 (SEQ ID NO:53), HUMPHOSLIP_PEA_{—}2_T17 (SEQ ID NO:54), HUMPHOSLIP_PEA_{—}2_T18 (SEQ ID NO:55) and HUMPHOSLIP_PEA_{—}2_T19 (SEQ ID NO:56). Table 36 below describes the starting and ending position of this segment on each transcript.

TABLE 36
Segment location on transcripts

| | Segment | Segment |
|---|---|---|
| | starting | ending |
| Transcript name | position | position |
| HUMPHOSLIP_PEA_2_T6 (SEQ ID NO: 50) | 338 | 343 |
| HUMPHOSLIP_PEA_2_T7 (SEQ ID NO: 51) | 384 | 389 |
| HUMPHOSLIP_PEA_2_T14 (SEQ ID NO: 52) | 384 | 389 |
| HUMPHOSLIP_PEA_2_T16 (SEQ ID NO: 53) | 384 | 389 |
| HUMPHOSLIP_PEA_2_T17 (SEQ ID NO: 54) | 384 | 389 |
| HUMPHOSLIP_PEA_2_T18 (SEQ ID NO: 55) | 384 | 389 |
| HUMPHOSLIP_PEA_2_T19 (SEQ ID NO: 56) | 384 | 389 |

[1983] Segment cluster HUMPHOSLIP_PEA_{—}2_node_{—}8 (SEQ ID NO:377) according to the present invention is supported by 171 libraries. The number of libraries was determined as previously described. This segment can be found in the following transcript(s): HUMPHOSLIP_PEA_{—}2_T6 (SEQ ID NO:50), HUMPHOSLIP_PEA_{—}2_T7 (SEQ ID NO:51), HUMPHOSLIP_PEA_{—}2_T14 (SEQ ID NO:52), HUMPHOSLIP_PEA_{—}2_T16 (SEQ ID NO:53), HUMPHOSLIP_PEA_{—}2_T17 (SEQ ID NO:54), HUMPHOSLIP_PEA_{—}2_T18 (SEQ ID NO:55) and HUMPHOSLIP_PEA_{—}2_T19 (SEQ ID NO:56). Table 37 below describes the starting and ending position of this segment on each transcript.

TABLE 37
Segment location on transcripts

| | Segment | Segment |
|---|---|---|
| | starting | ending |
| Transcript name | position | position |
| HUMPHOSLIP_PEA_2_T6 (SEQ ID NO: 50) | 334 | 378 |
| HUMPHOSLIP_PEA_2_T7 (SEQ ID NO: 51) | 390 | 424 |
| HUMPHOSLIP_PEA_2_T14 (SEQ ID NO: 52) | 390 | 424 |
| HUMPHOSLIP_PEA_2_T16 (SEQ ID NO: 53) | 390 | 424 |
| HUMPHOSLIP_PEA_2_T17 (SEQ ID NO: 54) | 390 | 424 |
| HUMPHOSLIP_PEA_2_T18 (SEQ ID NO: 55) | 390 | 424 |
| HUMPHOSLIP_PEA_2_T19 (SEQ ID NO: 56) | 390 | 424 |

[1984] Segment cluster HUMPHOSLIP_PEA_{—}2_node_{—}9 (SEQ ID NO:378) according to the present invention is supported by 168 libraries. The number of libraries was determined as previously described. This segment can be found in the following transcript(s): HUMPHOSLIP_PEA_{—}2_T6 (SEQ ID NO:50), HUMPHOSLIP_PEA_{—}2_T7 (SEQ ID NO:51), HUMPHOSLIP_PEA_{—}2_T14 (SEQ ID NO:52), HUMPHOSLIP_PEA_{—}2_T16 (SEQ ID NO:53), HUMPHOSLIP_PEA_{—}2_T17 (SEQ ID NO:54), HUMPHOSLIP_PEA_{—}2_T18 (SEQ ID NO:55) and HUMPHOSLIP_PEA_{—}2_T19 (SEQ ID NO:56). Table 38 below describes the starting and ending position of this segment on each transcript.

TABLE 38
Segment location on transcripts

| | Segment | Segment |
|---|---|---|
| | starting | ending |
| Transcript name | position | position |
| HUMPHOSLIP_PEA_2_T6 (SEQ ID NO: 50) | 379 | 429 |
| HUMPHOSLIP_PEA_2_T7 (SEQ ID NO: 51) | 425 | 475 |
| HUMPHOSLIP_PEA_2_T14 (SEQ ID NO: 52) | 425 | 475 |
| HUMPHOSLIP_PEA_2_T16 (SEQ ID NO: 53) | 425 | 475 |
| HUMPHOSLIP_PEA_2_T17 (SEQ ID NO: 54) | 425 | 475 |
| HUMPHOSLIP_PEA_2_T18 (SEQ ID NO: 55) | 425 | 475 |
| HUMPHOSLIP_PEA_2_T19 (SEQ ID NO: 56) | 425 | 475 |

[1985] Segment cluster HUMPHOSLIP_PEA_{—}2_node_{—}14 (SEQ ID NO:379) according to the present invention is supported by 6 libraries. The number of libraries was determined as previously described. This segment can be found in the following transcript(s): HUMPHOSLIP_PEA_{—}2_T7 (SEQ ID NO:51). Table 39 below describes the starting and ending position of this segment on each transcript.

TABLE 39
Segment location on transcripts

| | Segment | Segment |
|---|---|---|
| | starting | ending |
| Transcript name | position | position |
| HUMPHOSLIP_PEA_2_T7 (SEQ ID NO: 51) | 476 | 567 |

[1986] Segment cluster HUMPHOSLIP_PEA_{—}2_node_{—}15 (SEQ ID NO:380) according to the present invention can be found in the following transcript(s): HUMPHOSLIP_PEA_{—}2_T6 (SEQ ID NO:50), HUMPHOSLIP_PEA_{—}2_T7 (SEQ ID NO:51), HUMPHOSLIP_PEA_{—}2_T14 (SEQ ID NO:52), HUMPHOSLIP_PEA_{—}2_T16 (SEQ ID NO:53), HUMPHOSLIP_PEA_{—}2_T18 (SEQ ID NO:55) and HUMPHOSLIP_PEA_{—}2_T19 (SEQ ID NO:56). Table 40 below describes the starting and ending position of this segment on each transcript.

TABLE 40
Segment location on transcripts

| | Segment | Segment |
|---|---|---|
| | starting | ending |
| Transcript name | position | position |
| HUMPHOSLIP_PEA_2_T6 (SEQ ID NO: 50) | 430 | 445 |
| HUMPHOSLIP_PEA_2_T7 (SEQ ID NO: 51) | 568 | 583 |
| HUMPHOSLIP_PEA_2_T14 (SEQ ID NO: 52) | 476 | 491 |
| HUMPHOSLIP_PEA_2_T16 (SEQ ID NO: 53) | 476 | 491 |
| HUMPHOSLIP_PEA_2_T18 (SEQ ID NO: 55) | 476 | 491 |
| HUMPHOSLIP_PEA_2_T19 (SEQ ID NO: 56) | 476 | 491 |

[1987] Segment cluster HUMPHOSLIP_PEA_{—}2_node_{—}16 (SEQ ID NO:381) according to the present invention is supported by 179 libraries. The number of libraries was determined as previously described. This segment can be found in the following transcript(s): HUMPHOSLIP_PEA_{—}2_T6 (SEQ ID NO:50), HUMPHOSLIP_PEA_{—}2_T7 (SEQ ID NO:51), HUMPHOSLIP_PEA_{—}2_T14 (SEQ ID NO:52), HUMPHOSLIP_PEA_{—}2_T16 (SEQ ID NO:53), HUMPHOSLIP_PEA_{—}2_T18 (SEQ ID NO:55) and HUMPHOSLIP_PEA_{—}2_T19 (SEQ ID NO:56). Table 41 below describes the starting and ending position of this segment on each transcript.

TABLE 41
Segment location on transcripts

| | Segment | Segment |
|---|---|---|
| | starting | ending |
| Transcript name | position | position |
| HUMPHOSLIP_PEA_2_T6 (SEQ ID NO: 50) | 446 | 534 |
| HUMPHOSLIP_PEA_2_T7 (SEQ ID NO: 51) | 584 | 672 |
| HUMPHOSLIP_PEA_2_T14 (SEQ ID NO: 52) | 492 | 580 |
| HUMPHOSLIP_PEA_2_T16 (SEQ ID NO: 53) | 492 | 580 |
| HUMPHOSLIP_PEA_2_T18 (SEQ ID NO: 55) | 492 | 580 |
| HUMPHOSLIP_PEA_2_T19 (SEQ ID NO: 56) | 492 | 580 |

[1988] Segment cluster HUMPHOSLIP_PEA_{—}2_node_{—}17 (SEQ ID NO:382) according to the present invention can be found in the following transcript(s): HUMPHOSLIP_PEA_{—}2_T6 (SEQ ID NO:50), HUMPHOSLIP_PEA_{—}2_T7 (SEQ ID NO:51), HUMPHOSLIP_PEA_{—}2_T14 (SEQ ID NO:52), HUMPHOSLIP_PEA_{—}2_T16 (SEQ ID NO:53), HUMPHOSLIP_PEA_{—}2_T18 (SEQ ID NO:55) and HUMPHOSLIP_PEA_{—}2_T19 (SEQ ID NO:56). Table 42 below describes the starting and ending position of this segment on each transcript.

TABLE 42
Segment location on transcripts

| | Segment | Segment |
|---|---|---|
| | starting | ending |
| Transcript name | position | position |
| HUMPHOSLIP_PEA_2_T6 (SEQ ID NO: 50) | 535 | 558 |
| HUMPHOSLIP_PEA_2_T7 (SEQ ID NO: 51) | 673 | 696 |
| HUMPHOSLIP_PEA_2_T14 (SEQ ID NO: 52) | 581 | 604 |
| HUMPHOSLIP_PEA_2_T16 (SEQ ID NO: 53) | 581 | 604 |
| HUMPHOSLIP_PEA_2_T18 (SEQ ID NO: 55) | 581 | 604 |
| HUMPHOSLIP_PEA_2_T19 (SEQ ID NO: 56) | 581 | 604 |

[1989] Segment cluster HUMPHOSLIP_PEA_{—}2_node_{—}23 (SEQ ID NO:383) according to the present invention is supported by 168 libraries. The number of libraries was determined as previously described. This segment can be found in the following transcript(s): HUMPHOSLIP_PEA_{—}2_T6 (SEQ ID NO:50), HUMPHOSLIP_PEA_{—}2_T7 (SEQ ID NO:51), HUMPHOSLIP_PEA_{—}2_T14 (SEQ ID NO:52), HUMPHOSLIP_PEA_{—}2_T16 (SEQ ID NO:53), HUMPHOSLIP_PEA_{—}2_T17 (SEQ ID NO:54), HUMPHOSLIP_PEA_{—}2_T18 (SEQ ID NO:55) and HUMPHOSLIP_PEA_{—}2_T19 (SEQ ID NO:56). Table 43 below describes the starting and ending position of this segment on each transcript.

TABLE 43
Segment location on transcripts

| | Segment | Segment |
|---|---|---|
| | starting | ending |
| Transcript name | position | position |
| HUMPHOSLIP_PEA_2_T6 (SEQ ID NO: 50) | 715 | 766 |
| HUMPHOSLIP_PEA_2_T7 (SEQ ID NO: 51) | 853 | 904 |
| HUMPHOSLIP_PEA_2_T14 (SEQ ID NO: 52) | 761 | 812 |
| HUMPHOSLIP_PEA_2_T16 (SEQ ID NO: 53) | 761 | 812 |
| HUMPHOSLIP_PEA_2_T17 (SEQ ID NO: 54) | 476 | 527 |
| HUMPHOSLIP_PEA_2_T18 (SEQ ID NO: 55) | 605 | 656 |
| HUMPHOSLIP_PEA_2_T19 (SEQ ID NO: 56) | 761 | 812 |

[1990] Segment cluster HUMPHOSLIP_PEA_{—}2_node_{—}24 (SEQ ID NO:384) according to the present invention can be found in the following transcript(s): HUMPHOSLIP_PEA_{—}2_T6 (SEQ ID NO:50), HUMPHOSLIP_PEA_{—}2_T7 (SEQ ID NO:51), HUMPHOSLIP_PEA_{—}2_T14 (SEQ ID NO:52), HUMPHOSLIP_PEA_{—}2_T16 (SEQ ID NO:53), HUMPHOSLIP_PEA_{—}2_T17 (SEQ ID NO:54), HUMPHOSLIP_PEA_{—}2_T18 (SEQ ID NO:55) and HUMPHOSLIP_PEA_{—}2_T19 (SEQ ID NO:56). Table 44 below describes the starting and ending position of this segment on each transcript.

TABLE 44
Segment location on transcripts

| | Segment | Segment |
|---|---|---|
| | starting | ending |
| Transcript name | position | position |
| HUMPHOSLIP_PEA_2_T6 (SEQ ID NO: 50) | 767 | 778 |
| HUMPHOSLIP_PEA_2_T7 (SEQ ID NO: 51) | 905 | 916 |
| HUMPHOSLIP_PEA_2_T14 (SEQ ID NO: 52) | 813 | 824 |
| HUMPHOSLIP_PEA_2_T16 (SEQ ID NO: 53) | 813 | 824 |
| HUMPHOSLIP_PEA_2_T17 (SEQ ID NO: 54) | 528 | 539 |
| HUMPHOSLIP_PEA_2_T18 (SEQ ID NO: 55) | 657 | 668 |
| HUMPHOSLIP_PEA_2_T19 (SEQ ID NO: 56) | 813 | 824 |

[1991] Segment cluster HUMPHOSLIP_PEA_{—}2_node_{—}25 (SEQ ID NO:385) according to the present invention is supported by 5 libraries. The number of libraries was determined as previously described. This segment can be found in the following transcript(s): HUMPHOSLIP_PEA_{—}2_T14 (SEQ ID NO:52) and HUMPHOSLIP_PEA_{—}2_T18 (SEQ ID NO:55). Table 45 below describes the starting and ending position of this segment on each transcript.

TABLE 45
Segment location on transcripts

| | Segment | Segment |
|---|---|---|
| | starting | ending |
| Transcript name | position | position |
| HUMPHOSLIP_PEA_2_T14 (SEQ ID NO: 52) | 825 | 909 |
| HUMPHOSLIP_PEA_2_T18 (SEQ ID NO: 55) | 669 | 753 |

[1992] Segment cluster HUMPHOSLIP_PEA_{—}2_node_{—}26 (SEQ ID NO:386) according to the present invention is supported by 163 libraries. The number of libraries was determined as previously described. This segment can be found in the following transcript(s): HUMPHOSLIP_PEA_{—}2_T6 (SEQ ID NO:50), HUMPHOSLIP_PEA_{—}2_T7 (SEQ ID NO:51), HUMPHOSLIP_PEA_{—}2_T14 (SEQ ID NO:52), HUMPHOSLIP_PEA_{—}2_T16 (SEQ ID NO:53), HUMPHOSLIP_PEA_{—}2_T17 (SEQ ID NO:54), HUMPHOSLIP_PEA_{—}2_T18 (SEQ ID NO:55) and HUMPHOSLIP_PEA_{—}2_T19 (SEQ ID NO:56). Table 46 below describes the starting and ending position of this segment on each transcript.

TABLE 46
Segment location on transcripts

| | Segment | Segment |
|---|---|---|
| | starting | ending |
| Transcript name | position | position |
| HUMPHOSLIP_PEA_2_T6 (SEQ ID NO: 50) | 779 | 842 |
| HUMPHOSLIP_PEA_2_T7 (SEQ ID NO: 51) | 917 | 980 |
| HUMPHOSLIP_PEA_2_T14 (SEQ ID NO: 52) | 910 | 973 |
| HUMPHOSLIP_PEA_2_T16 (SEQ ID NO: 53) | 825 | 888 |
| HUMPHOSLIP_PEA_2_T17 (SEQ ID NO: 54) | 540 | 603 |
| HUMPHOSLIP_PEA_2_T18 (SEQ ID NO: 55) | 754 | 817 |
| HUMPHOSLIP_PEA_2_T19 (SEQ ID NO: 56) | 825 | 888 |

[1993] Segment cluster HUMPHOSLIP_PEA_{—}2_node_{—}29 (SEQ ID NO:387) according to the present invention can be found in the following transcript(s): HUMPHOSLIP_PEA_{—}2_T6 (SEQ ID NO:50), HUMPHOSLIP_PEA_{—}2_T7 (SEQ ID NO:51), HUMPHOSLIP_PEA_{—}2_T14 (SEQ ID NO:52), HUMPHOSLIP_PEA_{—}2_T17 (SEQ ID NO:54), HUMPHOSLIP_PEA_{—}2_T18 (SEQ ID NO:55) and HUMPHOSLIP_PEA_{—}2_T19 (SEQ ID NO:56). Table 47 below describes the starting and ending position of this segment on each transcript.

TABLE 47
Segment location on transcripts

| | Segment | Segment |
|---|---|---|
| | starting | ending |
| Transcript name | position | position |
| HUMPHOSLIP_PEA_2_T6 (SEQ ID NO: 50) | 843 | 849 |
| HUMPHOSLIP_PEA_2_T7 (SEQ ID NO: 51) | 981 | 387 |
| HUMPHOSLIP_PEA_2_T14 (SEQ ID NO: 52) | 974 | 980 |
| HUMPHOSLIP_PEA_2_T17 (SEQ ID NO: 54) | 604 | 610 |
| HUMPHOSLIP_PEA_2_T18 (SEQ ID NO: 55) | 818 | 824 |
| HUMPHOSLIP_PEA_2_T19 (SEQ ID NO: 56) | 889 | 895 |

[1994] Segment cluster HUMPHOSLIP_PEA_{—}2_node_{—}30 (SEQ ID NO:388) according to the present invention is supported by 181 libraries. The number of libraries was determined as previously described. This segment can be found in the following transcript(s): HUMPHOSLIP_PEA_{—}2_T6 (SEQ ID NO:50), HUMPHOSLIP_PEA_{—}2_T7 (SEQ ID NO:51), HUMPHOSLIP_PEA_{—}2_T14 (SEQ ID NO:52), HUMPHOSLIP_PEA_{—}2_T16 (SEQ ID NO:53), HUMPHOSLIP_PEA_{—}2_T17 (SEQ ID NO:54), HUMPHOSLIP_PEA_{—}2_T18 (SEQ ID NO:55) and HUMPHOSLIP_PEA_{—}2_T19 (SEQ ID NO:56). Table 48 below describes the starting and ending position of this segment on each transcript.

TABLE 48
Segment location on transcripts

| | Segment | Segment |
|---|---|---|
| | starting | ending |
| Transcript name | position | position |
| HUMPHOSLIP_PEA_2_T6 (SEQ ID NO: 50) | 850 | 934 |
| HUMPHOSLIP_PEA_2_T7 (SEQ ID NO: 51) | 988 | 1072 |
| HUMPHOSLIP_PEA_2_T14 (SEQ ID NO: 52) | 981 | 1065 |
| HUMPHOSLIP_PEA_2_T16 (SEQ ID NO: 53) | 889 | 973 |
| HUMPHOSLIP_PEA_2_T17 (SEQ ID NO: 54) | 611 | 695 |
| HUMPHOSLIP_PEA_2_T18 (SEQ ID NO: 55) | 825 | 909 |
| HUMPHOSLIP_PEA_2_T19 (SEQ ID NO: 56) | 896 | 980 |

[1995] Segment cluster HUMPHOSLIP_PEA_{—}2_node_{—}33 (SEQ ID NO:389) according to the present invention is supported by 173 libraries. The number of libraries was determined as previously described. This segment can be found in the following transcript(s): HUMPHOSLIP_PEA_{—}2_T6 (SEQ ID NO:50), HUMPHOSLIP_PEA_{—}2_T7 (SEQ ID NO:51), HUMPHOSLIP_PEA_{—}2_T14 (SEQ ID NO:52), HUMPHOSLIP_PEA_{—}2_T16 (SEQ ID NO:53), HUMPHOSLIP_PEA_{—}2_T17 (SEQ ID NO:54), HUMPHOSLIP_PEA_{—}2_T18 (SEQ ID NO:55) and HUMPHOSLIP_PEA_{—}2_T19 (SEQ ID NO:56). Table 49 below describes the starting and ending position of this segment on each transcript.

TABLE 49
Segment location on transcripts

| | Segment | Segment |
|---|---|---|
| | starting | ending |
| Transcript name | position | position |
| HUMPHOSLIP_PEA_2_T6 (SEQ ID NO: 50) | 935 | 970 |
| HUMPHOSLIP_PEA_2_T7 (SEQ ID NO: 51) | 1073 | 1108 |
| HUMPHOSLIP_PEA_2_T14 (SEQ ID NO: 52) | 1066 | 1101 |
| HUMPHOSLIP_PEA_2_T16 (SEQ ID NO: 53) | 974 | 1009 |
| HUMPHOSLIP_PEA_2_T17 (SEQ ID NO: 54) | 696 | 731 |
| HUMPHOSLIP_PEA_2_T18 (SEQ ID NO: 55) | 910 | 945 |
| HUMPHOSLIP_PEA_2_T19 (SEQ ID NO: 56) | 981 | 1016 |

[1996] Segment cluster HUMPHOSLIP_PEA_{—}2_node_{—}36 (SEQ ID NO:390) according to the present invention is supported by 163 libraries. The number of libraries was determined as previously described. This segment can be found in the following transcript(s): HUMPHOSLIP_PEA_{—}2_T6 (SEQ ID NO:50), HUMPHOSLIP_PEA_{—}2_T7 (SEQ ID NO:51), HUMPHOSLIP_PEA_{—}2_T14 (SEQ ID NO:52), HUMPHOSLIP_PEA_{—}2_T16 (SEQ ID NO:53), HUMPHOSLIP_PEA_{—}2_T17 (SEQ ID NO:54), HUMPHOSLIP_PEA_{—}2_T18 (SEQ ID NO:55) and HUMPHOSLIP_PEA_{—}2_T19 (SEQ ID NO:56). Table 50 below describes the starting and ending position of this segment on each transcript.

TABLE 50
Segment location on transcripts

| | Segment | Segment |
|---|---|---|
| | starting | ending |
| Transcript name | position | position |
| HUMPHOSLIP_PEA_2_T6 (SEQ ID NO: 50) | 1112 | 1156 |
| HUMPHOSLIP_PEA_2_T7 (SEQ ID NO: 51) | 1250 | 1294 |
| HUMPHOSLIP_PEA_2_T14 (SEQ ID NO: 52) | 1243 | 1287 |
| HUMPHOSLIP_PEA_2_T16 (SEQ ID NO: 53) | 1151 | 1195 |
| HUMPHOSLIP_PEA_2_T17 (SEQ ID NO: 54) | 873 | 917 |
| HUMPHOSLIP_PEA_2_T18 (SEQ ID NO: 55) | 1087 | 1131 |
| HUMPHOSLIP_PEA_2_T19 (SEQ ID NO: 56) | 1158 | 1202 |

[1997] Segment cluster HUMPHOSLIP_PEA_{—}2_node_{—}37 (SEQ ID NO:391) according to the present invention can be found in the following transcript(s): HUMPHOSLIP_PEA_{—}2_T6 (SEQ ID NO:50), HUMPHOSLIP_PEA_{—}2_T7 (SEQ ID NO:51), HUMPHOSLIP_PEA_{—}2_T14 (SEQ ID NO:52), HUMPHOSLIP_PEA_{—}2_T16 (SEQ ID NO:53), HUMPHOSLIP_PEA_{—}2_T17 (SEQ ID NO:54), HUMPHOSLIP_PEA_{—}2_T18 (SEQ ID NO:55) and HUMPHOSLIP_PEA_{—}2_T19 (SEQ ID NO:56). Table 51 below describes the starting and ending position of this segment on each transcript.

TABLE 51
Segment location on transcripts

| | Segment | Segment |
|---|---|---|
| | starting | ending |
| Transcript name | position | position |
| HUMPHOSLIP_PEA_2_T6 (SEQ ID NO: 50) | 1157 | 1171 |
| HUMPHOSLIP_PEA_2_T7 (SEQ ID NO: 51) | 1295 | 1309 |
| HUMPHOSLIP_PEA_2_T14 (SEQ ID NO: 52) | 1288 | 1302 |
| HUMPHOSLIP_PEA_2_T16 (SEQ ID NO: 53) | 1196 | 1210 |
| HUMPHOSLIP_PEA_2_T17 (SEQ ID NO: 54) | 918 | 932 |
| HUMPHOSLIP_PEA_2_T18 (SEQ ID NO: 55) | 1132 | 1146 |
| HUMPHOSLIP_PEA_2_T19 (SEQ ID NO: 56) | 1203 | 1217 |

[1998] Segment cluster HUMPHOSLIP_PEA_{—}2_node_{—}39 (SEQ ID NO:392) according to the present invention is supported by 166 libraries. The number of libraries was determined as previously described. This segment can be found in the following transcript(s): HUMPHOSLIP_PEA_{—}2_T6 (SEQ ID NO:50), HUMPHOSLIP_PEA_{—}2_T7 (SEQ ID NO:51), HUMPHOSLIP_PEA_{—}2_T14 (SEQ ID NO:52), HUMPHOSLIP_PEA_{—}2_T16 (SEQ ID NO:53), HUMPHOSLIP_PEA_{—}2_T17 (SEQ ID NO:54), HUMPHOSLIP_PEA_{—}2_T18 (SEQ ID NO:55) and HUMPHOSLIP_PEA_{—}2_T19 (SEQ ID NO:56). Table 52 below describes the starting and ending position of this segment on each transcript.

TABLE 52
Segment location on transcripts

| | Segment | Segment |
|---|---|---|
| | starting | ending |
| Transcript name | position | position |
| HUMPHOSLIP_PEA_2_T6 (SEQ ID NO: 50) | 1172 | 1201 |
| HUMPHOSLIP_PEA_2_T7 (SEQ ID NO: 51) | 1310 | 1339 |
| HUMPHOSLIP_PEA_2_T14 (SEQ ID NO: 52) | 1303 | 1332 |
| HUMPHOSLIP_PEA_2_T16 (SEQ ID NO: 53) | 1211 | 1240 |
| HUMPHOSLIP_PEA_2_T17 (SEQ ID NO: 54) | 933 | 962 |
| HUMPHOSLIP_PEA_2_T18 (SEQ ID NO: 55) | 1147 | 1176 |
| HUMPHOSLIP_PEA_2_T19 (SEQ ID NO: 56) | 1218 | 1247 |

[1999] Segment cluster HUMPHOSLIP_PEA_{—}2_node_{—}40 (SEQ ID NO:393) according to the present invention is supported by 199 libraries. The number of libraries was determined as previously described. This segment can be found in the following transcript(s): HUMPHOSLIP_PEA_{—}2_T6 (SEQ ID NO:50), HUMPHOSLIP_PEA_{—}2_T7 (SEQ ID NO:51), HUMPHOSLIP_PEA_{—}2_T14 (SEQ ID NO:52), HUMPHOSLIP_PEA_{—}2_T16 (SEQ ID NO:53), HUMPHOSLIP_PEA_{—}2_T17 (SEQ ID NO:54), HUMPHOSLIP_PEA_{—}2_T18 (SEQ ID NO:55) and HUMPHOSLIP_PEA_{—}2_T19 (SEQ ID NO:56). Table 53 below describes the starting and ending position of this segment on each transcript.

TABLE 53
Segment location on transcripts

| | Segment | Segment |
|---|---|---|
| | starting | ending |
| Transcript name | position | position |
| HUMPHOSLIP_PEA_2_T6 (SEQ ID NO: 50) | 1202 | 1288 |
| HUMPHOSLIP_PEA_2_T7 (SEQ ID NO: 51) | 1340 | 1426 |
| HUMPHOSLIP_PEA_2_T14 (SEQ ID NO: 52) | 1333 | 1419 |
| HUMPHOSLIP_PEA_2_T16 (SEQ ID NO: 53) | 1241 | 1327 |
| HUMPHOSLIP_PEA_2_T17 (SEQ ID NO: 54) | 963 | 1049 |
| HUMPHOSLIP_PEA_2_T18 (SEQ ID NO: 55) | 1177 | 1263 |
| HUMPHOSLIP_PEA_2_T19 (SEQ ID NO: 56) | 1248 | 1334 |

[2000] Segment cluster HUMPHOSLIP_PEA_{—}2_node_{—}41 (SEQ ID NO:394) according to the present invention is supported by 186 libraries. The number of libraries was determined as previously described. This segment can be found in the following transcript(s): HUMPHOSLIP_PEA_{—}2_T6 (SEQ ID NO:50), HUMPHOSLIP_PEA_{—}2_T7 (SEQ ID NO:51), HUMPHOSLIP_PEA_{—}2_T14 (SEQ ID NO:52), HUMPHOSLIP_PEA_{—}2_T16 (SEQ ID NO:53), HUMPHOSLIP_PEA_{—}2_T17 (SEQ ID NO:54), HUMPHOSLIP_PEA_{—}2_T18 (SEQ ID NO:55) and HUMPHOSLIP_PEA_{—}2_T19 (SEQ ID NO:56). Table 54 below describes the starting and ending position of this segment on each transcript.

TABLE 54
Segment location on transcripts

| | Segment | Segment |
|---|---|---|
| | starting | ending |
| Transcript name | position | position |
| HUMPHOSLIP_PEA_2_T6 (SEQ ID NO: 50) | 1289 | 1318 |
| HUMPHOSLIP_PEA_2_T7 (SEQ ID NO: 51) | 1427 | 1456 |
| HUMPHOSLIP_PEA_2_T14 (SEQ ID NO: 52) | 1420 | 1449 |
| HUMPHOSLIP_PEA_2_T16 (SEQ ID NO: 53) | 1328 | 1357 |
| HUMPHOSLIP_PEA_2_T17 (SEQ ID NO: 54) | 1050 | 1079 |
| HUMPHOSLIP_PEA_2_T18 (SEQ ID NO: 55) | 1264 | 1293 |
| HUMPHOSLIP_PEA_2_T19 (SEQ ID NO: 56) | 1335 | 1364 |

[2001] Segment cluster HUMPHOSLIP_PEA_{—}2_node_{—}42 (SEQ ID NO:395) according to the present invention can be found in the following transcript(s): HUMPHOSLIP_PEA_{—}2_T6 (SEQ ID NO:50), HUMPHOSLIP_PEA_{—}2_T7 (SEQ ID NO:51), HUMPHOSLIP_PEA_{—}2_T14 (SEQ ID NO:52), HUMPHOSLIP_PEA_{—}2_T16 (SEQ ID NO:53), HUMPHOSLIP_PEA_{—}2_T17 (SEQ ID NO:54), HUMPHOSLIP_PEA_{—}2_T18 (SEQ ID NO:55) and HUMPHOSLIP_PEA_{—}2_T19 (SEQ ID NO:56). Table 55 below describes the starting and ending position of this segment on each transcript.

TABLE 55
Segment location on transcripts

| | Segment | Segment |
|---|---|---|
| | starting | ending |
| Transcript name | position | position |
| HUMPHOSLIP_PEA_2_T6 (SEQ ID NO: 50) | 1319 | 1336 |
| HUMPHOSLIP_PEA_2_T7 (SEQ ID NO: 51) | 1457 | 1474 |
| HUMPHOSLIP_PEA_2_T14 (SEQ ID NO: 52) | 1450 | 1467 |
| HUMPHOSLIP_PEA_2_T16 (SEQ ID NO: 53) | 1358 | 1375 |
| HUMPHOSLIP_PEA_2_T17 (SEQ ID NO: 54) | 1080 | 1097 |
| HUMPHOSLIP_PEA_2_T18 (SEQ ID NO: 55) | 1294 | 1311 |
| HUMPHOSLIP_PEA_2_T19 (SEQ ID NO: 56) | 1365 | 1382 |

[2002] Segment cluster HUMPHOSLIP_PEA_{—}2_node_{—}44 (SEQ ID NO:396) according to the present invention is supported by 185 libraries. The number of libraries was determined as previously described. This segment can be found in the following transcript(s): HUMPHOSLIP_PEA_{—}2_T6 (SEQ ID NO:50), HUMPHOSLIP_PEA_{—}2_T7 (SEQ ID NO:51), HUMPHOSLIP_PEA_{—}2_T14 (SEQ ID NO:52), HUMPHOSLIP_PEA_{—}2_T16 (SEQ ID NO:53), HUMPHOSLIP_PEA_{—}2_T17 (SEQ ID NO:54), HUMPHOSLIP_PEA_{—}2_T18 (SEQ ID NO:55) and HUMPHOSLIP_PEA_{—}2_T19 (SEQ ID NO:56). Table 56 below describes the starting and ending position of this segment on each transcript.

TABLE 56
Segment location on transcripts

| | Segment | Segment |
|---|---|---|
| | starting | ending |
| Transcript name | position | position |
| HUMPHOSLIP_PEA_2_T6 (SEQ ID NO: 50) | 1337 | 1363 |
| HUMPHOSLIP_PEA_2_T7 (SEQ ID NO: 51) | 1475 | 1501 |
| HUMPHOSLIP_PEA_2_T14 (SEQ ID NO: 52) | 1468 | 1494 |
| HUMPHOSLIP_PEA_2_T16 (SEQ ID NO: 53) | 1376 | 1402 |
| HUMPHOSLIP_PEA_2_T17 (SEQ ID NO: 54) | 1098 | 1124 |
| HUMPHOSLIP_PEA_2_T18 (SEQ ID NO: 55) | 1312 | 1338 |
| HUMPHOSLIP_PEA_2_T19 (SEQ ID NO: 56) | 1383 | 1409 |

[2003] Segment cluster HUMPHOSLIP_PEA_{—}2_node_{—}45 (SEQ ID NO:397) according to the present invention is supported by 197 libraries. The number of libraries was determined as previously described. This segment can be found in the following transcript(s): HUMPHOSLIP_PEA_{—}2_T6 (SEQ ID NO:50), HUMPHOSLIP_PEA_{—}2_T7 (SEQ ID NO:51), HUMPHOSLIP_PEA_{—}2_T14 (SEQ ID NO:52), HUMPHOSLIP_PEA_{—}2_T16 (SEQ ID NO:53), HUMPHOSLIP_PEA_{—}2_T17 (SEQ ID NO:54), HUMPHOSLIP_PEA_{—}2_T18 (SEQ ID NO:55) and HUMPHOSLIP_PEA_{—}2_T19 (SEQ ID NO:56). Table 57 below describes the starting and ending position of this segment on each transcript.

TABLE 57
Segment location on transcripts

| | Segment | Segment |
|---|---|---|
| | starting | ending |
| Transcript name | position | position |
| HUMPHOSLIP_PEA_2_T6 (SEQ ID NO: 50) | 1364 | 1404 |
| HUMPHOSLIP_PEA_2_T7 (SEQ ID NO: 51) | 1502 | 1542 |
| HUMPHOSLIP_PEA_2_T14 (SEQ ID NO: 52) | 1495 | 1535 |
| HUMPHOSLIP_PEA_2_T16 (SEQ ID NO: 53) | 1403 | 1443 |
| HUMPHOSLIP_PEA_2_T17 (SEQ ID NO: 54) | 1125 | 1165 |
| HUMPHOSLIP_PEA_2_T18 (SEQ ID NO: 55) | 1339 | 1379 |
| HUMPHOSLIP_PEA_2_T19 (SEQ ID NO: 56) | 1410 | 1450 |

[2004] Segment cluster HUMPHOSLIP_PEA_{—}2_node_{—}47 (SEQ ID NO:398) according to the present invention is supported by 223 libraries. The number of libraries was determined as previously described. This segment can be found in the following transcript(s): HUMPHOSLIP_PEA_{—}2_T6 (SEQ ID NO:50), HUMPHOSLIP_PEA_{—}2_T7 (SEQ ID NO:51), HUMPHOSLIP_PEA_{—}2_T14 (SEQ ID NO:52), HUMPHOSLIP_PEA_{—}2_T16 (SEQ ID NO:53), HUMPHOSLIP_PEA_{—}2_T17 (SEQ ID NO:54), HUMPHOSLIP_PEA_{—}2_T18 (SEQ ID NO:55) and HUMPHOSLIP_PEA_{—}2_T19 (SEQ ID NO:56). Table 58 below describes the starting and ending position of this segment on each transcript.

TABLE 58
Segment location on transcripts

| | Segment | Segment |
|---|---|---|
| | starting | ending |
| Transcript name | position | position |
| HUMPHOSLIP_PEA_2_T6 (SEQ ID NO: 50) | 1405 | 1447 |
| HUMPHOSLIP_PEA_2_T7 (SEQ ID NO: 51) | 1543 | 1585 |
| HUMPHOSLIP_PEA_2_T14 (SEQ ID NO: 52) | 1536 | 1578 |
| HUMPHOSLIP_PEA_2_T16 (SEQ ID NO: 53) | 1444 | 1486 |
| HUMPHOSLIP_PEA_2_T17 (SEQ ID NO: 54) | 1166 | 1208 |
| HUMPHOSLIP_PEA_2_T18 (SEQ ID NO: 55) | 1380 | 1422 |
| HUMPHOSLIP_PEA_2_T19 (SEQ ID NO: 56) | 1451 | 1493 |

[2005] Segment cluster HUMPHOSLIP_PEA_{—}2_node_{—}51 (SEQ ID NO:399) according to the present invention can be found in the following transcript(s): HUMPHOSLIP_PEA_{—}2_T6 (SEQ ID NO:50), HUMPHOSLIP_PEA_{—}2_T7 (SEQ ID NO:51), HUMPHOSLIP_PEA_{—}2_T14 (SEQ ID NO:52), HUMPHOSLIP_PEA_{—}2_T16 (SEQ ID NO:53), HUMPHOSLIP_PEA_{—}2_T17 (SEQ ID NO:54), HUMPHOSLIP_PEA_{—}2_T18 (SEQ ID NO:55) and HUMPHOSLIP_PEA_{—}2_T19 (SEQ ID NO:56). Table 59 below describes the starting and ending position of this segment on each transcript.

TABLE 59
Segment location on transcripts

| | Segment | Segment |
|---|---|---|
| | starting | ending |
| Transcript name | position | position |
| HUMPHOSLIP_PEA_2_T6 (SEQ ID NO: 50) | 1448 | 1462 |
| HUMPHOSLIP_PEA_2_T7 (SEQ ID NO: 51) | 1586 | 1600 |
| HUMPHOSLIP_PEA_2_T14 (SEQ ID NO: 52) | 1579 | 1593 |
| HUMPHOSLIP_PEA_2_T16 (SEQ ID NO: 53) | 1487 | 1501 |
| HUMPHOSLIP_PEA_2_T17 (SEQ ID NO: 54) | 1209 | 1223 |
| HUMPHOSLIP_PEA_2_T18 (SEQ ID NO: 55) | 1423 | 1437 |
| HUMPHOSLIP_PEA_2_T19 (SEQ ID NO: 56) | 1494 | 1508 |

[2006] Segment cluster HUMPHOSLIP_PEA_{—}2_node_{—}52 (SEQ ID NO:400) according to the present invention is supported by 235 libraries. The number of libraries was determined as previously described. This segment can be found in the following transcript(s): HUMPHOSLIP_PEA_{—}2_T6 (SEQ ID NO:50), HUMPHOSLIP_PEA_{—}2_T7 (SEQ ID NO:51), HUMPHOSLIP_PEA_{—}2_T14 (SEQ ID NO:52), HUMPHOSLIP_PEA_{—}2_T16 (SEQ ID NO:53), HUMPHOSLIP_PEA_{—}2_T17 (SEQ ID NO:54), HUMPHOSLIP_PEA_{—}2_T18 (SEQ ID NO:55) and HUMPHOSLIP_PEA_{—}2_T19 (SEQ ID NO:56). Table 60 below describes the starting and ending position of this segment on each transcript.

TABLE 60
Segment location on transcripts

| | Segment | Segment |
|---|---|---|
| | starting | ending |
| Transcript name | position | position |
| HUMPHOSLIP_PEA_2_T6 (SEQ ID NO: 50) | 1463 | 1511 |
| HUMPHOSLIP_PEA_2_T7 (SEQ ID NO: 51) | 1601 | 1649 |
| HUMPHOSLIP_PEA_2_T14 (SEQ ID NO: 52) | 1594 | 1642 |
| HUMPHOSLIP_PEA_2_T16 (SEQ ID NO: 53) | 1502 | 1550 |
| HUMPHOSLIP_PEA_2_T17 (SEQ ID NO: 54) | 1224 | 1272 |
| HUMPHOSLIP_PEA_2_T18 (SEQ ID NO: 55) | 1438 | 1486 |
| HUMPHOSLIP_PEA_2_T19 (SEQ ID NO: 56) | 1509 | 1557 |

[2007] Segment cluster HUMPHOSLIP_PEA_{—}2_node_{—}53 (SEQ ID NO:401) according to the present invention is supported by 5 libraries. The number of libraries was determined as previously described. This segment can be found in the following transcript(s): HUMPHOSLIP_PEA_{—}2_T19 (SEQ ID NO:56). Table 61 below describes the starting and ending position of this segment on each transcript.

TABLE 61
Segment location on transcripts

| | Segment | Segment |
|---|---|---|
| | starting | ending |
| Transcript name | position | position |
| HUMPHOSLIP_PEA_2_T19 (SEQ ID NO: 56) | 1558 | 1640 |

[2008] Segment cluster HUMPHOSLIP_PEA_{—}2_node_{—}54 (SEQ ID NO:402) according to the present invention is supported by 236 libraries. The number of libraries was determined as previously described. This segment can be found in the following transcript(s): HUMPHOSLIP_PEA_{—}2_T6 (SEQ ID NO:50), HUMPHOSLIP_PEA_{—}2_T7 (SEQ ID NO:51), HUMPHOSLIP_PEA_{—}2_T14 (SEQ ID NO:52), HUMPHOSLIP_PEA_{—}2_T16 (SEQ ID NO:53), HUMPHOSLIP_PEA_{—}2_T17 (SEQ ID NO:54), HUMPHOSLIP_PEA_{—}2_T18 (SEQ ID NO:55) and HUMPHOSLIP_PEA_{—}2_T19 (SEQ ID NO:56). Table 62 below describes the starting and ending position of this segment on each transcript.

TABLE 62
Segment location on transcripts

| | Segment | Segment |
|---|---|---|
| | starting | ending |
| Transcript name | position | position |
| HUMPHOSLIP_PEA_2_T6 (SEQ ID NO: 50) | 1512 | 1552 |
| HUMPHOSLIP_PEA_2_T7 (SEQ ID NO: 51) | 1650 | 1690 |
| HUMPHOSLIP_PEA_2_T14 (SEQ ID NO: 52) | 1643 | 1683 |
| HUMPHOSLIP_PEA_2_T16 (SEQ ID NO: 53) | 1551 | 1591 |
| HUMPHOSLIP_PEA_2_T17 (SEQ ID NO: 54) | 1273 | 1313 |
| HUMPHOSLIP_PEA_2_T18 (SEQ ID NO: 55) | 1487 | 1527 |
| HUMPHOSLIP_PEA_2_T19 (SEQ ID NO: 56) | 1641 | 1681 |

[2009] Segment cluster HUMPHOSLIP_PEA_{—}2_node_{—}55 (SEQ ID NO:403) according to the present invention is supported by 232 libraries. The number of libraries was determined as previously described. This segment can be found in the following transcript(s): HUMPHOSLIP_PEA_{—}2_T6 (SEQ ID NO:50), HUMPHOSLIP_PEA_{—}2_T7 (SEQ ID NO:51), HUMPHOSLIP_PEA_{—}2_T14 (SEQ ID NO:52), HUMPHOSLIP_PEA_{—}2_T16 (SEQ ID NO:53), HUMPHOSLIP_PEA_{—}2_T17 (SEQ ID NO:54), HUMPHOSLIP_PEA_{—}2_T18 (SEQ ID NO:55) and HUMPHOSLIP_PEA_{—}2_T19 (SEQ ID NO:56). Table 63 below describes the starting and ending position of this segment on each transcript.

TABLE 63
Segment location on transcripts

| | Segment | Segment |
|---|---|---|
| | starting | ending |
| Transcript name | position | position |
| HUMPHOSLIP_PEA_2_T6 (SEQ ID NO: 50) | 1553 | 1588 |
| HUMPHOSLIP_PEA_2_T7 (SEQ ID NO: 51) | 1691 | 1726 |
| HUMPHOSLIP_PEA_2_T14 (SEQ ID NO: 52) | 1684 | 1719 |
| HUMPHOSLIP_PEA_2_T16 (SEQ ID NO: 53) | 1592 | 1627 |
| HUMPHOSLIP_PEA_2_T17 (SEQ ID NO: 54) | 1314 | 1349 |
| HUMPHOSLIP_PEA_2_T18 (SEQ ID NO: 55) | 1528 | 1563 |
| HUMPHOSLIP_PEA_2_T19 (SEQ ID NO: 56) | 1682 | 1717 |

[2010] Segment cluster HUMPHOSLIP_PEA_{—}2_node_{—}58 (SEQ ID NO:404) according to the present invention can be found in the following transcript(s): HUMPHOSLIP_PEA_{—}2_T6 (SEQ ID NO:50), HUMPHOSLIP_PEA_{—}2_T7 (SEQ ID NO:51), HUMPHOSLIP_PEA_{—}2_T14 (SEQ ID NO:52), HUMPHOSLIP_PEA_{—}2_T16 (SEQ ID NO:53), HUMPHOSLIP_PEA_{—}2_T17 (SEQ ID NO:54), HUMPHOSLIP_PEA_{—}2_T18 (SEQ ID NO:55) and HUMPHOSLIP_PEA_{—}2_T19 (SEQ ID NO:56). Table 64 below describes the starting and ending position of this segment on each transcript.

TABLE 64
Segment location on transcripts

| | Segment | Segment |
|---|---|---|
| | starting | ending |
| Transcript name | position | position |
| HUMPHOSLIP_PEA_2_T6 (SEQ ID NO: 50) | 1589 | 1612 |
| HUMPHOSLIP_PEA_2_T7 (SEQ ID NO: 51) | 1727 | 1750 |
| HUMPHOSLIP_PEA_2_T14 (SEQ ID NO: 52) | 1720 | 1743 |
| HUMPHOSLIP_PEA_2_T16 (SEQ ID NO: 53) | 1628 | 1651 |
| HUMPHOSLIP_PEA_2_T17 (SEQ ID NO: 54) | 1350 | 1373 |
| HUMPHOSLIP_PEA_2_T18 (SEQ ID NO: 55) | 1564 | 1587 |
| HUMPHOSLIP_PEA_2_T19 (SEQ ID NO: 56) | 1718 | 1741 |

[2011] Segment cluster HUMPHOSLIP_PEA_{—}2_node_{—}59 (SEQ ID NO:405) according to the present invention is supported by 230 libraries. The number of libraries was determined as previously described. This segment can be found in the following transcript(s): HUMPHOSLIP_PEA_{—}2_T6 (SEQ ID NO:50), HUMPHOSLIP_PEA_{—}2_T7 (SEQ ID NO:51), HUMPHOSLIP_PEA_{—}2_T14 (SEQ ID NO:52), HUMPHOSLIP_PEA_{—}2_T16 (SEQ ID NO:53), HUMPHOSLIP_PEA_{—}2_T17 (SEQ ID NO:54), HUMPHOSLIP_PEA_{—}2_T18 (SEQ ID NO:55) and HUMPHOSLIP_PEA_{—}2_T19 (SEQ ID NO:56). Table 65 below describes the starting and ending position of this segment on each transcript.

TABLE 65
Segment location on transcripts

| | Segment | Segment |
|---|---|---|
| | starting | ending |
| Transcript name | position | position |
| HUMPHOSLIP_PEA_2_T6 (SEQ ID NO: 50) | 1613 | 1648 |
| HUMPHOSLIP_PEA_2_T7 (SEQ ID NO: 51) | 1751 | 1786 |
| HUMPHOSLIP_PEA_2_T14 (SEQ ID NO: 52) | 1744 | 1779 |
| HUMPHOSLIP_PEA_2_T16 (SEQ ID NO: 53) | 1652 | 1687 |
| HUMPHOSLIP_PEA_2_T17 (SEQ ID NO: 54) | 1374 | 1409 |
| HUMPHOSLIP_PEA_2_T18 (SEQ ID NO: 55) | 1588 | 1623 |
| HUMPHOSLIP_PEA_2_T19 (SEQ ID NO: 56) | 1742 | 1777 |

[2012] Segment cluster HUMPHOSLIP_PEA_{—}2_node_{—}60 (SEQ ID NO:406) according to the present invention can be found in the following transcript(s): HUMPHOSLIP_PEA_{—}2_T6 (SEQ ID NO:50), HUMPHOSLIP_PEA_{—}2_T7 (SEQ ID NO:51), HUMPHOSLIP_PEA_{—}2_T14 (SEQ ID NO:52), HUMPHOSLIP_PEA_{—}2_T16 (SEQ ID NO:53), HUMPHOSLIP_PEA_{—}2_T17 (SEQ ID NO:54), HUMPHOSLIP_PEA_{—}2_T18 (SEQ ID NO:55) and HUMPHOSLIP_PEA_{—}2_T19 (SEQ ID NO:56). Table 66 below describes the starting and ending position of this segment on each transcript.

TABLE 66
Segment location on transcripts

| | Segment | Segment |
|---|---|---|
| | starting | ending |
| Transcript name | position | position |
| HUMPHOSLIP_PEA_2_T6 (SEQ ID NO: 50) | 1649 | 1671 |
| HUMPHOSLIP_PEA_2_T7 (SEQ ID NO: 51) | 1787 | 1809 |
| HUMPHOSLIP_PEA_2_T14 (SEQ ID NO: 52) | 1780 | 1802 |
| HUMPHOSLIP_PEA_2_T16 (SEQ ID NO: 53) | 1688 | 1710 |
| HUMPHOSLIP_PEA_2_T17 (SEQ ID NO: 54) | 1410 | 1432 |
| HUMPHOSLIP_PEA_2_T18 (SEQ ID NO: 55) | 1624 | 1646 |
| HUMPHOSLIP_PEA_2_T19 (SEQ ID NO: 56) | 1778 | 1800 |

[2013] Segment cluster HUMPHOSLIP_PEA_{—}2_node_{—}61 (SEQ ID NO:407) according to the present invention can be found in the following transcript(s): HUMPHOSLIP_PEA_{—}2_T6 (SEQ ID NO:50) (SEQ ID NO:51), HUMPHOSLIP_PEA_{—}2_T14 (SEQ ID NO:52), HUMPHOSLIP_PEA_{—}2_T16 (SEQ ID NO:53), HUMPHOSLIP_PEA_{—}2_T17 (SEQ ID NO:54) (SEQ ID NO:55) and HUMPHOSLIP_PEA_{—}2_T19 (SEQ ID NO:56). Table 67 below describes the starting and ending position of this segment on each transcript.

TABLE 67
Segment location on transcripts

| | Segment | Segment |
|---|---|---|
| | starting | ending |
| Transcript name | position | position |
| HUMPHOSLIP_PEA_2_T6 (SEQ ID NO: 50) | 1672 | 1680 |
| HUMPHOSLIP_PEA_2_T7 (SEQ ID NO: 51) | 1810 | 1818 |
| HUMPHOSLIP_PEA_2_T14 (SEQ ID NO: 52) | 1803 | 1811 |
| HUMPHOSLIP_PEA_2_T16 (SEQ ID NO: 53) | 1711 | 1719 |
| HUMPHOSLIP_PEA_2_T17 (SEQ ID NO: 54) | 1433 | 1441 |
| HUMPHOSLIP_PEA_2_T18 (SEQ ID NO: 55) | 1647 | 1655 |
| HUMPHOSLIP_PEA_2_T19 (SEQ ID NO: 56) | 1801 | 1809 |

[2014] Segment cluster HUMPHOSLIP_PEA_{—}2_node_{—}62 (SEQ ID NO:408) according to the present invention can be found in the following transcript(s): HUMPHOSLIP_PEA_{—}2_T6 (SEQ ID NO:50), HUMPHOSLIP_PEA_{—}2_T7 (SEQ ID NO:51), HUMPHOSLIP_PEA_{—}2_T14 (SEQ ID NO:52), HUMPHOSLIP_PEA_{—}2_T16 (SEQ ID NO:53), HUMPHOSLIP_PEA_{—}2_T17 (SEQ ID NO:54), HUMPHOSLIP_PEA_{—}2_T18 (SEQ ID NO:55) and HUMPHOSLIP_PEA_{—}2_T19 (SEQ ID NO:56). Table 68 below describes the starting and ending position of this segment on each transcript.

TABLE 68
Segment location on transcripts

| | Segment | Segment |
|---|---|---|
| | starting | ending |
| Transcript name | position | position |
| HUMPHOSLIP_PEA_2_T6 (SEQ ID NO: 50) | 1681 | 1703 |
| HUMPHOSLIP_PEA_2_T7 (SEQ ID NO: 51) | 1819 | 1841 |
| HUMPHOSLIP_PEA_2_T14 (SEQ ID NO: 52) | 1812 | 1834 |
| HUMPHOSLIP_PEA_2_T16 (SEQ ID NO: 53) | 1720 | 1742 |
| HUMPHOSLIP_PEA_2_T17 (SEQ ID NO: 54) | 1442 | 1464 |
| HUMPHOSLIP_PEA_2_T18 (SEQ ID NO: 55) | 1656 | 1678 |
| HUMPHOSLIP_PEA_2_T19 (SEQ ID NO: 56) | 1810 | 1832 |

[2015] Segment cluster HUMPHOSLIP_PEA_{—}2_node_{—}63 (SEQ ID NO:409) according to the present invention can be found in the following transcript(s): HUMPHOSLIP_PEA_{—}2_T6 (SEQ ID NO:50), HUMPHOSLIP_PEA_{—}2_T7 (SEQ ID NO:51), HUMPHOSLIP_PEA_{—}2_T14 (SEQ ID NO:52), HUMPHOSLIP_PEA_{—}2_T16 (SEQ ID NO:53), HUMPHOSLIP_PEA_{—}2_T17 (SEQ ID NO:54), HUMPHOSLIP_PEA_{—}2_T18 (SEQ ID NO:55) and HUMPHOSLIP_PEA_{—}2_T19 (SEQ ID NO:56). Table 69 below describes the starting and ending position of this segment on each transcript.

TABLE 69
Segment location on transcripts

| | Segment | Segment |
|---|---|---|
| | starting | ending |
| Transcript name | position | position |
| HUMPHOSLIP_PEA_2_T6 (SEQ ID NO: 50) | 1704 | 1727 |
| HUMPHOSLIP_PEA_2_T7 (SEQ ID NO: 51) | 1842 | 1865 |
| HUMPHOSLIP_PEA_2_T14 (SEQ ID NO: 52) | 1835 | 1858 |
| HUMPHOSLIP_PEA_2_T16 (SEQ ID NO: 53) | 1743 | 1766 |
| HUMPHOSLIP_PEA_2_T17 (SEQ ID NO: 54) | 1465 | 1488 |
| HUMPHOSLIP_PEA_2_T18 (SEQ ID NO: 55) | 1679 | 1702 |
| HUMPHOSLIP_PEA_2_T19 (SEQ ID NO: 56) | 1833 | 1856 |

[2016] Segment cluster HUMPHOSLIP_PEA_{—}2_node_{—}64 (SEQ ID NO:410) according to the present invention can be found in the following transcript(s): HUMPHOSLIP_PEA_{—}2_T6 (SEQ ID NO:50), HUMPHOSLIP_PEA_{—}2_T7 (SEQ ID NO:51), HUMPHOSLIP_PEA_{—}2_T14 (SEQ ID NO:52), HUMPHOSLIP_PEA_{—}2_T16 (SEQ ID NO:53), HUMPHOSLIP_PEA_{—}2_T17 (SEQ ID NO:54), HUMPHOSLIP_PEA_{—}2_T18 (SEQ ID NO:55) and HUMPHOSLIP_PEA_{—}2_T19 (SEQ ID NO:56). Table 70 below describes the starting and ending position of this segment on each transcript.

TABLE 70
Segment location on transcripts

| | Segment | Segment |
|---|---|---|
| | starting | ending |
| Transcript name | position | position |
| HUMPHOSLIP_PEA_2_T6 (SEQ ID NO: 50) | 1728 | 1734 |
| HUMPHOSLIP_PEA_2_T7 (SEQ ID NO: 51) | 1866 | 1872 |
| HUMPHOSLIP_PEA_2_T14 (SEQ ID NO: 52) | 1859 | 1865 |
| HUMPHOSLIP_PEA_2_T16 (SEQ ID NO: 53) | 1767 | 1773 |
| HUMPHOSLIP_PEA_2_T17 (SEQ ID NO: 54) | 1489 | 1495 |
| HUMPHOSLIP_PEA_2_T18 (SEQ ID NO: 55) | 1703 | 1709 |
| HUMPHOSLIP_PEA_2_T19 (SEQ ID NO: 56) | 1857 | 1863 |

[2017] Segment cluster HUMPHOSLIP_PEA_{—}2_node_{—}65 (SEQ ID NO:411) according to the present invention can be found in the following transcript(s): HUMPHOSLIP_PEA_{—}2_T6 (SEQ ID NO:50), HUMPHOSLIP_PEA_{—}2_T7 (SEQ ID NO:51), HUMPHOSLIP_PEA_{—}2_T14 (SEQ ID NO:52), HUMPHOSLIP_PEA_{—}2_T16 (SEQ ID NO:53), HUMPHOSLIP_PEA_{—}2_T17 (SEQ ID NO:54), HUMPHOSLIP_PEA_{—}2_T18 (SEQ ID NO:55) and HUMPHOSLIP_PEA_{—}2_T19 (SEQ ID NO:56). Table 71 below describes the starting and ending position of this segment on each transcript.

TABLE 71
Segment location on transcripts

| | Segment | Segment |
|---|---|---|
| | starting | ending |
| Transcript name | position | position |
| HUMPHOSLIP_PEA_2_T6 (SEQ ID NO: 50) | 1735 | 1754 |
| HUMPHOSLIP_PEA_2_T7 (SEQ ID NO: 51) | 1873 | 1892 |
| HUMPHOSLIP_PEA_2_T14 (SEQ ID NO: 52) | 1866 | 1885 |
| HUMPHOSLIP_PEA_2_T16 (SEQ ID NO: 53) | 1774 | 1793 |
| HUMPHOSLIP_PEA_2_T17 (SEQ ID NO: 54) | 1496 | 1515 |
| HUMPHOSLIP_PEA_2_T18 (SEQ ID NO: 55) | 1710 | 1729 |
| HUMPHOSLIP_PEA_2_T19 (SEQ ID NO: 56) | 1864 | 1883 |

[2018] Segment cluster HUMPHOSLIP_PEA_{—}2_node_{—}66 (SEQ ID NO:412) according to the present invention is supported by 180 libraries. The number of libraries was determined as previously described. This segment can be found in the following transcript(s): HUMPHOSLIP_PEA_{—}2_T6 (SEQ ID NO:50), HUMPHOSLIP_PEA_{—}2_T7 (SEQ ID NO:51), HUMPHOSLIP_PEA_{—}2_T14 (SEQ ID NO:52), HUMPHOSLIP_PEA_{—}2_T16 (SEQ ID NO:53), HUMPHOSLIP_PEA_{—}2_T17 (SEQ ID NO:54), HUMPHOSLIP_PEA_{—}2_T18 (SEQ ID NO:55) and HUMPHOSLIP_PEA_{—}2_T19 (SEQ ID NO:56). Table 72 below describes the starting and ending position of this segment on each transcript.

TABLE 72
Segment location on transcripts

| | Segment | Segment |
|---|---|---|
| | starting | ending |
| Transcript name | position | position |
| HUMPHOSLIP_PEA_2_T6 (SEQ ID NO: 50) | 1755 | 1844 |
| HUMPHOSLIP_PEA_2_T7 (SEQ ID NO: 51) | 1893 | 1982 |
| HUMPHOSLIP_PEA_2_T14 (SEQ ID NO: 52) | 1886 | 1975 |
| HUMPHOSLIP_PEA_2_T16 (SEQ ID NO: 53) | 1794 | 1883 |
| HUMPHOSLIP_PEA_2_T17 (SEQ ID NO: 54) | 1516 | 1605 |
| HUMPHOSLIP_PEA_2_T18 (SEQ ID NO: 55) | 1730 | 1819 |
| HUMPHOSLIP_PEA_2_T19 (SEQ ID NO: 56) | 1884 | 1973 |

[2019] Segment cluster HUMPHOSLIP_PEA_{—}2_node_{—}67 (SEQ ID NO:413) according to the present invention can be found in the following transcript(s): HUMPHOSLIP_PEA_{—}2_T6 (SEQ ID NO:50), HUMPHOSLIP_PEA_{—}2_T7 (SEQ ID NO:51), HUMPHOSLIP_PEA_{—}2_T14 (SEQ ID NO:52), HUMPHOSLIP_PEA_{—}2_T16 (SEQ ID NO:53), HUMPHOSLIP_PEA_{—}2_T17 (SEQ ID NO:54), HUMPHOSLIP_PEA_{—}2_T18 (SEQ ID NO:55) and HUMPHOSLIP_PEA_{—}2_T19 (SEQ ID NO:56). Table 73 below describes the starting and ending position of this segment on each transcript.

TABLE 73
Segment location on transcripts

| | Segment | Segment |
|---|---|---|
| | starting | ending |
| Transcript name | position | position |
| HUMPHOSLIP_PEA_2_T6 (SEQ ID NO: 50) | 1845 | 1866 |
| HUMPHOSLIP_PEA_2_T7 (SEQ ID NO: 51) | 1983 | 2004 |
| HUMPHOSLIP_PEA_2_T14 (SEQ ID NO: 52) | 1976 | 1997 |
| HUMPHOSLIP_PEA_2_T16 (SEQ ID NO: 53) | 1884 | 1905 |
| HUMPHOSLIP_PEA_2_T17 (SEQ ID NO: 54) | 1606 | 1627 |
| HUMPHOSLIP_PEA_2_T18 (SEQ ID NO: 55) | 1820 | 1841 |
| HUMPHOSLIP_PEA_2_T19 (SEQ ID NO: 56) | 1974 | 1995 |

[2020] Segment cluster HUMPHOSLIP_PEA_{—}2_node_{—}69 (SEQ ID NO:414) according to the present invention can be found in the following transcript(s): HUMPHOSLIP_PEA_{—}2_T6 (SEQ ID NO:50), HUMPHOSLIP_PEA_{—}2_T7 (SEQ ID NO:51), HUMPHOSLIP_PEA_{—}2_T14 (SEQ ID NO:52), HUMPHOSLIP_PEA_{—}2_T16 (SEQ ID NO:53), HUMPHOSLIP_PEA_{—}2_T17 (SEQ ID NO:54), HUMPHOSLIP_PEA_{—}2_T18 (SEQ ID NO:55) and HUMPHOSLIP_PEA_{—}2_T19 (SEQ ID NO:56). Table 74 below describes the starting and ending position of this segment on each transcript.

TABLE 74
Segment location on transcripts

| | Segment | Segment |
|---|---|---|
| | starting | ending |
| Transcript name | position | position |
| HUMPHOSLIP_PEA_2_T6 (SEQ ID NO: 50) | 2286 | 2297 |
| HUMPHOSLIP_PEA_2_T7 (SEQ ID NO: 51) | 2424 | 2435 |
| HUMPHOSLIP_PEA_2_T14 (SEQ ID NO: 52) | 2417 | 2428 |
| HUMPHOSLIP_PEA_2_T16 (SEQ ID NO: 53) | 2325 | 2336 |
| HUMPHOSLIP_PEA_2_T17 (SEQ ID NO: 54) | 2047 | 2058 |
| HUMPHOSLIP_PEA_2_T18 (SEQ ID NO: 55) | 2261 | 2272 |
| HUMPHOSLIP_PEA_2_T19 (SEQ ID NO: 56) | 2415 | 2426 |

[2021] Segment cluster HUMPHOSLIP_PEA_{—}2_node_{—}71 (SEQ ID NO:415) according to the present invention can be found in the following transcript(s): HUMPHOSLIP_PEA_{—}2_T6 (SEQ ID NO:50), HUMPHOSLIP_PEA_{—}2_T7 (SEQ ID NO:51), HUMPHOSLIP_PEA_{—}2_T14 (SEQ ID NO:52), HUMPHOSLIP_PEA_{—}2_T16 (SEQ ID NO:53), HUMPHOSLIP_PEA_{—}2_T17 (SEQ ID NO:54), HUMPHOSLIP_PEA_{—}2_T18 (SEQ ID NO:55) and HUMPHOSLIP_PEA_{—}2_T19 (SEQ ID NO:56). Table 75 below describes the starting and ending position of this segment on each transcript.

TABLE 75
Segment location on transcripts

| | Segment | Segment |
|---|---|---|
| | starting | ending |
| Transcript name | position | position |
| HUMPHOSLIP_PEA_2_T6 (SEQ ID NO: 50) | 2530 | 2542 |
| HUMPHOSLIP_PEA_2_T7 (SEQ ID NO: 51) | 2668 | 2680 |
| HUMPHOSLIP_PEA_2_T14 (SEQ ID NO: 52) | 2661 | 2673 |
| HUMPHOSLIP_PEA_2_T16 (SEQ ID NO: 53) | 2569 | 2581 |
| HUMPHOSLIP_PEA_2_T17 (SEQ ID NO: 54) | 2291 | 2303 |
| HUMPHOSLIP_PEA_2_T18 (SEQ ID NO: 55) | 2505 | 2517 |
| HUMPHOSLIP_PEA_2_T19 (SEQ ID NO: 56) | 2659 | 2671 |

[2022] Segment cluster HUMPHOSLIP_PEA_{—}2_node_{—}72 (SEQ ID NO:416) according to the present invention is supported by 7 libraries. The number of libraries was determined as previously described. This segment can be found in the following transcript(s): HUMPHOSLIP_PEA_{—}2_T6 (SEQ ID NO:50), HUMPHOSLIP_PEA_{—}2_T7 (SEQ ID NO:51), HUMPHOSLIP_PEA_{—}2_T14 (SEQ ID NO:52), HUMPHOSLIP_PEA_{—}2_T16 (SEQ ID NO:53), HUMPHOSLIP_PEA_{—}2_T17 (SEQ ID NO:54), HUMPHOSLIP_PEA_{—}2_T18 (SEQ ID NO:55) and HUMPHOSLIP_PEA_{—}2_T19 (SEQ ID NO:56). Table 76 below describes the starting and ending position of this segment on each transcript.

TABLE 76
Segment location on transcripts

| | Segment | Segment |
|---|---|---|
| | starting | ending |
| Transcript name | position | position |
| HUMPHOSLIP_PEA_2_T6 (SEQ ID NO: 50) | 2543 | 2647 |
| HUMPHOSLIP_PEA_2_T7 (SEQ ID NO: 51) | 2681 | 2785 |
| HUMPHOSLIP_PEA_2_T14 (SEQ ID NO: 52) | 2674 | 2778 |
| HUMPHOSLIP_PEA_2_T16 (SEQ ID NO: 53) | 2582 | 2686 |
| HUMPHOSLIP_PEA_2_T17 (SEQ ID NO: 54) | 2304 | 2408 |
| HUMPHOSLIP_PEA_2_T18 (SEQ ID NO: 55) | 2518 | 2622 |
| HUMPHOSLIP_PEA_2_T19 (SEQ ID NO: 56) | 2672 | 2776 |

[2023] Segment cluster HUMPHOSLIP_PEA_{—}2_node_{—}73 (SEQ ID NO:417) according to the present invention is supported by 5 libraries. The number of libraries was determined as previously described. This segment can be found in the following transcript(s): HUMPHOSLIP_PEA_{—}2_T6 (SEQ ID NO:50), HUMPHOSLIP_PEA_{—}2_T7 (SEQ ID NO:51), HUMPHOSLIP_PEA_{—}2_T14 (SEQ ID NO:52), HUMPHOSLIP_PEA_{—}2_T16 (SEQ ID NO:53), HUMPHOSLIP_PEA_{—}2_T17 (SEQ ID NO:54), HUMPHOSLIP_PEA_{—}2_T18 (SEQ ID NO:55) and HUMPHOSLIP_PEA_{—}2_T19 (SEQ ID NO:56). Table 77 below describes the starting and ending position of this segment on each transcript.

TABLE 77
Segment location on transcripts

| | Segment | Segment |
|---|---|---|
| | starting | ending |
| Transcript name | position | position |
| HUMPHOSLIP_PEA_2_T6 (SEQ ID NO: 50) | 2648 | 2755 |
| HUMPHOSLIP_PEA_2_T7 (SEQ ID NO: 51) | 2786 | 2893 |
| HUMPHOSLIP_PEA_2_T14 (SEQ ID NO: 52) | 2779 | 2886 |
| HUMPHOSLIP_PEA_2_T16 (SEQ ID NO: 53) | 2687 | 2794 |
| HUMPHOSLIP_PEA_2_T17 (SEQ ID NO: 54) | 2409 | 2516 |
| HUMPHOSLIP_PEA_2_T18 (SEQ ID NO: 55) | 2623 | 2730 |
| HUMPHOSLIP_PEA_2_T19 (SEQ ID NO: 56) | 2777 | 2884 |

[2024] Segment cluster HUMPHOSLIP_PEA_{—}2_node_{—}74 (SEQ ID NO:418) according to the present invention is supported by 10 libraries. The number of libraries was determined as previously described. This segment can be found in the following transcript(s): HUMPHOSLIP_PEA_{—}2_T6 (SEQ ID NO:50), HUMPHOSLIP_PEA_{—}2_T7 (SEQ ID NO:51), HUMPHOSLIP_PEA_{—}2_T14 (SEQ ID NO:52), HUMPHOSLIP_PEA_{—}2_T16 (SEQ ID NO:53), HUMPHOSLIP_PEA_{—}2_T17 (SEQ ID NO:54), HUMPHOSLIP_PEA_{—}2_T18 (SEQ ID NO:55) and HUMPHOSLIP_PEA_{—}2_T19 (SEQ ID NO:56). Table 78 below describes the starting and ending position of this segment on each transcript.

TABLE 78
Segment location on transcripts

| | Segment | Segment |
|---|---|---|
| | starting | ending |
| Transcript name | position | position |
| HUMPHOSLIP_PEA_2_T6 (SEQ ID NO: 50) | 2756 | 2845 |
| HUMPHOSLIP_PEA_2_T7 (SEQ ID NO: 51) | 2894 | 2983 |
| HUMPHOSLIP_PEA_2_T14 (SEQ ID NO: 52) | 2887 | 2976 |
| HUMPHOSLIP_PEA_2_T16 (SEQ ID NO: 53) | 2795 | 2884 |
| HUMPHOSLIP_PEA_2_T17 (SEQ ID NO: 54) | 2517 | 2606 |
| HUMPHOSLIP_PEA_2_T18 (SEQ ID NO: 55) | 2731 | 2820 |
| HUMPHOSLIP_PEA_2_T19 (SEQ ID NO: 56) | 2885 | 2974 |

### Variant Protein Alignment to the Previously Known Protein:

Sequence name: PLTP_HUMAN (SEQ ID NO: 636)
Sequence documentation:
Alignment of:
HUMPHOSLIP_PEA_2_P10 (SEQ ID NO: 581) × PLTP_HUMAN (SEQ ID
NO: 636) . .
Alignment segment 1/1:

| | | | |
|---|---|---|---|
| Quality: | 3716.00 | Escore: | 0 |
| Matching length: | 398 | Total length: | 493 |
| Matching Percent Similarity: | 100.00 | Matching Percent Identity: | 100.00 |
| Total Percent Similarity: | 80.73 | Total Percent Identity: | 80.73 |
| Gaps: | 1 | | |

Alignment:

[chemical structure]

[chemical structure]

[chemical structure]

[chemical structure]

[chemical structure]

[chemical structure]

[chemical structure]

[chemical structure]

[chemical structure]

[chemical structure]

Sequence name: PLTP_HUMAN (SEQ ID NO: 636)
Sequence documentation:
Alignment of:
HUMPHOSLIP_PEA_2_P12 (SEQ ID NO: 582) × PLTP_HUMAN (SEQ ID
NO: 636) . .
Alignment segment 1/1:

| | | | |
|---|---|---|---|
| Quality: | 4101.00 | Escore: | 0 |
| Matching length: | 427 | Total length: | 427 |
| Matching Percent Similarity: | 100.00 | Matching Percent Identity: | 100.00 |
| Total Percent Similarity: | 100.00 | Total Percent Identity: | 100.00 |
| Gaps: | 0 | | |

Alignment:

[chemical structure]

[chemical structure]

[chemical structure]

[chemical structure]

[chemical structure]

[chemical structure]

[chemical structure]

[chemical structure]

[chemical structure]

Sequence name: PLTP HUMAN (SEQ ID NO: 636)
Sequence documentation:
Alignment of:
HUMPHOSLIP_PEA_2_P31 (SEQ ID NO: 584) × PLTP_HUMAN (SEQ ID
NO: 636) . .
Alignment segment 1/1:

| | | | |
|---|---|---|---|
| Quality: | 639.00 | Escore: | 0 |
| Matching length: | 67 | Total length: | 67 |
| Matching Percent Similarity: | 100.00 | Matching Percent Identity: | 100.00 |
| Total Percent Similarity: | 100.00 | Total Percent Identity: | 100.00 |
| Gaps: | 0 | | |

Alignment:

[chemical structure]

[chemical structure]

Sequence name: PLTP_HUMAN (SEQ ID NO: 636)
Sequence documentation:
Alignment of:
HUMPHOSLIP_PEA_2_P33 (SEQ ID NO: 585) × PLTP_HUMAN (SEQ ID
NO: 636) . .
Alignment segment 1/1:

| | | | |
|---|---|---|---|
| Quality: | 1767.00 | Escore: | 0 |
| Matching length: | 184 | Total length: | 184 |
| Matching Percent Similarity: | 100.00 | Matching Percent Identity: | 99.46 |
| Total Percent Similarity: | 100.00 | Total Percent Identity: | 99.46 |
| Gaps: | 0 | | |

Alignment:

[chemical structure]

[chemical structure]

[chemical structure]

[chemical structure]

Sequence name: PLTP_HUMAN (SEQ ID NO: 636)
Sequence documentation:
Alignment of:
HUMPHOSLIP_PEA_2_P34 (SEQ ID NO: 586) × PLTP_HUMAN (SEQ ID
NO: 636) . .
Alignment segment 1/1:

| | | | |
|---|---|---|---|
| Quality: | 1971.00 | Escore: | 0 |
| Matching length: | 205 | Total length: | 205 |
| Matching Percent Similarity: | 100.00 | Matching Percent Identity: | 100.00 |
| Total Percent Similarity: | 100.00 | Total Percent Identity: | 100.00 |
| Gaps: | 0 | | |

Alignment:

[chemical structure]

[chemical structure]

[chemical structure]

[chemical structure]

[chemical structure]

Sequence name: PLTP_HUMAN (SEQ ID NO: 636)
Sequence documentation:
Alignment of:
HUMPHOSLIP_PEA_2_P35 (SEQ ID NO: 587) × PLTP HUMAN (SEQ ID
NO: 636) . .
Alignment segment 1/1:

| | | | |
|---|---|---|---|
| Quality: | 1158.00 | Escore: | 0 |
| Matching length: | 132 | Total length: | 184 |
| Matching Percent Similarity: | 100.00 | Matching Percent Identity: | 98.48 |
| Total Percent Similarity: | 71.74 | Total Percent Identity: | 70.65 |
| Gaps: | 1 | | |

Alignment:

[chemical structure]

[chemical structure]

[chemical structure]

[chemical structure]

### Description for Cluster D11853

[2026] Cluster D11853 features 18 transcript(s) and 31 segment(s) of interest, the names for which are given in Tables 1 and 2, respectively, the sequences themselves are given at the end of the application. The selected protein variants are given in table 3.

TABLE 1
Transcripts of interest

| Transcript Name | SEQ ID NO: |
|---|---|
| D11853_PEA_1_T1 | 57 |
| D11853_PEA_1_T3 | 58 |
| D11853_PEA_1_T7 | 59 |
| D11853_PEA_1_T8 | 60 |
| D11853_PEA_1_T9 | 61 |
| D11853_PEA_1_T10 | 62 |
| D11853_PEA_1_T13 | 63 |
| D11853_PEA_1_T14 | 64 |
| D11853_PEA_1_T15 | 65 |
| D11853_PEA_1_T16 | 66 |
| D11853_PEA_1_T17 | 67 |
| D11853_PEA_1_T19 | 68 |
| D11853_PEA_1_T21 | 69 |
| D11853_PEA_1_T23 | 70 |
| D11853_PEA_1_T24 | 71 |
| D11853_PEA_1_T25 | 72 |
| D11853_PEA_1_T26 | 73 |
| D11853_PEA_1_T27 | 74 |

TABLE 2
Segments of interest

| Segment Name | SEQ ID NO: |
|---|---|
| D11853_PEA_1_node_3 | 419 |
| D11853_PEA_1_node_6 | 420 |
| D11853_PEA_1_node_9 | 421 |
| D11853_PEA_1_node_17 | 422 |
| D11853_PEA_1_node_21 | 423 |
| D11853_PEA_1_node_22 | 424 |
| D11853_PEA_1_node_23 | 425 |
| D11853_PEA_1_node_25 | 426 |
| D11853_PEA_1_node_26 | 427 |
| D11853_PEA_1_node_27 | 428 |
| D11853_PEA_1_node_30 | 429 |
| D11853_PEA_1_node_32 | 430 |
| D11853_PEA_1_node_0 | 431 |
| D11853_PEA_1_node_1 | 432 |
| D11853_PEA_1_node_2 | 433 |
| D11853_PEA_1_node_4 | 434 |
| D11853_PEA_1_node_5 | 435 |
| D11853_PEA_1_node_7 | 436 |
| D11853_PEA_1_node_8 | 437 |
| D11853_PEA_1_node_10 | 438 |
| D11853_PEA_1_node_12 | 439 |
| D11853_PEA_1_node_13 | 440 |
| D11853_PEA_1_node_14 | 441 |
| D11853_PEA_1_node_15 | 442 |
| D11853_PEA_1_node_16 | 443 |
| D11853_PEA_1_node_18 | 444 |
| D11853_PEA_1_node_19 | 445 |
| D11853_PEA_1_node_20 | 446 |
| D11853_PEA_1_node_24 | 447 |
| D11853_PEA_1_node_28 | 448 |
| D11853_PEA_1_node_29 | 449 |

TABLE 3
Proteins of interest

| | SEQ ID | |
|---|---|---|
| Protein Name | NO: | Corresponding Transcript(s) |
| D11853_PEA_1_P1 | 588 | D11853_PEA_1_T1 (SEQ ID |
| | | NO: 57) |
| D11853_PEA_1_P2 | 589 | D11853_PEA_1_T3 (SEQ ID |
| | | NO: 58) |
| D11853_PEA_1_P7 | 590 | D11853_PEA_1_T10 (SEQ ID |
| | | NO: 62) |
| D11853_PEA_1_P9 | 591 | D11853_PEA_1_T13 (SEQ ID |
| | | NO: 63) |
| D11853_PEA_1_P10 | 592 | D11853_PEA_1_T14 (SEQ ID |
| | | NO: 64) |
| D11853_PEA_1_P11 | 593 | D11853_PEA_1_T15 (SEQ ID |
| | | NO: 65) |
| D11853_PEA_1_P12 | 594 | D11853_PEA_1_T16 (SEQ ID |
| | | NO: 66); D11853_PEA_1_T23 |
| | | (SEQ ID NO: 70) |
| D11853_PEA_1_P14 | 595 | D11853_PEA_1_T19 (SEQ ID |
| | | NO: 68) |
| D11853_PEA_1_P16 | 596 | D11853_PEA_1_T24 (SEQ ID |
| | | NO: 71) |
| D11853_PEA_1_P18 | 597 | D11853_PEA_1_T26 (SEQ ID |
| | | NO: 73) |
| D11853_PEA_1_P19 | 598 | D11853_PEA_1_T27 (SEQ ID |
| | | NO: 74) |
| D11853_PEA_1_P20 | 599 | D11853_PEA_1_T7 (SEQ ID |
| | | NO: 59); D11853_PEA_1_T17 |
| | | (SEQ ID NO: 67); |
| | | D11853_PEA_1_T25 (SEQ ID |
| | | NO: 72) |
| D11853_PEA_1_P21 | 600 | D11853_PEA_1_T8 (SEQ ID |
| | | NO: 60) |
| D11853_PEA_1_P22 | 601 | D11853_PEA_1_T9 (SEQ ID |
| | | NO: 61) |
| D11853_PEA_1_P24 | 602 | D11853_PEA_1_T21 (SEQ ID |
| | | NO: 69) |

[2027] These sequences are variants of the known protein Membrane associated protein SLP-2 (SwissProt accession identifier Q9UJZ1; known also according to the synonyms Stomatin-like protein 2; Stomatin-like 2; Hypothetical protein FLJ14499), SEQ ID NO: 637, referred to herein as the previously known protein.

[2028] The sequence for protein Membrane associated protein SLP-2 (SEQ ID NO:637) is given at the end of the application, as “Membrane associated protein SLP-2 amino acid sequence”.

[2029] The following GO Annotation(s) apply to the previously known protein. The following annotation(s) were found: ligand, which are annotation(s) related to Molecular Function; and cytoskeleton; membrane, which are annotation(s) related to Cellular Component.

[2030] The GO assignment relies on information from one or more of the SwissProt/TremB1 Protein knowledgebase, available from <http://www.expasy.ch/sprot/>; or Locuslink, available from <http://www.ncbi.nlm.nih.gov/projects/LocusLink/>.

[2031] Cluster D11853 can be used as a diagnostic marker according to overexpression of transcripts of this cluster in cancer. Expression of such transcripts in normal tissues is also given according to the previously described methods. The term “number” in the left hand column of the table and the numbers on the y-axis of the figure below refer to weighted expression of ESTs in each category, as “parts per million” (ratio of the expression of ESTs for a particular cluster to the expression of all ESTs in that category, according to parts per million).

[2032] Overall, the following results were obtained as shown with regard to the histograms in FIG. 26 and Table 4. This cluster is overexpressed (at least at a minimum level) in the following pathological conditions: brain malignant tumors, colorectal cancer and a mixture of malignant tumors from different tissues.

TABLE 4
Normal tissue distribution

| Name of Tissue | Number |
|---|---|
| adrenal | 160 |
| bladder | 82 |
| Bone | 71 |
| brain | 70 |
| colon | 31 |
| epithelial | 106 |
| general | 88 |
| head and neck | 0 |
| kidney | 71 |
| liver | 53 |
| lung | 108 |
| lymph nodes | 107 |
| breast | 158 |
| bone marrow | 0 |
| muscle | 94 |
| ovary | 131 |
| pancreas | 113 |
| prostate | 106 |
| skin | 193 |
| stomach | 73 |
| Thyroid | 0 |
| uterus | 140 |

TABLE 5
P values and ratios for expression in cancerous tissue

| Name of Tissue | P1 | P2 | SP1 | R3 | SP2 | R4 |
|---|---|---|---|---|---|---|
| adrenal | 7.4e−01 | 6.9e−01 | 9.5e−01 | 0.4 | 7.1e−01 | 0.7 |
| bladder | 7.0e−01 | 6.6e−01 | 6.2e−01 | 1.1 | 7.1e−01 | 1.0 |
| bone | 4.9e−01 | 6.3e−01 | 7.9e−01 | 0.9 | 2.1e−01 | 1.1 |
| brain | 7.4e−02 | 2.0e−02 | 1.0e−01 | 1.5 | 5.2e−12 | 3.2 |
| colon | 2.6e−03 | 5.7e−04 | 9.9e−03 | 4.3 | 1.3e−02 | 4.0 |
| epithelial | 3.2e−01 | 2.5e−02 | 3.3e−01 | 1.0 | 9.1e−08 | 1.8 |
| general | 4.9e−02 | 2.3e−04 | 3.6e−03 | 1.3 | 1.4e−23 | 2.2 |
| head and neck | 2.1e−01 | 1.1e−01 | 1 | 1.1 | 4.2e−01 | 2.0 |
| kidney | 8.6e−01 | 8.8e−01 | 9.7e−01 | 0.4 | 8.1e−01 | 0.6 |
| liver | 5.2e−01 | 9.1e−02 | 1 | 0.5 | 1.0e−01 | 2.4 |
| lung | 7.1e−01 | 7.3e−01 | 8.9e−01 | 0.6 | 1.3e−01 | 0.9 |
| lymph nodes | 5.9e−01 | 6.6e−01 | 4.1e−01 | 1.3 | 6.0e−01 | 0.9 |
| breast | 1.9e−01 | 1.5e−01 | 2.6e−01 | 1.0 | 1.4e−01 | 1.3 |
| bone marrow | 4.3e−01 | 2.5e−01 | 1 | 3.3 | 1.5e−01 | 4.0 |
| muscle | 6.7e−01 | 5.1e−01 | 1 | 0.2 | 1.6e−02 | 0.7 |
| ovary | 6.3e−01 | 4.9e−01 | 6.9e−01 | 0.9 | 2.8e−01 | 1.0 |
| pancreas | 2.2e−01 | 1.7e−01 | 3.8e−02 | 0.9 | 5.5e−05 | 1.6 |
| prostate | 8.7e−01 | 8.3e−01 | 8.3e−01 | 0.7 | 1.8e−01 | 1.0 |
| skin | 5.0e−01 | 4.9e−01 | 6.9e−01 | 0.8 | 3.3e−02 | 0.9 |
| stomach | 5.2e−01 | 3.9e−01 | 1 | 0.4 | 2.0e−01 | 1.5 |
| Thyroid | 4.6e−01 | 4.6e−01 | 1 | 1.2 | 1 | 1.2 |
| uterus | 6.1e−01 | 3.6e−01 | 1.7e−01 | 1.0 | 1.2e−01 | 1.3 |

[2033] As noted above, cluster D11853 features 18 transcript(s), which were listed in Table 1 above. These transcript(s) encode for protein(s) which are variant(s) of protein Membrane associated protein SLP-2 (SEQ ID NO:637). A description of each variant protein according to the present invention is now provided.

[2034] Variant protein D11853_PEA_{—}1_P1 (SEQ ID NO:588) according to the present invention has an amino acid sequence as given at the end of the application; it is encoded by transcript(s) D11853_PEA_{—}1_T1 (SEQ ID NO:57). An alignment is given to the known protein (Membrane associated protein SLP-2 (SEQ ID NO:637)) at the end of the application. One or more alignments to one or more previously published protein sequences are given at the end of the application. A brief description of the relationship of the variant protein according to the present invention to each such aligned protein is as follows:

[2035] Comparison Report Between D11853_PEA_{—}1_P1 (SEQ ID NO:588) and Q9P042 (SEQ ID NO 639):

[2036] 1. An isolated chimeric polypeptide encoding for D11853_PEA_{—}1_P1 (SEQ ID NO:588), comprising a first amino acid sequence being at least 70%, optionally at least 80%, preferably at least 85%, more preferably at least 90% and most preferably at least 95% homologous to a polypeptide having the sequence MLARAARGTGALLLRGSLLASGRAPR (SEQ ID NO:1530) corresponding to amino acids 1-26 of D11853_PEA_{—}1_P1 (SEQ ID NO:588), a second amino acid sequence being at least 90% homologous to RASSGLPRNTVVLFVPQQEAWVVERMGRFHRILEPGLNILIPVLDRIRYVQSLKEIVINVPEQSAVTLDNVT LQIDGVLYLRIMDPYKASYGVEDPEYAVTQLAQTTMRSELGKLSLDKVFRERESLNASIVDAINQAADCW GIRCLRYEIKDIHVPPRVKESMQMQVEAERRKR corresponding to amino acids 13-187 of Q9P042 (SEQ ID NO:639), which also corresponds to amino acids 27-201 of D11853_PEA_{—}1_P1 (SEQ ID NO:588), a bridging amino acid A corresponding to amino acid 202 of D11853_PEA_{—}1_P1 (SEQ ID NO:588), and a third amino acid sequence being at least 90% homologous to TVLESEGTRESAINVAEGKKQAQILASEAEKAEQINQAAGEASAVLAKAKAKAEAIRILAAALTQHNGDA AASLTVAEQYVSAFSKLAKDSNTILLPSNPGDVTSMVAQAMGVYGALTKAPVPGTPDSLSSGSSRDVQGT DASLDEELDRVKMS corresponding to amino acids 189-342 of Q9P042 (SEQ ID NO:639), which also corresponds to amino acids 203-356 of D11853_PEA_{—}1_P1 (SEQ ID NO:588), wherein said first amino acid sequence, second amino acid sequence, bridging amino acid and third amino acid sequence are contiguous and in a sequential order.

[2037] 2. An isolated polypeptide encoding for a head of D11853_PEA_{—}1_P1 (SEQ ID NO:588), comprising a polypeptide being at least 70%, optionally at least about 80%, preferably at least about 85%, more preferably at least about 90% and most preferably at least about 95% homologous to the sequence MLARAARGTGALLLRGSLLASGRAPR (SEQ ID NO:1530) of D11853_PEA_{—}1_P1 (SEQ ID NO:588).

[2038] Comparison Report Between D11853_PEA_{—}1_P1 (SEQ ID NO:588) and BAC85377 (SEQ ID NO 640):

[2039] 1. An isolated chimeric polypeptide encoding for D11853_PEA_{—}1_P1 (SEQ ID NO:588), comprising a first amino acid sequence being at least 70%, optionally at least 80%, preferably at least 85%, more preferably at least 90% and most preferably at least 95% homologous to a polypeptide having the sequence MLARAARGTGALLLRGSLLASGRAPRRASSGLPRNTVVLFVPQQEAWVVERMGRFHRILEPGLNILIPVLD RIRYVQSLKEIVINVPEQSAVTLDNVTLQIDGVLYLRI corresponding to amino acids 1-109 of D11853_PEA_{—}1_P1 (SEQ ID NO:588), a second amino acid sequence being at least 90% homologous to MDPYKASYGVEDPEYAVTQLAQTTMRSELGKLSLDKVFRERESLNASIVDAINQAADCWGIRCLRYEIKD IHVPPRVKESMQMQVEAERRKRATVLESEGTRESAINVAEGKKQAQILASEAEKAEQINQAAGEASAVLA KAKAKAEAIRILAAALTQH corresponding to amino acids 1-159 of BAC85377 (SEQ ID NO:640), which also corresponds to amino acids 110-268 of D11853_PEA_{—}1_P1 (SEQ ID NO:588), and a third amino acid sequence being at least 70%, optionally at least 80%, preferably at least 85%, more preferably at least 90% and most preferably at least 95% homologous to a polypeptide having the sequence NGDAAASLTVAEQYVSAFSKLAKDSNTILLPSNPGDVTSMVAQAMGVYGALTKAPVPGTPDSLSSGSSRD VQGTDASLDEELDRVKMS corresponding to amino acids 269-356 of D11853_PEA_{—}1_P1 (SEQ ID NO:588), wherein said first amino acid sequence, second amino acid sequence and third amino acid sequence are contiguous and in a sequential order.

[2040] 2. An isolated polypeptide encoding for a head of D11853_PEA_{—}1_P1 (SEQ ID NO:588), comprising a polypeptide being at least 70%, optionally at least about 80%, preferably at least about 85%, more preferably at least about 90% and most preferably at least about 95% homologous to the sequence MLARAARGTGALLLRGSLLASGRAPRRASSGLPRNTVVLFVPQQEAWVVERMGRFHRILEPGLNILIPVLD RIRYVQSLKEIVINVPEQSAVTLDNVTLQIDGVLYLRI of D11853_PEA_{—}1_P1 (SEQ ID NO:588).

[2041] 3. An isolated polypeptide encoding for a tail of D11853_PEA_{—}1_P1 (SEQ ID NO:588), comprising a polypeptide being at least 70%, optionally at least about 80%, preferably at least about 85%, more preferably at least about 90% and most preferably at least about 95% homologous to the sequence NGDAAASLTVAEQYVSAFSKLAKDSNTILLPSNPGDVTSMVAQAMGVYGALTKAPVPGTPDSLSSGSSRD VQGTDASLDEELDRVKMS in D11853_PEA_{—}1_P1 (SEQ ID NO:588).

[2042] Comparison Report Between D11853_PEA_{—}1_P1 (SEQ ID NO:588) and Q96FY2 (SEQ ID NO: 638):

[2043] 1. An isolated chimeric polypeptide encoding for D11853_PEA_{—}1_P1 (SEQ ID NO:588), comprising a first amino acid sequence being at least 90% homologous to MLARAARGTGALLLRGSLLASGRAPRRASSGLPRNTVVLFVPQQEAWVVERMGRFHRILEPGLNILIPVLD RIRYVQSLKEIVINVPEQSAVTLDNVTLQIDGVLYLRIMDPYKASYGVEDPEYAVTQ corresponding to amino acids 1-128 of Q96FY2 (SEQ ID NO:638), which also corresponds to amino acids 1-128 of D11853_PEA_{—}1_P1 (SEQ ID NO:588), a bridging amino acid L corresponding to amino acid 129 of D11853_PEA_{—}1_P1 (SEQ ID NO:588), and a second amino acid sequence being at least 90% homologous to AQTTMRSELGKLSLDKVFRERESLNASIVDAINQAADCWGIRCLRYEIKDIHVPPRVKESMQMQVEAERR KRATVLESEGTRESAINVAEGKKQAQILASEAEKAEQINQAAGEASAVLAKAKAKAEAIRILAAALTQHN GDAAASLTVAEQYVSAFSKLAKDSNTILLPSNPGDVTSMVAQAMGVYGALTKAPVPGTPDSLSSGSSRDV QGTDASLDEELDRVKMS corresponding to amino acids 130-356 of Q96FY2 (SEQ ID NO:638), which also corresponds to amino acids 130-356 of D11853_PEA_{—}1_P1 (SEQ ID NO:588), wherein said first amino acid sequence, bridging amino acid and second amino acid sequence are contiguous and in a sequential order.

[2044] The location of the variant protein was determined according to results from a number of different software programs and analyses, including analyses from SignalP and other specialized programs. The variant protein is believed to be located as follows with regard to the cell: secreted. The protein localization is believed to be secreted because one of the two signal-peptide prediction programs (HMM:Signal peptide,NN:NO) predicts that this protein has a signal peptide.

[2045] Variant protein D11853_PEA_{—}1_P1 (SEQ ID NO:588) also has the following non-silent SNPs (Single Nucleotide Polymorphisms) as listed in Table 6, (given according to their position(s) on the amino acid sequence, with the alternative amino acid(s) listed; the last column indicates whether the SNP is known or not; the presence of known SNPs in variant protein D11853_PEA_{—}1_P1 (SEQ ID NO:588) sequence provides support for the deduced sequence of this variant protein according to the present invention).

TABLE 6
Amino acid mutations

| SNP position(s) on amino acid | Alternative | |
|---|---|---|
| sequence | amino acid(s) | Previously known SNP? |
| 25 | P -> | No |
| 32 | L -> | No |
| 178 | K -> | No |
| 178 | K -> R | No |
| 178 | K -> T | No |
| 185 | R -> G | No |
| 187 | K -> T | No |
| 206 | E -> K | No |
| 230 | E -> K | No |
| 230 | E -> Q | No |
| 235 | E -> | No |
| 235 | E -> D | No |
| 239 | Q -> P | No |
| 244 | A -> G | No |
| 244 | A -> | No |
| 267 | Q -> H | No |
| 278 | V -> G | No |
| 284 | S -> N | No |
| 284 | S -> T | No |
| 299 | P -> | No |
| 299 | P -> A | No |
| 326 | G -> | No |
| 329 | D -> N | No |
| 340 | Q -> | No |

[2046] Variant protein D11853_PEA_{—}1_P1 (SEQ ID NO:588) is encoded by the following transcript(s): D11853_PEA_{—}1_T1 (SEQ ID NO:57), for which the sequence(s) is/are given at the end of the application. The coding portion of transcript D11853_PEA_{—}1_T1 (SEQ ID NO:57) is shown in bold; this coding portion starts at position 108 and ends at position 1175. The transcript also has the following SNPs as listed in Table 7 (given according to their position on the nucleotide sequence, with the alternative nucleic acid listed; the last column indicates whether the SNP is known or not; the presence of known SNPs in variant protein D11853_PEA_{—}1_P1 (SEQ ID NO:588) sequence provides support for the deduced sequence of this variant protein according to the present invention).

TABLE 7
Nucleic acid SNPs

| SNP position on | Alternative | Previously known |
|---|---|---|
| nucleotide sequence | nucleic acid | SNP? |
| 180 | C -> | No |
| 182 | G -> | No |
| 185 | -> C | No |
| 201 | T -> | No |
| 640 | A -> C | No |
| 640 | A -> G | No |
| 641 | G -> | No |
| 641 | G -> A | No |
| 660 | C -> G | No |
| 667 | A -> C | No |
| 723 | G -> A | No |
| 795 | G -> A | No |
| 795 | G -> C | No |
| 812 | A -> | No |
| 812 | A -> C | No |
| 823 | A -> C | No |
| 838 | C -> | No |
| 838 | C -> G | No |
| 908 | A -> C | No |
| 932 | A -> C | No |
| 940 | T -> G | No |
| 958 | G -> A | No |
| 958 | G -> C | No |
| 966 | -> C | No |
| 966 | -> T | No |
| 973 | -> G | No |
| 1002 | C -> | No |
| 1002 | C -> G | No |
| 1033 | -> G | No |
| 1083 | G -> | No |
| 1092 | G -> A | No |
| 1112 | C -> T | No |
| 1127 | G -> | No |
| 1208 | G -> A | No |
| 1211 | A -> | No |
| 1211 | A -> C | No |
| 1257 | T -> | No |
| 1260 | T -> C | No |
| 1260 | T -> G | No |
| 1297 | T -> C | Yes |

[2047] Variant protein D11853_PEA_{—}1_P2 (SEQ ID NO:589) according to the present invention has an amino acid sequence as given at the end of the application; it is encoded by transcript(s) D11853_PEA_{—}1_T3 (SEQ ID NO:58). An alignment is given to the known protein (Membrane associated protein SLP-2 (SEQ ID NO:637)) at the end of the application. One or more alignments to one or more previously published protein sequences are given at the end of the application. A brief description of the relationship of the variant protein according to the present invention to each such aligned protein is as follows:

[2048] Comparison Report Between D11853_PEA_{—}1_P2 (SEQ ID NO:589) and Q9P042 (SEQ ID NO: 639):

[2049] 1. An isolated chimeric polypeptide encoding for D11853_PEA_{—}1_P2 (SEQ ID NO:589), comprising a first amino acid sequence being at least 70%, optionally at least 80%, preferably at least 85%, more preferably at least 90% and most preferably at least 95% homologous to a polypeptide having the sequence MLARAARGTGALLLRGSLLASGRAPR (SEQ ID NO:1530) corresponding to amino acids 1-26 of D11853_PEA_{—}1_P2 (SEQ ID NO:589), a second amino acid sequence being at least 90% homologous to RASSGLPRNTVVLFVPQQEAWVVERMGRFHRILEPGLNILIPVLDRIRYVQSLKEIVINVPEQSAVTLDNVT LQIDGVLYLRIMDPYKASYGVEDPEYAVTQLAQTTMRSELGKLSLDKVFRERESLNASIVDAINQAADCW GIRCLRYEIKDIHVPPRVKESMQMQVEAERRKR corresponding to amino acids 13-187 of Q9P042 (SEQ ID NO:639), which also corresponds to amino acids 27-201 of D11853_PEA_{—}1_P2 (SEQ ID NO:589), a bridging amino acid A corresponding to amino acid 202 of D11853_PEA_{—}1_P2 (SEQ ID NO:589), a third amino acid sequence being at least 90% homologous to TVLESEGTRESAINVAEGKKQAQILASEAEKAEQINQAAGEASAVLAKAKAKAEAIRILAAALTQHNGDA AASLTVAEQYVSAFSKLAKDSNTILLPSNPGDVTSMVAQ corresponding to amino acids 189-297 of Q9P042 (SEQ ID NO:639), which also corresponds to amino acids 203-311 of D11853_PEA_{—}1_P2 (SEQ ID NO:589) and a fourth amino acid sequence being at least 70%, optionally at least 80%, preferably at least 85%, more preferably at least 90% and most preferably at least 95% homologous to a polypeptide having the sequence VRAL (SEQ ID NO:1533) corresponding to amino acids 312-315 of D11853_PEA_{—}1_P2 (SEQ ID NO:589), wherein said first amino acid sequence, second amino acid sequence, bridging amino acid, third amino acid sequence and fourth amino acid sequence are contiguous and in a sequential order.

[2050] 2. An isolated polypeptide encoding for a head of D11853_PEA_{—}1_P2 (SEQ ID NO:589), comprising a polypeptide being at least 70%, optionally at least about 80%, preferably at least about 85%, more preferably at least about 90% and most preferably at least about 95% homologous to the sequence MLARAARGTGALLLRGSLLASGRAPR (SEQ ID NO:1530) of D11853_PEA_{—}1_P2 (SEQ ID NO:589).

[2051] 3. An isolated polypeptide encoding for a tail of D11853_PEA_{—}1_P2 (SEQ ID NO:589), comprising a polypeptide being at least 70%, optionally at least about 80%, preferably at least about 85%, more preferably at least about 90% and most preferably at least about 95% homologous to the sequence VRAL (SEQ ID NO:1533) in D11853_PEA_{—}1_P2 (SEQ ID NO:589).

[2052] Comparison Report Between D11853_PEA_{—}1_P2 (SEQ ID NO:589) and BAC85377 (SEQ ID NO: 640):

[2053] 1. An isolated chimeric polypeptide encoding for D11853_PEA_{—}1_P2 (SEQ ID NO:589), comprising a first amino acid sequence being at least 70%, optionally at least 80%, preferably at least 85%, more preferably at least 90% and most preferably at least 95% homologous to a polypeptide having the sequence MLARAARGTGALLLRGSLLASGRAPRRASSGLPRNTVVLFVPQQEAWVVERMGRFHRILEPGLNILIPVLD RIRYVQSLKEIVINVPEQSAVTLDNVTLQIDGVLYLRI corresponding to amino acids 1-109 of D11853_PEA_{—}1_P2 (SEQ ID NO:589), a second amino acid sequence being at least 90% homologous to MDPYKASYGVEDPEYAVTQLAQTTMRSELGKLSLDKVFRERESLNASIVDAINQAADCWGIRCLRYEIKD IHVPPRVKESMQMQVEAERRKRATVLESEGTRESAINVAEGKKQAQILASEAEKAEQINQAAGEASAVLA KAKAKAEAIRILAAALTQH corresponding to amino acids 1-159 of BAC85377 (SEQ ID NO:640), which also corresponds to amino acids 110-268 of D11853_PEA_{—}1_P2 (SEQ ID NO:589), and a third amino acid sequence being at least 70%, optionally at least 80%, preferably at least 85%, more preferably at least 90% and most preferably at least 95% homologous to a polypeptide having the sequence NGDAAASLTVAEQYVSAFSKLAKDSNTILLPSNPGDVTSMVAQVRAL corresponding to amino acids 269-315 of D11853_PEA_{—}1_P2 (SEQ ID NO:589), wherein said first amino acid sequence, second amino acid sequence and third amino acid sequence are contiguous and in a sequential order.

[2054] 2. An isolated polypeptide encoding for a head of D11853_PEA_{—}1_P2 (SEQ ID NO:589), comprising a polypeptide being at least 70%, optionally at least about 80%, preferably at least about 85%, more preferably at least about 90% and most preferably at least about 95% homologous to the sequence MLARAARGTGALLLRGSLLASGRAPRRASSGLPRNTVVLFVPQQEAWVVERMGRFHRILEPGLNILIPVLD RIRYVQSLKEIVINVPEQSAVTLDNVTLQIDGVLYLRI of D11853_PEA_{—}1_P2 (SEQ ID NO:589).

[2055] 3. An isolated polypeptide encoding for a tail of D11853_PEA_{—}1_P2 (SEQ ID NO:589), comprising a polypeptide being at least 70%, optionally at least about 80%, preferably at least about 85%, more preferably at least about 90% and most preferably at least about 95% homologous to the sequence NGDAAASLTVAEQYVSAFSKLAKDSNTILLPSNPGDVTSMVAQVRAL in D11853_PEA_{—}1_P2 (SEQ ID NO:589).

[2056] Comparison Report Between D11853_PEA_{—}1_P2 (SEQ ID NO:589) and Q96FY2 (SEQ ID NO:638):

[2057] 1. An isolated chimeric polypeptide encoding for D11853_PEA_{—}1_P2 (SEQ ID NO:589), comprising a first amino acid sequence being at least 90% homologous to MLARAARGTGALLLRGSLLASGRAPRRASSGLPRNTVVLFVPQQEAWVVERMGRFHRILEPGLNILIPVLD RIRYVQSLKEIVINVPEQSAVTLDNVTLQIDGVLYLRIMDPYKASYGVEDPEYAVTQ corresponding to amino acids 1-128 of Q96FY2 (SEQ ID NO:638), which also corresponds to amino acids 1-128 of D11853_PEA_{—}1_P2 (SEQ ID NO:589), a bridging amino acid L corresponding to amino acid 129 of D11853_PEA_{—}1_P2 (SEQ ID NO:589), a second amino acid sequence being at least 90% homologous to AQTTMRSELGKLSLDKVFRERESLNASIVDAINQAADCWGIRCLRYEIKDIHVPPRVKESMQMQVEAERR KRATVLESEGTRESAINVAEGKKQAQILASEAEKAEQINQAAGEASAVLAKAKAKAEAIRILAAALTQHN GDAAASLTVAEQYVSAFSKLAKDSNTILLPSNPGDVTSMVAQ corresponding to amino acids 130-311 of Q96FY2 (SEQ ID NO:638), which also corresponds to amino acids 130-311 of D11853_PEA_{—}1_P2 (SEQ ID NO:589), and a third amino acid sequence being at least 70%, optionally at least 80%, preferably at least 85%, more preferably at least 90% and most preferably at least 95% homologous to a polypeptide having the sequence VRAL (SEQ ID NO:1533) corresponding to amino acids 312-315 of D11853_PEA_{—}1_P2 (SEQ ID NO:589), wherein said first amino acid sequence, bridging amino acid, second amino acid sequence and third amino acid sequence are contiguous and in a sequential order.

[2058] 2. An isolated polypeptide encoding for a tail of D11853_PEA_{—}1_P2 (SEQ ID NO:589), comprising a polypeptide being at least 70%, optionally at least about 80%, preferably at least about 85%, more preferably at least about 90% and most preferably at least about 95% homologous to the sequence VRAL (SEQ ID NO:1533) in D11853_PEA_{—}1_P2 (SEQ ID NO:589).

[2059] Comparison Report Between D11853_PEA_{—}1_P2 (SEQ ID NO:589) and Q9UJZ1 (SEQ ID NO:637):

[2060] 1. An isolated chimeric polypeptide encoding for D11853_PEA_{—}1_P2 (SEQ ID NO:589), comprising a first amino acid sequence being at least 90% homologous to MLARAARGTGALLLRGSLLASGRAPRRASSGLPRNTVVLFVPQQEAWVVERMGRFHRILEPGLNILIPVLD RIRYVQSLKEIVINVPEQSAVTLDNVTLQIDGVLYLRIMDPYKASYGVEDPEYAVTQLAQTTMRSELGKLS LDKVFRERESLNASIVDAINQAADCWGIRCLRYEIKDIHVPPRVKESMQMQVEAERRKRATVLESEGTRES AINVAEGKKQAQILASEAEKAEQINQAAGEASAVLAKAKAKAEAIRILAAALTQIINGDAAASLTVAEQY VSAFSKLAKDSNTILLPSNPGDVTSMVAQ corresponding to amino acids 1-311 of Q9UJZ1 (SEQ ID NO:637), which also corresponds to amino acids 1-311 of D11853_PEA_{—}1_P2 (SEQ ID NO:589), and a second amino acid sequence being at least 70%, optionally at least 80%, preferably at least 85%, more preferably at least 90% and most preferably at least 95% homologous to a polypeptide having the sequence VRAL (SEQ ID NO:1533) corresponding to amino acids 312-315 of D11853_PEA_{—}1_P2 (SEQ ID NO:589), wherein said first amino acid sequence and second amino acid sequence are contiguous and in a sequential order.

[2061] 2. An isolated polypeptide encoding for a tail of D11853_PEA_{—}1_P2 (SEQ ID NO:589), comprising a polypeptide being at least 70%, optionally at least about 80%, preferably at least about 85%, more preferably at least about 90% and most preferably at least about 95% homologous to the sequence VRAL (SEQ ID NO:1533) in D11853_PEA_{—}1_P2 (SEQ ID NO:589).

[2062] The location of the variant protein was determined according to results from a number of different software programs and analyses, including analyses from SignalP and other specialized programs. The variant protein is believed to be located as follows with regard to the cell: secreted. The protein localization is believed to be secreted because one of the two signal-peptide prediction programs (HMM:Signal peptide,NN:NO) predicts that this protein has a signal peptide.

[2063] Variant protein D11853_PEA_{—}1_P2 (SEQ ID NO:589) also has the following non-silent SNPs (Single Nucleotide Polymorphisms) as listed in Table 8, (given according to their position(s) on the amino acid sequence, with the alternative amino acid(s) listed; the last column indicates whether the SNP is known or not; the presence of known SNPs in variant protein D11853_PEA_{—}1_P2 (SEQ ID NO:589) sequence provides support for the deduced sequence of this variant protein according to the present invention).

TABLE 8
Amino acid mutations

| SNP position(s) on amino acid | Alternative | |
|---|---|---|
| sequence | amino acid(s) | Previously known SNP? |
| 25 | P -> | No |
| 32 | L -> | No |
| 178 | K -> | No |
| 178 | K -> R | No |
| 178 | K -> T | No |
| 185 | R -> G | No |
| 187 | K -> T | No |
| 206 | E -> K | No |
| 230 | E -> Q | No |
| 230 | E -> K | No |
| 235 | E -> D | No |
| 235 | E -> | No |
| 239 | Q -> P | No |
| 244 | A -> | No |
| 244 | A -> G | No |
| 267 | Q -> H | No |
| 278 | V -> G | No |
| 284 | S -> T | No |
| 284 | S -> N | No |
| 299 | P -> A | No |
| 299 | P -> | No |

[2064] Variant protein D11853_PEA_{—}1_P2 (SEQ ID NO:589) is encoded by the following transcript(s): D11853_PEA_{—}1_T3 (SEQ ID NO:58), for which the sequence(s) is/are given at the end of the application. The coding portion of transcript D11853_PEA_{—}1_T3 (SEQ ID NO:58) is shown in bold; this coding portion starts at position 108 and ends at position 1052. The transcript also has the following SNPs as listed in Table 9 (given according to their position on the nucleotide sequence, with the alternative nucleic acid listed; the last column indicates whether the SNP is known or not; the presence of known SNPs in variant protein D11853_PEA_{—}1_P2 (SEQ ID NO:589) sequence provides support for the deduced sequence of this variant protein according to the present invention).

TABLE 9
Nucleic acid SNPs

| SNP position on | Alternative | Previously known |
|---|---|---|
| nucleotide sequence | nucleic acid | SNP? |
| 180 | C -> | No |
| 182 | G -> | No |
| 185 | -> C | No |
| 201 | T -> | No |
| 640 | A -> C | No |
| 640 | A -> G | No |
| 641 | G -> | No |
| 641 | G -> A | No |
| 660 | C -> G | No |
| 667 | A -> C | No |
| 723 | G -> A | No |
| 795 | G -> A | No |
| 795 | G -> C | No |
| 812 | A -> | No |
| 812 | A -> C | No |
| 823 | A -> C | No |
| 838 | C -> | No |
| 838 | C -> G | No |
| 908 | A -> C | No |
| 932 | A -> C | No |
| 940 | T -> G | No |
| 958 | G -> A | No |
| 958 | G -> C | No |
| 966 | -> C | No |
| 966 | -> T | No |
| 973 | -> G | No |
| 1002 | C -> | No |
| 1002 | C -> G | No |
| 1033 | -> G | No |
| 1066 | C -> T | No |
| 1508 | G -> | No |
| 1517 | G -> A | No |
| 1537 | C -> T | No |
| 1552 | G -> | No |
| 1633 | G -> A | No |
| 1636 | A -> | No |
| 1636 | A -> C | No |
| 1682 | T -> | No |
| 1685 | T -> C | No |
| 1685 | T -> G | No |
| 1722 | T -> C | Yes |

[2065] Variant protein D11853_PEA_{—}1_P7 (SEQ ID NO:590) according to the present invention has an amino acid sequence as given at the end of the application; it is encoded by transcript(s) D11853_PEA_{—}1_T10 (SEQ ID NO:62). An alignment is given to the known protein (Membrane associated protein SLP-2 (SEQ ID NO:637)) at the end of the application. One or more alignments to one or more previously published protein sequences are given at the end of the application. A brief description of the relationship of the variant protein according to the present invention to each such aligned protein is as follows:

[2066] Comparison Report Between D11853_PEA_{—}1_P7 (SEQ ID NO:590) and Q9P042 (SEQ ID NO:639):

[2067] 1. An isolated chimeric polypeptide encoding for D11853_PEA_{—}1_P7 (SEQ ID NO:590), comprising a first amino acid sequence being at least 70%, optionally at least 80%, preferably at least 85%, more preferably at least 90% and most preferably at least 95% homologous to a polypeptide having the sequence MLARAARGTGALLLRGSLLASGRAPR (SEQ ID NO:1530) corresponding to amino acids 1-26 of D11853_PEA_{—}1_P7 (SEQ ID NO:590), a second amino acid sequence being at least 90% homologous to RASSGLPRNTVVLFVPQQEAWVVERMGRFHRILEPGLNILIPVLDRIRYVQSLKEIVINVPEQSAVTLDNVT LQIDGVLYLRIMDPYKASYGVEDPEYAVTQLAQTTMRSELGKLSLDKVFRERESLNASIVDAINQAADCW GIRCLRYEIKDIHVPPRVKESMQMQVEAERRKR corresponding to amino acids 13-187 of Q9P042 (SEQ ID NO:639), which also corresponds to amino acids 27-201 of D11853_PEA_{—}1_P7 (SEQ ID NO:590), a bridging amino acid A corresponding to amino acid 202 of D11853_PEA_{—}1_P7 (SEQ ID NO:590), a third amino acid sequence being at least 90% homologous to TVLESEGTRESAINVAEGKKQAQILASEAEKAEQINQAAGEASAVLAKAKAKAEAIRILAAALTQH corresponding to amino acids 189-254 of Q9P042 (SEQ ID NO:639), which also corresponds to amino acids 203-268 of D11853_PEA_{—}1_P7 (SEQ ID NO:590), and a fourth amino acid sequence being at least 70%, optionally at least 80%, preferably at least 85%, more preferably at least 90% and most preferably at least 95% homologous to a polypeptide having the sequence VRGPWVGMGTGIDSGRGSLIYA (SEQ ID NO:1535) corresponding to amino acids 269-290 of D11853_PEA_{—}1_P7 (SEQ ID NO:590), wherein said first amino acid sequence, second amino acid sequence, bridging amino acid, third amino acid sequence and fourth amino acid sequence are contiguous and in a sequential order.

[2068] 2. An isolated polypeptide encoding for a head of D11853_PEA_{—}1_P7 (SEQ ID NO:590), comprising a polypeptide being at least 70%, optionally at least about 80%, preferably at least about 85%, more preferably at least about 90% and most preferably at least about 95% homologous to the sequence MLARAARGTGALLLRGSLLASGRAPR (SEQ ID NO:1530) of D11853_PEA_{—}1_P7 (SEQ ID NO:590).

[2069] 3. An isolated polypeptide encoding for a tail of D11853_PEA_{—}1_P7 (SEQ ID NO:590), comprising a polypeptide being at least 70%, optionally at least about 80%, preferably at least about 85%, more preferably at least about 90% and most preferably at least about 95% homologous to the sequence VRGPWVGMGTGIDSGRGSLIYA (SEQ ID NO:1535) in D11853_PEA_{—}1_P7 (SEQ ID NO:590).

[2070] Comparison Report Between D11853_PEA_{—}1_P7 (SEQ ID NO:590) and BAC85377 (SEQ ID NO:640):

[2071] 1. An isolated chimeric polypeptide encoding for D11853_PEA_{—}1_P7 (SEQ ID NO:590), comprising a first amino acid sequence being at least 70%, optionally at least 80%, preferably at least 85%, more preferably at least 90% and most preferably at least 95% homologous to a polypeptide having the sequence MLARAARGTGALLLRGSLLASGRAPRRASSGLPRNTVVLFVPQQEAWVVERMGRFHRILEPGLNILIPVLD RIRYVQSLKEIVINVPEQSAVTLDNVTLQIDGVLYLRI corresponding to amino acids 1-109 of D11853_PEA_{—}1_P7 (SEQ ID NO:590), and a second amino acid sequence being at least 90% homologous to MDPYKASYGVEDPEYAVTQLAQTTMRSELGKLSLDKVFRERESLNASIVDAINQAADCWGIRCLRYEIKD IHVPPRVKESMQMQVEAERRKRATVLESEGTRESAINVAEGKKQAQILASEAEKAEQINQAAGEASAVLA KAKAKAEAIRILAAALTQHVRGPWVGMGTGIDSGRGSLIYA corresponding to amino acids 1-181 of BAC85377 (SEQ ID NO:640), which also corresponds to amino acids 110-290 of D11853_PEA_{—}1_P7 (SEQ ID NO:590), wherein said first amino acid sequence and second amino acid sequence are contiguous and in a sequential order.

[2072] 2. An isolated polypeptide encoding for a head of D11853_PEA_{—}1_P7 (SEQ ID NO:590), comprising a polypeptide being at least 70%, optionally at least about 80%, preferably at least about 85%, more preferably at least about 90% and most preferably at least about 95% homologous to the sequence MLARAARGTGALLLRGSLLASGRAPRRASSGLPRNTVVLFVPQQEAWVVERMGRFHRILEPGLNILIPVLD RIRYVQSLKEIVINVPEQSAVTLDNVTLQIDGVLYLRI of D11853_PEA_{—}1_P7 (SEQ ID NO:590).

[2073] Comparison Report Between D11853_PEA_{—}1_P7 (SEQ ID NO:590) and Q96FY2 (SEQ ID NO 638):

[2074] 1. An isolated chimeric polypeptide encoding for D11853_PEA_{—}1_P7 (SEQ ID NO:590), comprising a first amino acid sequence being at least 90% homologous to MLARAARGTGALLLRGSLLASGRAPRRASSGLPRNTVVLFVPQQEAWVVERMGRFHRILEPGLNILIPVLD RIRYVQSLKEIVINVPEQSAVTLDNVTLQIDGVLYLRIMDPYKASYGVEDPEYAVTQ corresponding to amino acids 1-128 of Q96FY2 (SEQ ID NO:638), which also corresponds to amino acids 1-128 of D11853_PEA_{—}1_P7 (SEQ ID NO:590), a bridging amino acid L corresponding to amino acid 129 of D11853_PEA_{—}1_P7 (SEQ ID NO:590), a second amino acid sequence being at least 90% homologous to AQTTMRSELGKLSLDKVFRERESLNASIVDAINQAADCWGIRCLRYEIKDIHVPPRVKESMQMQVEAERR KRATVLESEGTRESAINVAEGKKQAQILASEAEKAEQINQAAGEASAVLAKAKAKAEAIRILAAALTQH corresponding to amino acids 130-268 of Q96FY2 (SEQ ID NO:638), which also corresponds to amino acids 130-268 of D11853_PEA_{—}1_P7 (SEQ ID NO:590), and a third amino acid sequence being at least 70%, optionally at least 80%, preferably at least 85%, more preferably at least 90% and most preferably at least 95% homologous to a polypeptide having the sequence VRGPWVGMGTGIDSGRGSLIYA (SEQ ID NO:1535) corresponding to amino acids 269-290 of D11853_PEA_{—}1_P7 (SEQ ID NO:590), wherein said first amino acid sequence, bridging amino acid, second amino acid sequence and third amino acid sequence are contiguous and in a sequential order.

[2075] 2. An isolated polypeptide encoding for a tail of D11853_PEA_{—}1_P7 (SEQ ID NO:590), comprising a polypeptide being at least 70%, optionally at least about 80%, preferably at least about 85%, more preferably at least about 90% and most preferably at least about 95% homologous to the sequence VRGPWVGMGTGIDSGRGSLIYA (SEQ ID NO:1535) in D11853_PEA_{—}1_P7 (SEQ ID NO:590).

[2076] Comparison Report Between D11853_PEA_{—}1_P7 (SEQ ID NO:590) and Q9UJZ1 (SEQ ID NO:637):

[2077] 1. An isolated chimeric polypeptide encoding for D11853_PEA_{—}1_P7 (SEQ ID NO:590), comprising a first amino acid sequence being at least 90% homologous to MLARAARGTGALLLRGSLLASGRAPRRASSGLPRNTVVLFVPQQEAWVVERMGRFHRILEPGLNILIPVLD RIRYVQSLKEIVINVPEQSAVTLDNVTLQIDGVLYLRIMDPYKASYGVEDPEYAVTQLAQTTMRSELGKLS LDKVFRERESLNASIVDAINQAADCWGIRCLRYEIKDIHVPPRVKESMQMQVEAERRKRATVLESEGTRES AINVAEGKKQAQILASEAEKAEQINQAAGEASAVLAKAKAKAEAIRILAAALTQH corresponding to amino acids 1-268 of Q9UJZ1 (SEQ ID NO:637), which also corresponds to amino acids 1-268 of D11853_PEA_{—}1_P7 (SEQ ID NO:590), and a second amino acid sequence being at least 70%, optionally at least 80%, preferably at least 85%, more preferably at least 90% and most preferably at least 95% homologous to a polypeptide having the sequence VRGPWVGMGTGIDSGRGSLIYA (SEQ ID NO:1535) corresponding to amino acids 269-290 of D11853_PEA_{—}1_P7 (SEQ ID NO:590), wherein said first amino acid sequence and second amino acid sequence are contiguous and in a sequential order.

[2078] 2. An isolated polypeptide encoding for a tail of D11853_PEA_{—}1_P7 (SEQ ID NO:590), comprising a polypeptide being at least 70%, optionally at least about 80%, preferably at least about 85%, more preferably at least about 90% and most preferably at least about 95% homologous to the sequence VRGPWVGMGTGIDSGRGSLIYA (SEQ ID NO:1535) in D11853_PEA_{—}1_P7 (SEQ ID NO:590).

[2079] The location of the variant protein was determined according to results from a number of different software programs and analyses, including analyses from SignalP and other specialized programs. The variant protein is believed to be located as follows with regard to the cell: secreted. The protein localization is believed to be secreted because one of the two signal-peptide prediction programs (HMM: Signal peptide,NN:NO) predicts that this protein has a signal peptide.

[2080] Variant protein D11853_PEA_{—}1_P7 (SEQ ID NO:590) also has the following non-silent SNPs (Single Nucleotide Polymorphisms) as listed in Table 10, (given according to their position(s) on the amino acid sequence, with the alternative amino acid(s) listed; the last column indicates whether the SNP is known or not; the presence of known SNPs in variant protein D11853_PEA_{—}1_P7 (SEQ ID NO:590) sequence provides support for the deduced sequence of this variant protein according to the present invention).

TABLE 10
Amino acid mutations

| SNP position(s) on | Alternative | Previously |
|---|---|---|
| amino acid sequence | amino acid(s) | known SNP? |
| 25 | P -> | No |
| 32 | L -> | No |
| 178 | K -> | No |
| 178 | K -> R | No |
| 178 | K -> T | No |
| 185 | R -> G | No |
| 187 | K -> T | No |
| 206 | E -> K | No |
| 230 | E -> K | No |
| 230 | E -> Q | No |
| 235 | E -> | No |
| 235 | E -> D | No |
| 239 | Q -> P | No |
| 244 | A -> | No |
| 244 | A -> G | No |
| 267 | Q -> H | No |

[2081] Variant protein D11853_PEA_{—}1_P7 (SEQ ID NO:590) is encoded by the following transcript(s): D11853_PEA_{—}1_T10 (SEQ ID NO:62), for which the sequence(s) is/are given at the end of the application. The coding portion of transcript D11853_PEA_{—}1_T10 (SEQ ID NO:62) is shown in bold; this coding portion starts at position 108 and ends at position 977. The transcript also has the following SNPs as listed in Table 11 (given according to their position on the nucleotide sequence, with the alternative nucleic acid listed; the last column indicates whether the SNP is known or not; the presence of known SNPs in variant protein D11853_PEA_{—}1_P7 (SEQ ID NO:590) sequence provides support for the deduced sequence of this variant protein according to the present invention).

TABLE 11
Nucleic acid SNPs

| SNP position on | Alternative | Previously |
|---|---|---|
| nucleotide sequence | nucleic acid | known SNP? |
| 180 | C -> | No |
| 182 | G -> | No |
| 185 | -> C | No |
| 201 | T -> | No |
| 640 | A -> C | No |
| 640 | A -> G | No |
| 641 | G -> | No |
| 641 | G -> A | No |
| 660 | C -> G | No |
| 667 | A -> C | No |
| 723 | G -> A | No |
| 795 | G -> A | No |
| 795 | G -> C | No |
| 812 | A -> | No |
| 812 | A -> C | No |
| 823 | A -> C | No |
| 838 | C -> | No |
| 838 | C -> G | No |
| 908 | A -> C | No |
| 1137 | A -> C | No |
| 1145 | T -> G | No |
| 1163 | G -> A | No |
| 1163 | G -> C | No |
| 1171 | -> C | No |
| 1171 | -> T | No |
| 1178 | -> G | No |
| 1207 | C -> | No |
| 1207 | C -> G | No |
| 1238 | -> G | No |
| 1288 | G -> | No |
| 1297 | G -> A | No |
| 1317 | C -> T | No |
| 1332 | G -> | No |
| 1413 | G -> A | No |
| 1416 | A -> | No |
| 1416 | A -> C | No |
| 1462 | T -> | No |
| 1465 | T -> C | No |
| 1465 | T -> G | No |
| 1502 | T -> C | Yes |

[2082] Variant protein D11853_PEA_{—}1_P9 (SEQ ID NO:591) according to the present invention has an amino acid sequence as given at the end of the application; it is encoded by transcript(s) D11853_PEA_{—}1_T13 (SEQ ID NO:63). An alignment is given to the known protein (Membrane associated protein SLP-2 (SEQ ID NO:637)) at the end of the application. One or more alignments to one or more previously published protein sequences are given at the end of the application. A brief description of the relationship of the variant protein according to the present invention to each such aligned protein is as follows:

[2083] Comparison Report Between D11853_PEA_{—}1_P9 (SEQ ID NO:591) and Q9P042 (SEQ ID NO:639):

[2084] 1. An isolated chimeric polypeptide encoding for D11853_PEA_{—}1_P9 (SEQ ID NO:591), comprising a first amino acid sequence being at least 70%, optionally at least 80%, preferably at least 85%, more preferably at least 90% and most preferably at least 95% homologous to a polypeptide having the sequence MLARAARGTGALLLRGSLLASGRAPR (SEQ ID NO:1530) corresponding to amino acids 1-26 of D11853_PEA_{—}1_P9 (SEQ ID NO:591), a second amino acid sequence being at least 90% homologous to RASSGLPRNTVVLFVPQQEAWVVERMGRFHRILEPGLNILIPVLDRIRYVQSLKEIVINVPEQSAVTLDNVT LQIDGVLYLRIMDPYKASYGVEDPEYAVTQLAQTTMRSELGKLSLDKVFRERESLNASIVDAINQAADCW GIRCLRYEIKDIHVPPRVKESMQMQVEAERRKR corresponding to amino acids 13-187 of Q9P042 (SEQ ID NO:639), which also corresponds to amino acids 27-201 of D11853_PEA_{—}1_P9 (SEQ ID NO:591), a bridging amino acid A corresponding to amino acid 202 of D11853_PEA_{—}1_P9 (SEQ ID NO:591), a third amino acid sequence being at least 90% homologous to TVLESEGTRESAINVAEGKKQAQILASEAEKAEQINQA corresponding to amino acids 189-226 of Q9P042 (SEQ ID NO:639), which also corresponds to amino acids 203-240 of D11853_PEA_{—}1_P9 (SEQ ID NO:591), a fourth amino acid sequence being at least 70%, optionally at least 80%, preferably at least 85%, more preferably at least 90% and most preferably at least 95% homologous to a polypeptide having the sequence AGQERVEAEGGARHGPLKIGAGAGSLGYFDFMGQASSVPSL (SEQ ID NO:1538) corresponding to amino acids 241-281 of D11853_PEA_{—}1_P9 (SEQ ID NO:591), and a fifth amino acid sequence being at least 90% homologous to AGEASAVLAKAKAKAEAIRILAAALTQHNGDAAASLTVAEQYVSAFSKLAKDSNTILLPSNPGDVTSMVA QAMGVYGALTKAPVPGTPDSLSSGSSRDVQGTDASLDEELDRVKMS corresponding to amino acids 227-342 of Q9P042 (SEQ ID NO:639), which also corresponds to amino acids 282-397 of D11853_PEA_{—}1_P9 (SEQ ID NO:591), wherein said first amino acid sequence, second amino acid sequence, bridging amino acid, third amino acid sequence, fourth amino acid sequence and fifth amino acid sequence are contiguous and in a sequential order.

[2085] 2. An isolated polypeptide encoding for a head of D11853_PEA_{—}1_P9 (SEQ ID NO:591), comprising a polypeptide being at least 70%, optionally at least about 80%, preferably at least about 85%, more preferably at least about 90% and most preferably at least about 95% homologous to the sequence MLARAARGTGALLLRGSLLASGRAPR (SEQ ID NO:1530) of D11853_PEA_{—}1_P9 (SEQ ID NO:591).

[2086] 3. An isolated polypeptide encoding for an edge portion of D11853_PEA_{—}1_P9 (SEQ ID NO:591) comprising an amino acid sequence being at least 70%, optionally at least about 80%, preferably at least about 85%, more preferably at least about 90% and most preferably at least about 95% homologous to the sequence encoding for AGQERVEAEGGARHGPLKIGAGAGSLGYFDFMGQASSVPSL (SEQ ID NO:1538), corresponding to D11853_PEA_{—}1_P9 (SEQ ID NO:591).

[2087] Comparison Report Between D11853_PEA_{—}1_P9 (SEQ ID NO:591) and BAC85377 (SEQ ID NO:640):

[2088] 1. An isolated chimeric polypeptide encoding for D11853_PEA_{—}1_P9 (SEQ ID NO:591), comprising a first amino acid sequence being at least 70%, optionally at least 80%, preferably at least 85%, more preferably at least 90% and most preferably at least 95% homologous to a polypeptide having the sequence MLARAARGTGALLLRGSLLASGRAPRRASSGLPRNTVVLFVPQQEAWVVERMGRFHRILEPGLNILIPVLD RIRYVQSLKEIVINVPEQSAVTLDNVTLQIDGVLYLRI corresponding to amino acids 1-109 of D11853_PEA_{—}1_P9 (SEQ ID NO:591), a second amino acid sequence being at least 90% homologous to MDPYKASYGVEDPEYAVTQLAQTTMRSELGKLSLDKVFRERESLNASIVDAINQAADCWGIRCLRYEIKD IHVPPRVKESMQMQVEAERRKRATVLESEGTRESAINVAEGKKQAQILASEAEKAEQINQA corresponding to amino acids 1-131 of BAC85377 (SEQ ID NO:640), which also corresponds to amino acids 110-240 of D11853_PEA_{—}1_P9 (SEQ ID NO:591), a third amino acid sequence being at least 70%, optionally at least 80%, preferably at least 85%, more preferably at least 90% and most preferably at least 95% homologous to a polypeptide having the sequence AGQERVEAEGGARHGPLKIGAGAGSLGYFDFMGQASSVPSL (SEQ ID NO:1538) corresponding to amino acids 241-281 of D11853_PEA_{—}1_P9 (SEQ ID NO:591), a fourth amino acid sequence being at least 90% homologous to AGEASAVLAKAKAKAEAIRILAAALTQH corresponding to amino acids 132-159 of BAC85377 (SEQ ID NO:640), which also corresponds to amino acids 282-309 of D11853_PEA_{—}1_P9 (SEQ ID NO:591), and a fifth amino acid sequence being at least 70%, optionally at least 80%, preferably at least 85%, more preferably at least 90% and most preferably at least 95% homologous to a polypeptide having the sequence NGDAAASLTVAEQYVSAFSKLAKDSNTILLPSNPGDVTSMVAQAMGVYGALTKAPVPGTPDSLSSGSSRD VQGTDASLDEELDRVKMS (SEQ ID NO:1531) corresponding to amino acids 310-397 of D11853_PEA_{—}1_P9 (SEQ ID NO:591), wherein said first amino acid sequence, second amino acid sequence, third amino acid sequence, fourth amino acid sequence and fifth amino acid sequence are contiguous and in a sequential order.

[2089] 2. An isolated polypeptide encoding for a head of D11853_PEA_{—}1_P9 (SEQ ID NO:591), comprising a polypeptide being at least 70%, optionally at least about 80%, preferably at least about 85%, more preferably at least about 90% and most preferably at least about 95% homologous to the sequence MLARAARGTGALLLRGSLLASGRAPRRASSGLPRNTVVLFVPQQEAWVVERMGRFHRILEPGLNILIPVLD RIRYVQSLKEIVINVPEQSAVTLDNVTLQIDGVLYLRI of D11853_PEA_{—}1_P9 (SEQ ID NO:591).

[2090] 3. An isolated polypeptide encoding for an edge portion of D11853_PEA_{—}1_P9 (SEQ ID NO:591), comprising an amino acid sequence being at least 70%, optionally at least about 80%, preferably at least about 85%, more preferably at least about 90% and most preferably at least about 95% homologous to the sequence encoding for AGQERVEAEGGARHGPLKIGAGAGSLGYFDFMGQASSVPSL (SEQ ID NO:1538), corresponding to D11853_PEA_{—}1_P9 (SEQ ID NO:591).

[2091] 4. An isolated polypeptide encoding for a tail of D11853_PEA_{—}1_P9 (SEQ ID NO:591), comprising a polypeptide being at least 70%, optionally at least about 80%, preferably at least about 85%, more preferably at least about 90% and most preferably at least about 95% homologous to the sequence NGDAAASLTVAEQYVSAFSKLAKDSNTILLPSNPGDVTSMVAQAMGVYGALTKAPVPGTPDSLSSGSSRD VQGTDASLDEELDRVKMS (SEQ ID NO:1531) in D11853_PEA_{—}1_P9 (SEQ ID NO:591).

[2092] Comparison Report Between D11853_PEA_{—}1_P9 (SEQ ID NO:591) and Q96FY2 (SEQ ID NO:638):

[2093] 1. An isolated chimeric polypeptide encoding for D11853_PEA_{—}1_P9 (SEQ ID NO:591), comprising a first amino acid sequence being at least 90% homologous to MLARAARGTGALLLRGSLLASGRAPRRASSGLPRNTVVLFVPQQEAWVVERMGRFHRILEPGLNILIPVLD RIRYVQSLKEIVINVPEQSAVTLDNVTLQIDGVLYLRIMDPYKASYGVEDPEYAVTQ corresponding to amino acids 1-128 of Q96FY2 (SEQ ID NO:638), which also corresponds to amino acids 1-128 of D11853_PEA_{—}1_P9 (SEQ ID NO:591), a bridging amino acid L corresponding to amino acid 129 of D11853_PEA_{—}1_P9 (SEQ ID NO:591), a second amino acid sequence being at least 90% homologous to AQTTMRSELGKLSLDKVFRERESLNASIVDAINQAADCWGIRCLRYEIKDIHVPPRVKESMQMQVEAERR KRATVLESEGTRESAINVAEGKKQAQILASEAEKAEQINQA corresponding to amino acids 130-240 of Q96FY2 (SEQ ID NO:638), which also corresponds to amino acids 130-240 of D11853_PEA_{—}1_P9 (SEQ ID NO:591), a third amino acid sequence being at least 70%, optionally at least 80%, preferably at least 85%, more preferably at least 90% and most preferably at least 95% homologous to a polypeptide having the sequence AGQERVEAEGGARHGPLKIGAGAGSLGYFDFMGQASSVPSL (SEQ ID NO:1538) corresponding to amino acids 241-281 of D11853_PEA_{—}1_P9 (SEQ ID NO:591), and a fourth amino acid sequence being at least 90% homologous to AGEASAVLAKAKAKAEAIRILAAALTQHNGDAAASLTVAEQYVSAFSKLAKDSNTILLPSNPGDVTSMVA QAMGVYGALTKAPVPGTPDSLSSGSSRDVQGTDASLDEELDRVKMS corresponding to amino acids 241-356 of Q96FY2 (SEQ ID NO:638), which also corresponds to amino acids 282-397 of D11853_PEA_{—}1_P9 (SEQ ID NO:591), wherein said first amino acid sequence, bridging amino acid, second amino acid sequence, third amino acid sequence and fourth amino acid sequence are contiguous and in a sequential order.

[2094] 2. An isolated polypeptide encoding for an edge portion of D11853_PEA_{—}1_P9 (SEQ ID NO:591) comprising an amino acid sequence being at least 70%, optionally at least about 80%, preferably at least about 85%, more preferably at least about 90% and most preferably at least about 95% homologous to the sequence encoding for AGQERVEAEGGARHGPLKIGAGAGSLGYFDFMGQASSVPSL (SEQ ID NO:1538), corresponding to D11853_PEA_{—}1_P9 (SEQ ID NO:591).

[2095] Comparison Report Between D11853_PEA_{—}1_P9 (SEQ ID NO:591) and Q9UJZ1 (SEQ ID NO:637):

[2096] 1. An isolated chimeric polypeptide encoding for D11853_PEA_{—}1_P9 (SEQ ID NO:591), comprising a first amino acid sequence being at least 90% homologous to MLARAARGTGALLLRGSLLASGRAPRRASSGLPRNTVVLFVPQQEAWVVERMGRFHRILEPGLNILIPVLD RIRYVQSLKEIVINVPEQSAVTLDNVTLQIDGVLYLRIMDPYKASYGVEDPEYAVTQLAQTTMRSELGKLS LDKVFRERESLNASIVDAINQAADCWGIRCLRYEIKDIHVPPRVKESMQMQVEAERRKRATVLESEGTRES AINVAEGKKQAQILASEAEKAEQINQA corresponding to amino acids 1-240 of Q9UJZ1 (SEQ ID NO:637), which also corresponds to amino acids 1-240 of D11853_PEA_{—}1_P9 (SEQ ID NO:591), a second amino acid sequence being at least 70%, optionally at least 80%, preferably at least 85%, more preferably at least 90% and most preferably at least 95% homologous to a polypeptide having the sequence AGQERVEAEGGARHGPLKIGAGAGSLGYFDFMGQASSVPSL (SEQ ID NO:1538) corresponding to amino acids 241-281 of D11853_PEA_{—}1_P9 (SEQ ID NO:591), and a third amino acid sequence being at least 90% homologous to AGEASAVLAKAKAKAEAIRILAAALTQHNGDAAASLTVAEQYVSAFSKLAKDSNTILLPSNPGDVTSMVA QAMGVYGALTKAPVPGTPDSLSSGSSRDVQGTDASLDEELDRVKMS corresponding to amino acids 241-356 of Q9UJZ1 (SEQ ID NO:637), which also corresponds to amino acids 282-397 of D11853_PEA_{—}1_P9 (SEQ ID NO:591), wherein said first amino acid sequence, second amino acid sequence and third amino acid sequence are contiguous and in a sequential order.

[2097] 2. An isolated polypeptide encoding for an edge portion of D11853_PEA_{—}1_P9 (SEQ ID NO:591) comprising an amino acid sequence being at least 70%, optionally at least about 80%, preferably at least about 85%, more preferably at least about 90% and most preferably at least about 95% homologous to the sequence encoding for AGQERVEAEGGARHGPLKIGAGAGSLGYFDFMGQASSVPSL (SEQ ID NO:1538), corresponding to D11853_PEA_{—}1_P9 (SEQ ID NO:591).

[2098] The location of the variant protein was determined according to results from a number of different software programs and analyses, including analyses from SignalP and other specialized programs. The variant protein is believed to be located as follows with regard to the cell: secreted. The protein localization is believed to be secreted because one of the two signal-peptide prediction programs (HMM:Signal peptide,NN:NO) predicts that this protein has a signal peptide.

[2099] Variant protein D11853_PEA_{—}1_P9 (SEQ ID NO:591) also has the following non-silent SNPs (Single Nucleotide Polymorphisms) as listed in Table 12, (given according to their position(s) on the amino acid sequence, with the alternative amino acid(s) listed; the last column indicates whether the SNP is known or not; the presence of known SNPs in variant protein D11853_PEA_{—}1_P9 (SEQ ID NO:591) sequence provides support for the deduced sequence of this variant protein according to the present invention).

TABLE 12
Amino acid mutations

| SNP position(s) on | Alternative | Previously |
|---|---|---|
| amino acid sequence | amino acid(s) | known SNP? |
| 25 | P -> | No |
| 32 | L -> | No |
| 178 | K -> | No |
| 178 | K -> R | No |
| 178 | K -> T | No |
| 185 | R -> G | No |
| 187 | K -> T | No |
| 206 | E -> K | No |
| 230 | E -> K | No |
| 230 | E -> Q | No |
| 235 | E -> | No |
| 235 | E -> D | No |
| 239 | Q -> P | No |
| 285 | A -> G | No |
| 285 | A -> | No |
| 308 | Q -> H | No |
| 319 | V -> G | No |
| 325 | S -> N | No |
| 325 | S -> T | No |
| 340 | P -> | No |
| 340 | P -> A | No |
| 367 | G -> | No |
| 370 | D -> N | No |
| 381 | Q -> | No |

[2100] Variant protein D11853_PEA_{—}1_P9 (SEQ ID NO:591) is encoded by the following transcript(s): D11853_PEA_{—}1_T13 (SEQ ID NO:63), for which the sequence(s) is/are given at the end of the application. The coding portion of transcript D11853_PEA_{—}1_T13 (SEQ ID NO:63) is shown in bold; this coding portion starts at position 108 and ends at position 1298. The transcript also has the following SNPs as listed in Table 13 (given according to their position on the nucleotide sequence, with the alternative nucleic acid listed; the last column indicates whether the SNP is known or not; the presence of known SNPs in variant protein D11853_PEA_{—}1_P9 (SEQ ID NO:591) sequence provides support for the deduced sequence of this variant protein according to the present invention).

TABLE 13
Nucleic acid SNPs

| SNP position on | Alternative | Previously |
|---|---|---|
| nucleotide sequence | nucleic acid | known SNP? |
| 180 | C -> | No |
| 182 | G -> | No |
| 185 | -> C | No |
| 201 | T -> | No |
| 640 | A -> C | No |
| 640 | A -> G | No |
| 641 | G -> | No |
| 641 | G -> A | No |
| 660 | C -> G | No |
| 667 | A -> C | No |
| 723 | G -> A | No |
| 795 | G -> A | No |
| 795 | G -> C | No |
| 812 | A -> | No |
| 812 | A -> C | No |
| 823 | A -> C | No |
| 961 | C -> | No |
| 961 | C -> G | No |
| 1031 | A -> C | No |
| 1055 | A -> C | No |
| 1063 | T -> G | No |
| 1081 | G -> A | No |
| 1081 | G -> C | No |
| 1089 | -> C | No |
| 1089 | -> T | No |
| 1096 | -> G | No |
| 1125 | C -> | No |
| 1125 | C -> G | No |
| 1156 | -> G | No |
| 1206 | G -> | No |
| 1215 | G -> A | No |
| 1235 | C -> T | No |
| 1250 | G -> | No |
| 1331 | G -> A | No |
| 1334 | A -> | No |
| 1334 | A -> C | No |
| 1380 | T -> | No |
| 1383 | T -> C | No |
| 1383 | T -> G | No |
| 1420 | T -> C | Yes |

[2101] Variant protein D11853_PEA_{—}1_P10 (SEQ ID NO:592) according to the present invention has an amino acid sequence as given at the end of the application; it is encoded by transcript(s) D11853_PEA_{—}1_T14 (SEQ ID NO:64). An alignment is given to the known protein (Membrane associated protein SLP-2 (SEQ ID NO:637)) at the end of the application. One or more alignments to one or more previously published protein sequences are given at the end of the application. A brief description of the relationship of the variant protein according to the present invention to each such aligned protein is as follows:

[2102] Comparison Report Between D11853_PEA_{—}1_P10 (SEQ ID NO:592) and Q9P042 (SEQ ID NO:639):

[2103] 1. An isolated chimeric polypeptide encoding for D11853_PEA_{—}1_P10 (SEQ ID NO:592), comprising a first amino acid sequence being at least 70%, optionally at least 80%, preferably at least 85%, more preferably at least 90% and most preferably at least 95% homologous to a polypeptide having the sequence MLARAARGTGALLLRGSLLASGRAPR (SEQ ID NO:1530) corresponding to amino acids 1-26 of D11853_PEA_{—}1_P10 (SEQ ID NO:592), a second amino acid sequence being at least 90% homologous to RASSGLPRNTVVLFVPQQEAWVVERMGRFHRILEPGLNILIPVLDRIRYVQSLKEIVINVPEQSAVTLDNVT LQIDGVLYLRIMDPYKASYGVEDPEYAVTQLAQTTMRSELGKLSLDKVFRERESLNASIVDAINQAADCW GIRCLRYEIKDIHVPPRVKESMQMQVEAERRKR corresponding to amino acids 13-187 of Q9P042 (SEQ ID NO:639), which also corresponds to amino acids 27-201 of D11853_PEA_{—}1_P10 (SEQ ID NO:592), a bridging amino acid A corresponding to amino acid 202 of D11853_PEA_{—}1_P10 (SEQ ID NO:592), a third amino acid sequence being at least 90% homologous to TVLESEGTRESAINVAEGKKQAQILASEAEKAEQINQAAGEASAVLAKAKAKAEAIRILAAALTQH corresponding to amino acids 189-254 of Q9P042 (SEQ ID NO:639), which also corresponds to amino acids 269-313 of D11853_PEA_{—}1_P10 (SEQ ID NO:592), and a fourth amino acid sequence being at least 90% homologous to AMGVYGALTKAPVPGTPDSLSSGSSRDVQGTDASLDEELDRVKMS (SEQ ID NO:1540) corresponding to amino acids 298-342 of Q9P042 (SEQ ID NO:639), which also corresponds to amino acids 269-313 of D11853_PEA_{—}1_P10 (SEQ ID NO:592), wherein said first amino acid sequence, second amino acid sequence, bridging amino acid, third amino acid sequence and fourth amino acid sequence are contiguous and in a sequential order.

[2104] 2. An isolated polypeptide encoding for a head of D11853_PEA_{—}1_P10 (SEQ ID NO:592), comprising a polypeptide being at least 70%, optionally at least about 80%, preferably at least about 85%, more preferably at least about 90% and most preferably at least about 95% homologous to the sequence MLARAARGTGALLLRGSLLASGRAPR (SEQ ID NO:1530) of D11853_PEA_{—}1_P10 (SEQ ID NO:592).

[2105] 3. An isolated chimeric polypeptide encoding for an edge portion of D11853_PEA_{—}1_P10 (SEQ ID NO:592) comprising a polypeptide having a length “n”, wherein n is at least about 10 amino acids in length, optionally at least about 20 amino acids in length, preferably at least about 30 amino acids in length, more preferably at least about 40 amino acids in length and most preferably at least about 50 amino acids in length, wherein at least two amino acids comprise HA, having a structure as follows: a sequence starting from any of amino acid numbers 268−x to 268; and ending at any of amino acid numbers 269+((n−2)−x), in which x varies from 0 to n−2.

[2106] Comparison Report Between D11853_PEA_{—}1_P10 (SEQ ID NO:592) and BAC85377 (SEQ ID NO:640):

[2107] 1. An isolated chimeric polypeptide encoding for D11853_PEA_{—}1_P10 (SEQ ID NO:592), comprising a first amino acid sequence being at least 70%, optionally at least 80%, preferably at least 85%, more preferably at least 90% and most preferably at least 95% homologous to a polypeptide having the sequence MLARAARGTGALLLRGSLLASGRAPRRASSGLPRNTVVLFVPQQEAWVVERMGRFHRILEPGLNILIPVLD RIRYVQSLKEIVINVPEQSAVTLDNVTLQIDGVLYLRI corresponding to amino acids 1-109 of D11853_PEA_{—}1_P10 (SEQ ID NO:592), a second amino acid sequence being at least 90% homologous to MDPYKASYGVEDPEYAVTQLAQTTMRSELGKLSLDKVFRERESLNASIVDAINQAADCWGIRCLRYEIKD IHVPPRVKESMQMQVEAERRKRATVLESEGTRESAINVAEGKKQAQILASEAEKAEQINQAAGEASAVLA KAKAKAEAIRILAAALTQH corresponding to amino acids 1-159 of BAC85377 (SEQ ID NO:640), which also corresponds to amino acids 110-268 of D11853_PEA_{—}1_P10 (SEQ ID NO:592), and a third amino acid sequence being at least 70%, optionally at least 80%, preferably at least 85%, more preferably at least 90% and most preferably at least 95% homologous to a polypeptide having the sequence AMGVYGALTKAPVPGTPDSLSSGSSRDVQGTDASLDEELDRVKMS (SEQ ID NO:1540) corresponding to amino acids 269-313 of D11853_PEA_{—}1_P10 (SEQ ID NO:592), wherein said first amino acid sequence, second amino acid sequence and third amino acid sequence are contiguous and in a sequential order.

[2108] 2. An isolated polypeptide encoding for a head of D11853_PEA_{—}1_P10 (SEQ ID NO:592), comprising a polypeptide being at least 70%, optionally at least about 80%, preferably at least about 85%, more preferably at least about 90% and most preferably at least about 95% homologous to the sequence MLARAARGTGALLLRGSLLASGRAPRRASSGLPRNTVVLFVPQQEAWVVERMGRFHRILEPGLNILIPVLD RIRYVQSLKEWINVPEQSAVTLDNVTLQIDGVLYLRI of D11853_PEA_{—}1_P10 (SEQ ID NO:592).

[2109] 3. An isolated polypeptide encoding for a tail of D11853_PEA_{—}1_P10 (SEQ ID NO:592), comprising a polypeptide being at least 70%, optionally at least about 80%, preferably at least about 85%, more preferably at least about 90% and most preferably at least about 95% homologous to the sequence AMGVYGALTKAPVPGTPDSLSSGSSRDVQGTDASLDEELDRVKMS (SEQ ID NO:1540) in D11853_PEA_{—}1_P10 (SEQ ID NO:592).

[2110] Comparison Report Between D11853_PEA_{—}1_P10 (SEQ ID NO:592) and Q96FY2 (SEQ ID NO:638):

[2111] 1. An isolated chimeric polypeptide encoding for D11853_PEA_{—}1_P10 (SEQ ID NO:592), comprising a first amino acid sequence being at least 90% homologous to MLARAARGTGALLLRGSLLASGRAPRRASSGLPRNTVVLFVPQQEAWVVERMGRFHRILEPGLNILIPVLD RIRYVQSLKEIVINVPEQSAVTLDNVTLQIDGVLYLRIMDPYKASYGVEDPEYAVTQ corresponding to amino acids 1-128 of Q96FY2 (SEQ ID NO:638), which also corresponds to amino acids 1-128 of D11853_PEA_{—}1_P10 (SEQ ID NO:592), a bridging amino acid L corresponding to amino acid 129 of D11853_PEA_{—}1_P10 (SEQ ID NO:592), a second amino acid sequence being at least 90% homologous to AQTTMRSELGKLSLDKVFRERESLNASIVDAINQAADCWGIRCLRYEIKDIHVPPRVKESMQMQVEAERR KRATVLESEGTRESAINVAEGKKQAQILASEAEKAEQINQAAGEASAVLAKAKAKAEAIRILAAALTQH corresponding to amino acids 130-268 of Q96FY2 (SEQ ID NO:638), which also corresponds to amino acids 130-268 of D11853_PEA_{—}1_P10 (SEQ ID NO:592), and a third amino acid sequence being at least 90% homologous to AMGVYGALTKAPVPGTPDSLSSGSSRDVQGTDASLDEELDRVKMS (SEQ ID NO:1540) corresponding to amino acids 312-356 of Q96FY2 (SEQ ID NO:638), which also corresponds to amino acids 269-313 of D11853_PEA_{—}1_P10 (SEQ ID NO:592), wherein said first amino acid sequence, bridging amino acid, second amino acid sequence and third amino acid sequence are contiguous and in a sequential order.

[2112] 2. An isolated chimeric polypeptide encoding for an edge portion of D11853_PEA_{—}1_P10 (SEQ ID NO:592) comprising a polypeptide having a length “n”, wherein n is at least about 10 amino acids in length, optionally at least about 20 amino acids in length, preferably at least about 30 amino acids in length, more preferably at least about 40 amino acids in length and most preferably at least about 50 amino acids in length, wherein at least two amino acids comprise HA, having a structure as follows: a sequence starting from any of amino acid numbers 268−x to 268; and ending at any of amino acid numbers 269+((n−2)−x), in which x varies from 0 to n−2.

[2113] Comparison Report Between D11853_PEA_{—}1_P10 (SEQ ID NO:592) and Q9UJZ1 (SEQ ID NO:637):

[2114] 1. An isolated chimeric polypeptide encoding for D11853_PEA_{—}1_P10 (SEQ ID NO:592), comprising a first amino acid sequence being at least 90% homologous to MLARAARGTGALLLRGSLLASGRAPRRASSGLPRNTVVLFVPQQEAWVVERMGRFHRILEPGLNILIPVLD RIRYVQSLKEIVINVPEQSAVTLDNVTLQIDGVLYLRIMDPYKASYGVEDPEYAVTQLAQTTMRSELGKLS LDKVFRERESLNASIVDAINQAADCWGIRCLRYEIKDIHVPPRVKESMQMQVEAERRKRATVLESEGTRES AINVAEGKKQAQILASEAEKAEQINQAAGEASAVLAKAKAKAEAIRILAAALTQH corresponding to amino acids 1-268 of Q9UJZ1 (SEQ ID NO:637), which also corresponds to amino acids 1-268 of D11853_PEA_{—}1_P10 (SEQ ID NO:592), and a second amino acid sequence being at least 90% homologous to AMGVYGALTKAPVPGTPDSLSSGSSRDVQGTDASLDEELDRVKMS (SEQ ID NO:1540) corresponding to amino acids 312-356 of Q9UJZ1 (SEQ ID NO:637), which also corresponds to amino acids 269-313 of D11853_PEA_{—}1_P10 (SEQ ID NO:592), wherein said first amino acid sequence and second amino acid sequence are contiguous and in a sequential order.

[2115] 2. An isolated chimeric polypeptide encoding for an edge portion of D11853_PEA_{—}1_P10 (SEQ ID NO:592) comprising a polypeptide having a length “n”, wherein n is at least about 10 amino acids in length, optionally at least about 20 amino acids in length, preferably at least about 30 amino acids in length, more preferably at least about 40 amino acids in length and most preferably at least about 50 amino acids in length, wherein at least two amino acids comprise HA, having a structure as follows: a sequence starting from any of amino acid numbers 268−x to 268; and ending at any of amino acid numbers 269+((n−2)−x), in which x varies from 0 to n−2.

[2116] The location of the variant protein was determined according to results from a number of different software programs and analyses, including analyses from SignalP and other specialized programs. The variant protein is believed to be located as follows with regard to the cell: secreted. The protein localization is believed to be secreted because one of the two signal-peptide prediction programs (HMM:Signal peptide,NN:NO) predicts that this protein has a signal peptide.

[2117] Variant protein D11853_PEA_{—}1_P10 (SEQ ID NO:592) also has the following non-silent SNPs (Single Nucleotide Polymorphisms) as listed in Table 14, (given according to their position(s) on the amino acid sequence, with the alternative amino acid(s) listed; the last column indicates whether the SNP is known or not; the presence of known SNPs in variant protein D11853_PEA_{—}1_P10 (SEQ ID NO:592) sequence provides support for the deduced sequence of this variant protein according to the present invention).

TABLE 14
Amino acid mutations

| SNP position(s) on | Alternative | Previously |
|---|---|---|
| amino acid sequence | amino acid(s) | known SNP? |
| 25 | P -> | No |
| 32 | L -> | No |
| 178 | K -> | No |
| 178 | K -> R | No |
| 178 | K -> T | No |
| 185 | R -> G | No |
| 187 | K -> T | No |
| 206 | E -> K | No |
| 230 | E -> K | No |
| 230 | E -> Q | No |
| 235 | E -> | No |
| 235 | E -> D | No |
| 239 | Q -> P | No |
| 244 | A -> | No |
| 244 | A -> G | No |
| 267 | Q -> H | No |
| 283 | G -> | No |
| 286 | D -> N | No |
| 297 | Q -> | No |

[2118] Variant protein D11853_PEA_{—}1_P10 (SEQ ID NO:592) is encoded by the following transcript(s): D11853_PEA_{—}1_T14 (SEQ ID NO:64), for which the sequence(s) is/are given at the end of the application. The coding portion of transcript D11853_PEA_{—}1_T14 (SEQ ID NO:64) is shown in bold; this coding portion starts at position 108 and ends at position 1046. The transcript also has the following SNPs as listed in Table 15 (given according to their position on the nucleotide sequence, with the alternative nucleic acid listed; the last column indicates whether the SNP is known or not; the presence of known SNPs in variant protein D11853_PEA_{—}1_P10 (SEQ ID NO:592) sequence provides support for the deduced sequence of this variant protein according to the present invention).

TABLE 15
Nucleic acid SNPs

| SNP position on | Alternative | Previously |
|---|---|---|
| nucleotide sequence | nucleic acid | known SNP? |
| 180 | C -> | No |
| 182 | G -> | No |
| 185 | -> C | No |
| 201 | T -> | No |
| 640 | A -> C | No |
| 640 | A -> G | No |
| 641 | G -> | No |
| 641 | G -> A | No |
| 660 | C -> G | No |
| 667 | A -> C | No |
| 723 | G -> A | No |
| 795 | G -> A | No |
| 795 | G -> C | No |
| 812 | A -> | No |
| 812 | A -> C | No |
| 823 | A -> C | No |
| 838 | C -> | No |
| 838 | C -> G | No |
| 908 | A -> C | No |
| 954 | G -> | No |
| 963 | G -> A | No |
| 983 | C -> T | No |
| 998 | G -> | No |
| 1079 | G -> A | No |
| 1082 | A -> | No |
| 1082 | A -> C | No |
| 1128 | T -> | No |
| 1131 | T -> C | No |
| 1131 | T -> G | No |
| 1168 | T -> C | Yes |

[2119] Variant protein D11853_PEA_{—}1_P11 (SEQ ID NO:593) according to the present invention has an amino acid sequence as given at the end of the application; it is encoded by transcript(s) D11853_PEA_{—}1_T15 (SEQ ID NO:65). An alignment is given to the known protein (Membrane associated protein SLP-2 (SEQ ID NO:637)) at the end of the application. One or more alignments to one or more previously published protein sequences are given at the end of the application. A brief description of the relationship of the variant protein according to the present invention to each such aligned protein is as follows:

[2120] Comparison Report Between D11853_PEA_{—}1_P11 (SEQ ID NO:593) and Q9P042 (SEQ ID NO:639):

[2121] 1. An isolated chimeric polypeptide encoding for D11853_PEA_{—}1_P11 (SEQ ID NO:593), comprising a first amino acid sequence being at least 70%, optionally at least 80%, preferably at least 85%, more preferably at least 90% and most preferably at least 95% homologous to a polypeptide having the sequence MLARAARGTGALLLRGSLLASGRAPR (SEQ ID NO:1530) corresponding to amino acids 1-26 of D11853_PEA_{—}1_P11 (SEQ ID NO:593), a second amino acid sequence being at least 90% homologous to RASSGLPRNTVVLFVPQQEAWVVERMGRFHRILEPGLNILIPVLDRIRYVQSLKEIVINVPEQSAVTLDNVT LQIDGVLYLRIMDPYKASYGVEDPEYAVTQLAQTTMRSELGKLSLDKVFRERESLNASIVDAINQAADCW GIRCLRYEIKDIHVPPRVKESMQMQVEAERRKR corresponding to amino acids 13-187 of Q9P042 (SEQ ID NO:639), which also corresponds to amino acids 27-201 of D11853_PEA_{—}1_P11 (SEQ ID NO:593), a bridging amino acid A corresponding to amino acid 202 of D11853_PEA_{—}1_P11 (SEQ ID NO:593), a third amino acid sequence being at least 90% homologous to TVLESEGTRESAINVAEGKKQAQILASEAEKAEQINQA corresponding to amino acids 189-226 of Q9P042 (SEQ ID NO:639), which also corresponds to amino acids 203-240 of D11853_PEA_{—}1_P11 (SEQ ID NO:593), a fourth amino acid sequence being at least 70%, optionally at least 80%, preferably at least 85%, more preferably at least 90% and most preferably at least 95% homologous to a polypeptide having the sequence AGQERVEAEGGARHGPLKIGAGAGSLGYFDFMGQASSVPSL (SEQ ID NO:1538) corresponding to amino acids 241-281 of D11853_PEA_{—}1_P11 (SEQ ID NO:593), a fifth amino acid sequence being at least 90% homologous to AGEASAVLAKAKAKAEAIRILAAALTQH corresponding to amino acids 227-254 of Q9P042 (SEQ ID NO:639), which also corresponds to amino acids 282-309 of D11853_PEA_{—}1_P11 (SEQ ID NO:593), and a sixth amino acid sequence being at least 70%, optionally at least 80%, preferably at least 85%, more preferably at least 90% and most preferably at least 95% homologous to a polypeptide having the sequence VRGPWVGMGTGIDSGRGSLIYA (SEQ ID NO:1535) corresponding to amino acids 310-331 of D11853_PEA_{—}1_P11 (SEQ ID NO:593), wherein said first amino acid sequence, second amino acid sequence, bridging amino acid, third amino acid sequence, fourth amino acid sequence, fifth amino acid sequence and sixth amino acid sequence are contiguous and in a sequential order.

[2122] 2. An isolated polypeptide encoding for a head of D11853_PEA_{—}1_P11 (SEQ ID NO:593), comprising a polypeptide being at least 70%, optionally at least about 80%, preferably at least about 85%, more preferably at least about 90% and most preferably at least about 95% homologous to the sequence MLARAARGTGALLLRGSLLASGRAPR (SEQ ID NO:1530) of D11853_PEA_{—}1_P11 (SEQ ID NO:593).

[2123] 3. An isolated polypeptide encoding for an edge portion of D11853_PEA_{—}1_P11 (SEQ ID NO:593) comprising an amino acid sequence being at least 70%, optionally at least about 80%, preferably at least about 85%, more preferably at least about 90% and most preferably at least about 95% homologous to the sequence encoding for AGQERVEAEGGARHGPLKIGAGAGSLGYFDFMGQASSVPSL (SEQ ID NO:1538), corresponding to D11853_PEA_{—}1_P11 (SEQ ID NO:593).

[2124] 4. An isolated polypeptide encoding for a tail of D11853_PEA_{—}1_P11 (SEQ ID NO:593), comprising a polypeptide being at least 70%, optionally at least about 80%, preferably at least about 85%, more preferably at least about 90% and most preferably at least about 95% homologous to the sequence VRGPWVGMGTGIDSGRGSLIYA (SEQ ID NO:1535) in D11853_PEA_{—}1_P11 (SEQ ID NO:593).

[2125] Comparison Report Between D11853_PEA_{—}1_P11 (SEQ ID NO:593) and BAC85377 (SEQ ID NO:640):

[2126] 1. An isolated chimeric polypeptide encoding for D11853_PEA_{—}1_P11 (SEQ ID NO:593), comprising a first amino acid sequence being at least 70%, optionally at least 80%, preferably at least 85%, more preferably at least 90% and most preferably at least 95% homologous to a polypeptide having the sequence MLARAARGTGALLLRGSLLASGRAPRRASSGLPRNTVVLFVPQQEAWVVERMGRFHRILEPGLNILIPVLD RIRYVQSLKEIVINVPEQSAVTLDNVTLQIDGVLYLRI corresponding to amino acids 1-109 of D11853_PEA_{—}1_P11 (SEQ ID NO:593), a second amino acid sequence being at least 90% homologous to MDPYKASYGVEDPEYAVTQLAQTTMRSELGKLSLDKVFRERESLNASIVDAINQAADCWGIRCLRYEIKD IHVPPRVKESMQMQVEAERRKRATVLESEGTRESAINVAEGKKQAQILASEAEKAEQINQA corresponding to amino acids 1-131 of BAC85377 (SEQ ID NO:640), which also corresponds to amino acids 110-240 of D11853_PEA_{—}1_P11 (SEQ ID NO:593), a third amino acid sequence being at least 70%, optionally at least 80%, preferably at least 85%, more preferably at least 90% and most preferably at least 95% homologous to a polypeptide having the sequence AGQERVEAEGGARHGPLKIGAGAGSLGYFDFMGQASSVPSL (SEQ ID NO:1538) corresponding to amino acids 241-281 of D11853_PEA_{—}1_P11 (SEQ ID NO:593), and a fourth amino acid sequence being at least 90% homologous to AGEASAVLAKAKAKAEAIRILAAALTQHVRGPWVGMGTGIDSGRGSLIYA corresponding to amino acids 132-181 of BAC85377 (SEQ ID NO:640), which also corresponds to amino acids 282-331 of D11853_PEA_{—}1_P11 (SEQ ID NO:593), wherein said first amino acid sequence, second amino acid sequence, third amino acid sequence and fourth amino acid sequence are contiguous and in a sequential order.

[2127] 2. An isolated polypeptide encoding for a head of D11853_PEA_{—}1_P11 (SEQ ID NO:593), comprising a polypeptide being at least 70%, optionally at least about 80%, preferably at least about 85%, more preferably at least about 90% and most preferably at least about 95% homologous to the sequence MLARAARGTGALLLRGSLLASGRAPRRASSGLPRNTVVLFVPQQEAWVVERMGRFHRILEPGLNILIPVLD RIRYVQSLKEIVINVPEQSAVTLDNVTLQIDGVLYLRI of D11853_PEA_{—}1_P11 (SEQ ID NO:593).

[2128] 3. An isolated polypeptide encoding for an edge portion of D11853_PEA_{—}1_P11 (SEQ ID NO:593) comprising an amino acid sequence being at least 70%, optionally at least about 80%, preferably at least about 85%, more preferably at least about 90% and most preferably at least about 95% homologous to the sequence encoding for AGQERVEAEGGARHGPLKIGAGAGSLGYFDFMGQASSVPSL (SEQ ID NO:1538), corresponding to D11853_PEA_{—}1_P11 (SEQ ID NO:593).

[2129] Comparison Report Between D11853_PEA_{—}1_P11 (SEQ ID NO:593) and Q96FY2 (SEQ ID NO:638):

[2130] 1. An isolated chimeric polypeptide encoding for D11853_PEA_{—}1_P11 (SEQ ID NO:593), comprising a first amino acid sequence being at least 90% homologous to MLARAARGTGALLLRGSLLASGRAPRRASSGLPRNTVVLFVPQQEAWVVERMGRFHRILEPGLNILIPVLD RIRYVQSLKEIVINVPEQSAVTLDNVTLQIDGVLYLRIMDPYKASYGVEDPEYAVTQ corresponding to amino acids 1-128 of Q96FY2 (SEQ ID NO:638), which also corresponds to amino acids 1-128 of D11853_PEA_{—}1_P11 (SEQ ID NO:593), a bridging amino acid L corresponding to amino acid 129 of D11853_PEA_{—}1_P11 (SEQ ID NO:593), a second amino acid sequence being at least 90% homologous to AQTTMRSELGKLSLDKVFRERESLNASIVDAINQAADCWGIRCLRYEIKDIHVPPRVKESMQMQVEAERR KRATVLESEGTRESAINVAEGKKQAQILASEAEKAEQINQA corresponding to amino acids 130-240 of Q96FY2 (SEQ ID NO:638), which also corresponds to amino acids 130-240 of D11853_PEA_{—}1_P11 (SEQ ID NO:593), a third amino acid sequence being at least 70%, optionally at least 80%, preferably at least 85%, more preferably at least 90% and most preferably at least 95% homologous to a polypeptide having the sequence AGQERVEAEGGARHGPLKIGAGAGSLGYFDFMGQASSVPSL (SEQ ID NO:1538) corresponding to amino acids 241-281 of D11853_PEA_{—}1_P11 (SEQ ID NO:593), a fourth amino acid sequence being at least 90% homologous to AGEASAVLAKAKAKAEAIRILAAALTQH corresponding to amino acids 241-268 of Q96FY2 (SEQ ID NO:638), which also corresponds to amino acids 282-309 of D11853_PEA_{—}1_P11 (SEQ ID NO:593), and a fifth amino acid sequence being at least 70%, optionally at least 80%, preferably at least 85%, more preferably at least 90% and most preferably at least 95% homologous to a polypeptide having the sequence VRGPWVGMGTGIDSGRGSLIYA (SEQ ID NO:1535) corresponding to amino acids 310-331 of D11853_PEA_{—}1_P11 (SEQ ID NO:593), wherein said first amino acid sequence, bridging amino acid, second amino acid sequence, third amino acid sequence, fourth amino acid sequence and fifth amino acid sequence are contiguous and in a sequential order.

[2131] 2. An isolated polypeptide encoding for an edge portion of D11853_PEA_{—}1_P11 (SEQ ID NO:593), comprising an amino acid sequence being at least 70%, optionally at least about 80%, preferably at least about 85%, more preferably at least about 90% and most preferably at least about 95% homologous to the sequence encoding for AGQERVEAEGGARHGPLKIGAGAGSLGYFDFMGQASSVPSL (SEQ ID NO:1538), corresponding to D11853_PEA_{—}1_P11 (SEQ ID NO:593).

[2132] 3. An isolated polypeptide encoding for a tail of D11853_PEA_{—}1_P11 (SEQ ID NO:593), comprising a polypeptide being at least 70%, optionally at least about 80%, preferably at least about 85%, more preferably at least about 90% and most preferably at least about 95% homologous to the sequence VRGPWVGMGTGIDSGRGSLIYA (SEQ ID NO:1535) in D11853_PEA_{—}1_P11 (SEQ ID NO:593).

[2133] Comparison Report Between D11853_PEA_{—}1_P11 (SEQ ID NO:593) and Q9UJZ1 (SEQ ID NO:637):

[2134] 1. An isolated chimeric polypeptide encoding for D11853_PEA_{—}1_P11 (SEQ ID NO:593), comprising a first amino acid sequence being at least 90% homologous to MLARAARGTGALLLRGSLLASGRAPRRASSGLPRNTVVLFVPQQEAWVVERMGRFHRILEPGLNILIPVLD RIRYVQSLKEIVINVPEQSAVTLDNVTLQIDGVLYLRIMDPYKASYGVEDPEYAVTQLAQTTMRSELGKLS LDKVFRERESLNASIVDAINQAADCWGIRCLRYEIKDIHVPPRVKESMQMQVEAERRKRATVLESEGTRES AINVAEGKKQAQILASEAEKAEQINQA corresponding to amino acids 1-240 of Q9UJZ1 (SEQ ID NO:637), which also corresponds to amino acids 1-240 of D11853_PEA_{—}1_P11 (SEQ ID NO:593), a second amino acid sequence being at least 70%, optionally at least 80%, preferably at least 85%, more preferably at least 90% and most preferably at least 95% homologous to a polypeptide having the sequence AGQERVEAEGGARHGPLKIGAGAGSLGYFDFMGQASSVPSL (SEQ ID NO:1538) corresponding to amino acids 241-281 of D11853_PEA_{—}1_P11 (SEQ ID NO:593), a third amino acid sequence being at least 90% homologous to AGEASAVLAKAKAKAEAIRILAAALTQH corresponding to amino acids 241-268 of Q9UJZ1 (SEQ ID NO:637), which also corresponds to amino acids 282-309 of D11853_PEA_{—}1_P11 (SEQ ID NO:593), and a fourth amino acid sequence being at least 70%, optionally at least 80%, preferably at least 85%, more preferably at least 90% and most preferably at least 95% homologous to a polypeptide having the sequence VRGPWVGMGTGIDSGRGSLIYA (SEQ ID NO:1535) corresponding to amino acids 310-331 of D11853_PEA_{—}1_P11 (SEQ ID NO:593), wherein said first amino acid sequence, second amino acid sequence, third amino acid sequence and fourth amino acid sequence are contiguous and in a sequential order.

[2135] 2. An isolated polypeptide encoding for an edge portion of D11853_PEA_{—}1_P11 (SEQ ID NO:593) comprising an amino acid sequence being at least 70%, optionally at least about 80%, preferably at least about 85%, more preferably at least about 90% and most preferably at least about 95% homologous to the sequence encoding for AGQERVEAEGGARHGPLKIGAGAGSLGYFDFMGQASSVPSL (SEQ ID NO:1538), corresponding to D11853_PEA_{—}1_P11 (SEQ ID NO:593).

[2136] 3. An isolated polypeptide encoding for a tail of D11853_PEA_{—}1_P11 (SEQ ID NO:593), comprising a polypeptide being at least 70%, optionally at least about 80%, preferably at least about 85%, more preferably at least about 90% and most preferably at least about 95% homologous to the sequence VRGPWVGMGTGIDSGRGSLIYA (SEQ ID NO:1535) in D11853_PEA_{—}1_P11 (SEQ ID NO:593).

[2137] The location of the variant protein was determined according to results from a number of different software programs and analyses, including analyses from SignalP and other specialized programs. The variant protein is believed to be located as follows with regard to the cell: secreted. The protein localization is believed to be secreted because one of the two signal-peptide prediction programs (HMM:Signal peptide,NN:NO) predicts that this protein has a signal peptide.

[2138] Variant protein D11853_PEA_{—}1_P11 (SEQ ID NO:593) also has the following non-silent SNPs (Single Nucleotide Polymorphisms) as listed in Table 16, (given according to their position(s) on the amino acid sequence, with the alternative amino acid(s) listed; the last column indicates whether the SNP is known or not; the presence of known SNPs in variant protein D11853_PEA_{—}1_P11 (SEQ ID NO:593) sequence provides support for the deduced sequence of this variant protein according to the present invention).

TABLE 16
Amino acid mutations

| SNP position(s) on | Alternative | Previously |
|---|---|---|
| amino acid sequence | amino acid(s) | known SNP? |
| 25 | P -> | No |
| 32 | L -> | No |
| 178 | K -> | No |
| 178 | K -> R | No |
| 178 | K -> T | No |
| 185 | R -> G | No |
| 187 | K -> T | No |
| 206 | E -> K | No |
| 230 | E -> K | No |
| 230 | E -> Q | No |
| 235 | E -> | No |
| 235 | E -> D | No |
| 239 | Q -> P | No |
| 285 | A -> | No |
| 285 | A -> G | No |
| 308 | Q -> H | No |

[2139] Variant protein D11853_PEA_{—}1_P11 (SEQ ID NO:593) is encoded by the following transcript(s): D11853_PEA_{—}1_T15 (SEQ ID NO:65), for which the sequence(s) is/are given at the end of the application. The coding portion of transcript D11853_PEA_{—}1_T15 (SEQ ID NO:65) is shown in bold; this coding portion starts at position 108 and ends at position 1100. The transcript also has the following SNPs as listed in Table 17 (given according to their position on the nucleotide sequence, with the alternative nucleic acid listed; the last column indicates whether the SNP is known or not; the presence of known SNPs in variant protein D11853_PEA_{—}1_P11 (SEQ ID NO:593) sequence provides support for the deduced sequence of this variant protein according to the present invention).

TABLE 17
Nucleic acid SNPs

| SNP position on | Alternative | Previously |
|---|---|---|
| nucleotide seqence | nucleic acid | known SNP? |
| 180 | C -> | No |
| 182 | G -> | No |
| 185 | -> C | No |
| 201 | T -> | No |
| 640 | A -> C | No |
| 640 | A -> G | No |
| 641 | G -> | No |
| 641 | G -> A | No |
| 660 | C -> G | No |
| 667 | A -> C | No |
| 723 | G -> A | No |
| 795 | G -> A | No |
| 795 | G -> C | No |
| 812 | A -> | No |
| 812 | A -> C | No |
| 823 | A -> C | No |
| 961 | C -> | No |
| 961 | C -> G | No |
| 1031 | A -> C | No |
| 1260 | A -> C | No |
| 1268 | T -> G | No |
| 1286 | G -> A | No |
| 1286 | G -> C | No |
| 1294 | -> C | No |
| 1294 | -> T | No |
| 1301 | -> G | No |
| 1330 | C -> | No |
| 1330 | C -> G | No |
| 1361 | -> G | No |
| 1411 | G -> | No |
| 1420 | G -> A | No |
| 1440 | C -> T | No |
| 1455 | G -> | No |
| 1536 | G -> A | No |
| 1539 | A -> | No |
| 1539 | A -> C | No |
| 1585 | T -> | No |
| 1588 | T -> C | No |
| 1588 | T -> G | No |
| 1625 | T -> C | Yes |

[2140] Variant protein D11853_PEA_{—}1_P12 (SEQ ID NO:594) according to the present invention has an amino acid sequence as given at the end of the application; it is encoded by transcript(s) D11853_PEA_{—}1_T16 (SEQ ID NO:66). An alignment is given to the known protein (Membrane associated protein SLP-2 (SEQ ID NO:637)) at the end of the application. One or more alignments to one or more previously published protein sequences are given at the end of the application. A brief description of the relationship of the variant protein according to the present invention to each such aligned protein is as follows:

[2141] Comparison Report Between D11853_PEA_{—}1_P12 (SEQ ID NO:594) and Q9P042 (SEQ ID NO:639):

[2142] 1. An isolated chimeric polypeptide encoding for D11853_PEA_{—}1_P12 (SEQ ID NO:594), comprising a first amino acid sequence being at least 70%, optionally at least 80%, preferably at least 85%, more preferably at least 90% and most preferably at least 95% homologous to a polypeptide having the sequence MLARAARGTGALLLRGSLLASGRAPR (SEQ ID NO:1530) corresponding to amino acids 1-26 of D11853_PEA_{—}1_P12 (SEQ ID NO:594), a second amino acid sequence being at least 90% homologous to RASSGLPRNTVVLFVPQQEAWVVERMGRFHRILEPGLNILIPVLDRIRYVQSLKEIVINVPEQSAVTLDNVT LQIDGVLYLRIMDPYKASYGVEDPEYAVTQLAQTTMRSELGKLSLDKVFR corresponding to amino acids 13-134 of Q9P042 (SEQ ID NO:639), which also corresponds to amino acids 27-148 of D11853_PEA_{—}1_P12 (SEQ ID NO:594), and a third amino acid sequence being at least 70%, optionally at least 80%, preferably at least 85%, more preferably at least 90% and most preferably at least 95% homologous to a polypeptide having the sequence VSRSEPELGFEDTNLTLLIFSEGQDQSQALLSVGP (SEQ ID NO:1545) corresponding to amino acids 149-183 of D11853_PEA_{—}1_P12 (SEQ ID NO:594), wherein said first amino acid sequence, second amino acid sequence and third amino acid sequence are contiguous and in a sequential order.

[2143] 2. An isolated polypeptide encoding for a head of D11853_PEA_{—}1_P12 (SEQ ID NO:594), comprising a polypeptide being at least 70%, optionally at least about 80%, preferably at least about 85%, more preferably at least about 90% and most preferably at least about 95% homologous to the sequence MLARAARGTGALLLRGSLLASGRAPR (SEQ ID NO:1530) of D11853_PEA_{—}1_P12 (SEQ ID NO:594).

[2144] 3. An isolated polypeptide encoding for a tail of D11853_PEA_{—}1_P12 (SEQ ID NO:594), comprising a polypeptide being at least 70%, optionally at least about 80%, preferably at least about 85%, more preferably at least about 90% and most preferably at least about 95% homologous to the sequence VSRSEPELGFEDTNLTLLIFSEGQDQSQALLSVGP (SEQ ID NO:1545) in D11853_PEA_{—}1_P12 (SEQ ID NO:594).

[2145] Comparison Report Between D11853_PEA_{—}1_P12 (SEQ ID NO:594) and Q96FY2 (SEQ ID NO:638):

[2146] 1. An isolated chimeric polypeptide encoding for D11853_PEA_{—}1_P12 (SEQ ID NO:594), comprising a first amino acid sequence being at least 90% homologous to MLARAARGTGALLLRGSLLASGRAPRRASSGLPRNTVVLFVPQQEAWVVERMGRFHRILEPGLNILIPVLD RIRYVQSLKEIVINVPEQSAVTLDNVTLQIDGVLYLRIMDPYKASYGVEDPEYAVTQ corresponding to amino acids 1-128 of Q96FY2 (SEQ ID NO:638), which also corresponds to amino acids 1-128 of D11853_PEA_{—}1_P12 (SEQ ID NO:594), a bridging amino acid L corresponding to amino acid 129 of D11853_PEA_{—}1_P12 (SEQ ID NO:594), a second amino acid sequence being at least 90% homologous to AQTTMRSELGKLSLDKVFR corresponding to amino acids 130-148 of Q96FY2 (SEQ ID NO:638), which also corresponds to amino acids 130-148 of D11853_PEA_{—}1_P12 (SEQ ID NO:594), and a third amino acid sequence being at least 70%, optionally at least 80%, preferably at least 85%, more preferably at least 90% and most preferably at least 95% homologous to a polypeptide having the sequence VSRSEPELGFEDTNLTLLIFSEGQDQSQALLSVGP (SEQ ID NO:1545) corresponding to amino acids 149-183 of D11853_PEA_{—}1_P12 (SEQ ID NO:594), wherein said first amino acid sequence, bridging amino acid, second amino acid sequence and third amino acid sequence are contiguous and in a sequential order.

[2147] 2. An isolated polypeptide encoding for a tail of D11853_PEA_{—}1_P12 (SEQ ID NO:594), comprising a polypeptide being at least 70%, optionally at least about 80%, preferably at least about 85%, more preferably at least about 90% and most preferably at least about 95% homologous to the sequence VSRSEPELGFEDTNLTLLIFSEGQDQSQALLSVGP (SEQ ID NO:1545) in D11853_PEA_{—}1_P12 (SEQ ID NO:594).

[2148] Comparison Report Between D11853_PEA_{—}1_P12 (SEQ ID NO:594) and Q9UJZ1 (SEQ ID NO:637):

[2149] 1. An isolated chimeric polypeptide encoding for D11853_PEA_{—}1_P12 (SEQ ID NO:594), comprising a first amino acid sequence being at least 90% homologous to MLARAARGTGALLLRGSLLASGRAPRRASSGLPRNTVVLFVPQQEAWVVERMGRFHRILEPGLNILIPVLD RIRYVQSLKEIVINVPEQSAVTLDNVTLQIDGVLYLRIMDPYKASYGVEDPEYAVTQLAQTTMRSELGKLS LDKVFR corresponding to amino acids 1-148 of Q9UJZ1 (SEQ ID NO:637), which also corresponds to amino acids 1-148 of D11853_PEA_{—}1_P12 (SEQ ID NO:594), and a second amino acid sequence being at least 70%, optionally at least 80%, preferably at least 85%, more preferably at least 90% and most preferably at least 95% homologous to a polypeptide having the sequence VSRSEPELGFEDTNLTLLIFSEGQDQSQALLSVGP (SEQ ID NO:1545) corresponding to amino acids 149-183 of D11853_PEA_{—}1_P12 (SEQ ID NO:594), wherein said first amino acid sequence and second amino acid sequence are contiguous and in a sequential order.

[2150] 2. An isolated polypeptide encoding for a tail of D11853_PEA_{—}1_P12 (SEQ ID NO:594), comprising a polypeptide being at least 70%, optionally at least about 80%, preferably at least about 85%, more preferably at least about 90% and most preferably at least about 95% homologous to the sequence VSRSEPELGFEDTNLTLLIFSEGQDQSQALLSVGP (SEQ ID NO:1545) in D11853_PEA_{—}1_P12 (SEQ ID NO:594).

[2151] The location of the variant protein was determined according to results from a number of different software programs and analyses, including analyses from SignalP and other specialized programs. The variant protein is believed to be located as follows with regard to the cell: secreted. The protein localization is believed to be secreted because one of the two signal-peptide prediction programs (HMM:Signal peptide,NN:NO) predicts that this protein has a signal peptide.

[2152] Variant protein D11853_PEA_{—}1_P12 (SEQ ID NO:594) is encoded by the following transcript(s): D11853_PEA_{—}1_T16 (SEQ ID NO:66), for which the sequence(s) is/are given at the end of the application. The coding portion of transcript D11853_PEA_{—}1_T16 (SEQ ID NO:66) is shown in bold; this coding portion starts at position 108 and ends at position 656. The transcript also has the following SNPs as listed in Table 18 (given according to their position on the nucleotide sequence, with the alternative nucleic acid listed; the last column indicates whether the SNP is known or not; the presence of known SNPs in variant protein D11853_PEA_{—}1_P12 (SEQ ID NO:594) sequence provides support for the deduced sequence of this variant protein according to the present invention).

TABLE 18
Nucleic acid SNPs

| SNP position on | Alternative | Previously |
|---|---|---|
| nucleotide seqence | nucleic acid | known SNP? |
| 180 | C -> | No |
| 182 | G -> | No |
| 185 | -> C | No |
| 201 | T -> | No |
| 789 | A -> C | No |
| 789 | A -> G | No |
| 790 | G -> | No |
| 790 | G -> A | No |
| 809 | C -> G | No |
| 816 | A -> C | No |
| 872 | G -> A | No |
| 944 | G -> A | No |
| 944 | G -> C | No |
| 961 | A -> | No |
| 961 | A -> C | No |
| 972 | A -> C | No |
| 987 | C -> | No |
| 987 | C -> G | No |
| 1057 | A -> C | No |
| 1081 | A -> C | No |
| 1089 | T -> G | No |
| 1107 | G -> A | No |
| 1107 | G -> C | No |
| 1115 | -> C | No |
| 1115 | -> T | No |
| 1122 | -> G | No |
| 1151 | C -> | No |
| 1151 | C -> G | No |
| 1182 | -> G | No |
| 1232 | G -> | No |
| 1241 | G -> A | No |
| 1261 | C -> T | No |
| 1276 | G -> | No |
| 1357 | G -> A | No |
| 1360 | A -> | No |
| 1360 | A -> C | No |
| 1406 | T -> | No |
| 1409 | T -> C | No |
| 1409 | T -> G | No |
| 1446 | T -> C | Yes |

[2153] Variant protein D11853_PEA_{—}1_P14 (SEQ ID NO:595) according to the present invention has an amino acid sequence as given at the end of the application; it is encoded by transcript(s) D11853_PEA_{—}1_T19 (SEQ ID NO:68). An alignment is given to the known protein (Membrane associated protein SLP-2 (SEQ ID NO:637)) at the end of the application. One or more alignments to one or more previously published protein sequences are given at the end of the application. A brief description of the relationship of the variant protein according to the present invention to each such aligned protein is as follows:

[2154] Comparison Report Between D11853_PEA_{—}1_P14 (SEQ ID NO:595) and Q9P042 (SEQ ID NO:639):

[2155] 1. An isolated chimeric polypeptide encoding for D11853_PEA_{—}1_P14 (SEQ ID NO:595), comprising a first amino acid sequence being at least 70%, optionally at least 80%, preferably at least 85%, more preferably at least 90% and most preferably at least 95% homologous to a polypeptide having the sequence MLARAARGTGALLLRGSLLASGRAPR (SEQ ID NO:1530) corresponding to amino acids 1-26 of D11853_PEA_{—}1_P14 (SEQ ID NO:595), a second amino acid sequence being at least 90% homologous to RASSGLPRNTVVLFVPQQEAWVVERMGRFHRILEPGLNILIPVLDRIRYVQSLKEIVINVPEQSAVTLDNVT LQIDGVLYLRIMDPYKASYGVEDPEYAVTQLAQTTMRSELGKLSLDKVFRERESLNASIVDAINQAADCW GIRCLRYEIKDIHVPPRVKESMQMQV corresponding to amino acids 13-180 of Q9P042 (SEQ ID NO:639), which also corresponds to amino acids 27-194 of D11853_PEA_{—}1_P14 (SEQ ID NO:595), and a third amino acid sequence being at least 70%, optionally at least 80%, preferably at least 85%, more preferably at least 90% and most preferably at least 95% homologous to a polypeptide having the sequence GAKEGWEKGLRAPVPGGSRLPSCYDG (SEQ ID NO:1547) corresponding to amino acids 195-220 of D11853_PEA_{—}1_P14 (SEQ ID NO:595), wherein said first amino acid sequence, second amino acid sequence and third amino acid sequence are contiguous and in a sequential order.

[2156] 2. An isolated polypeptide encoding for a head of D11853_PEA_{—}1_P14 (SEQ ID NO:595), comprising a polypeptide being at least 70%, optionally at least about 80%, preferably at least about 85%, more preferably at least about 90% and most preferably at least about 95% homologous to the sequence MLARAARGTGALLLRGSLLASGRAPR (SEQ ID NO:1530) of D11853_PEA_{—}1_P14 (SEQ ID NO:595).

[2157] 3. An isolated polypeptide encoding for a tail of D11853_PEA_{—}1_P14 (SEQ ID NO:595), comprising a polypeptide being at least 70%, optionally at least about 80%, preferably at least about 85%, more preferably at least about 90% and most preferably at least about 95% homologous to the sequence GAKEGWEKGLRAPVPGGSRLPSCYDG (SEQ ID NO:1547) in D11853_PEA_{—}1_P14 (SEQ ID NO:595).

[2158] Comparison Report Between D11853_PEA_{—}1_P14 (SEQ ID NO:595) and Q96FY2 (SEQ ID NO:638):

[2159] 1. An isolated chimeric polypeptide encoding for D11853_PEA_{—}1_P14 (SEQ ID NO:595), comprising a first amino acid sequence being at least 90% homologous to MLARAARGTGALLLRGSLLASGRAPRRASSGLPRNTVVLFVPQQEAWVVERMGRFHRILEPGLNILIPVLD RIRYVQSLKEIVINVPEQSAVTLDNVTLQIDGVLYLRIMDPYKASYGVEDPEYAVTQ corresponding to amino acids 1-128 of Q96FY2 (SEQ ID NO:638), which also corresponds to amino acids 1-128 of D11853_PEA_{—}1_P14 (SEQ ID NO:595), a bridging amino acid L corresponding to amino acid 129 of D11853_PEA_{—}1_P14 (SEQ ID NO:595), a second amino acid sequence being at least 90% homologous to AQTTMRSELGKLSLDKVFRERESLNASIVDAINQAADCWGIRCLRYEIKDIHVPPRVKESMQMQV corresponding to amino acids 130-194 of Q96FY2 (SEQ ID NO:638), which also corresponds to amino acids 130-194 of D11853_PEA_{—}1_P14 (SEQ ID NO:595), and a third amino acid sequence being at least 70%, optionally at least 80%, preferably at least 85%, more preferably at least 90% and most preferably at least 95% homologous to a polypeptide having the sequence GAKEGWEKGLRAPVPGGSRLPSCYDG (SEQ ID NO:1547) corresponding to amino acids 195-220 of D11853_PEA_{—}1_P14 (SEQ ID NO:595), wherein said first amino acid sequence, bridging amino acid, second amino acid sequence and third amino acid sequence are contiguous and in a sequential order.

[2160] 2. An isolated polypeptide encoding for a tail of D11853_PEA_{—}1_P14 (SEQ ID NO:595), comprising a polypeptide being at least 70%, optionally at least about 80%, preferably at least about 85%, more preferably at least about 90% and most preferably at least about 95% homologous to the sequence GAKEGWEKGLRAPVPGGSRLPSCYDG (SEQ ID NO:1547) in D11853_PEA_{—}1_P14 (SEQ ID NO:595).

[2161] Comparison Report Between D11853_PEA_{—}1_P14 (SEQ ID NO:595) and Q9UJZ1 (SEQ ID NO:637):

[2162] 1. An isolated chimeric polypeptide encoding for D11853_PEA_{—}1_P14 (SEQ ID NO:595), comprising a first amino acid sequence being at least 90% homologous to MLARAARGTGALLLRGSLLASGRAPRRASSGLPRNTVVLFVPQQEAWVVERMGRFHRILEPGLNILIPVLD RIRYVQSLKEIVINVPEQSAVTLDNVTLQIDGVLYLRIMDPYKASYGVEDPEYAVTQLAQTTMRSELGKLS LDKVFRERESLNASIVDAINQAADCWGIRCLRYEIKDIHVPPRVKESMQMQV corresponding to amino acids 1-194 of Q9UJZ1 (SEQ ID NO:637), which also corresponds to amino acids 1-194 of D11853_PEA_{—}1_P14 (SEQ ID NO:595), and a second amino acid sequence being at least 70%, optionally at least 80%, preferably at least 85%, more preferably at least 90% and most preferably at least 95% homologous to a polypeptide having the sequence GAKEGWEKGLRAPVPGGSRLPSCYDG (SEQ ID NO:1547) corresponding to amino acids 195-220 of D11853_PEA_{—}1_P14 (SEQ ID NO:595), wherein said first amino acid sequence and second amino acid sequence are contiguous and in a sequential order.

[2163] 2. An isolated polypeptide encoding for a tail of D11853_PEA_{—}1_P14 (SEQ ID NO:595), comprising a polypeptide being at least 70%, optionally at least about 80%, preferably at least about 85%, more preferably at least about 90% and most preferably at least about 95% homologous to the sequence GAKEGWEKGLRAPVPGGSRLPSCYDG (SEQ ID NO:1547) in D11853_PEA_{—}1_P14 (SEQ ID NO:595).

[2164] The location of the variant protein was determined according to results from a number of different software programs and analyses, including analyses from SignalP and other specialized programs. The variant protein is believed to be located as follows with regard to the cell: secreted. The protein localization is believed to be secreted because one of the two signal-peptide prediction programs (HMM:Signal peptide,NN:NO) predicts that this protein has a signal peptide.

[2165] Variant protein D11853_PEA_{—}1_P14 (SEQ ID NO:595) also has the following non-silent SNPs (Single Nucleotide Polymorphisms) as listed in Table 19, (given according to their position(s) on the amino acid sequence, with the alternative amino acid(s) listed; the last column indicates whether the SNP is known or not; the presence of known SNPs in variant protein D11853_PEA_{—}1_P14 (SEQ ID NO:595) sequence provides support for the deduced sequence of this variant protein according to the present invention).

TABLE 19
Amino acid mutations

| SNP position(s) on | Alternative | Previously |
|---|---|---|
| amino acid sequence | amino acid(s) | known SNP? |
| 25 | P -> | No |
| 32 | L -> | No |
| 178 | K -> | No |
| 178 | K -> R | No |
| 178 | K -> T | No |
| 185 | R -> G | No |
| 187 | K -> T | No |

[2166] Variant protein D11853_PEA_{—}1_P14 (SEQ ID NO:595) is encoded by the following transcript(s): D11853_PEA_{—}1_T19 (SEQ ID NO:68), for which the sequence(s) is/are given at the end of the application. The coding portion of transcript D11853_PEA_{—}1_T19 (SEQ ID NO:68) is shown in bold; this coding portion starts at position 108 and ends at position 767. The transcript also has the following SNPs as listed in Table 20 (given according to their position on the nucleotide sequence, with the alternative nucleic acid listed; the last column indicates whether the SNP is known or not; the presence of known SNPs in variant protein D11853_PEA_{—}1_P14 (SEQ ID NO:595) sequence provides support for the deduced sequence of this variant protein according to the present invention).

TABLE 20
Nucleic acid SNPs

| SNP position on | Alternative | Previously |
|---|---|---|
| nucleotide sequence | nucleic acid | known SNP? |
| 180 | C -> | No |
| 182 | G -> | No |
| 185 | -> C | No |
| 201 | T -> | No |
| 640 | A -> C | No |
| 640 | A -> G | No |
| 641 | G -> | No |
| 641 | G -> A | No |
| 660 | C -> G | No |
| 667 | A -> C | No |
| 867 | G -> A | No |
| 939 | G -> A | No |
| 939 | G -> C | No |
| 956 | A -> | No |
| 956 | A -> C | No |
| 967 | A -> C | No |
| 982 | C -> | No |
| 982 | C -> G | No |
| 1052 | A -> C | No |
| 1076 | A -> C | No |
| 1084 | T -> G | No |
| 1102 | G -> A | No |
| 1102 | G -> C | No |
| 1110 | -> C | No |
| 1110 | -> T | No |
| 1117 | -> G | No |
| 1146 | C -> | No |
| 1146 | C -> G | No |
| 1177 | -> G | No |
| 1227 | G -> | No |
| 1236 | G -> A | No |
| 1256 | C -> T | No |
| 1271 | G -> | No |
| 1352 | G -> A | No |
| 1355 | A -> | No |
| 1355 | A -> C | No |
| 1401 | T -> | No |
| 1404 | T -> C | No |
| 1404 | T -> G | No |
| 1441 | T -> C | Yes |

[2167] Variant protein D11853_PEA_{—}1_P16 (SEQ ID NO:596) according to the present invention has an amino acid sequence as given at the end of the application; it is encoded by transcript(s) D11853_PEA_{—}1_T24 (SEQ ID NO:71). An alignment is given to the known protein (Membrane associated protein SLP-2 (SEQ ID NO:637)) at the end of the application. One or more alignments to one or more previously published protein sequences are given at the end of the application. A brief description of the relationship of the variant protein according to the present invention to each such aligned protein is as follows:

[2168] Comparison Report Between D11853_PEA_{—}1_P16 (SEQ ID NO:596) and Q9P042 (SEQ ID NO:639):

[2169] 1. An isolated chimeric polypeptide encoding for D11853_PEA_{—}1_P16 (SEQ ID NO:596), comprising a first amino acid sequence being at least 70%, optionally at least 80%, preferably at least 85%, more preferably at least 90% and most preferably at least 95% homologous to a polypeptide having the sequence MLARAARGTGALLLRGSLLASGRAPR (SEQ ID NO:1530) corresponding to amino acids 1-26 of D11853_PEA_{—}1_P16 (SEQ ID NO:596), a second amino acid sequence being at least 90% homologous to RASSGLPRNTVVLFVPQQEAWVVERMGRFHRILEPGLNILIPVLDRIRYVQSLKEIVINVPEQSAVTLDNVT LQIDGVLYLRIMDPYKASYGVEDPEYAVTQLAQTTMRSELGKLSLDKVFR corresponding to amino acids 13-134 of Q9P042 (SEQ ID NO:639), which also corresponds to amino acids 27-148 of D11853_PEA_{—}1_P16 (SEQ ID NO:596), a third amino acid sequence being at least 90% homologous to VEAERRKR corresponding to amino acids 180-187 of Q9P042 (SEQ ID NO:639), which also corresponds to amino acids 149-156 of D11853_PEA_{—}1_P16 (SEQ ID NO:596), a bridging amino acid A corresponding to amino acid 157 of D11853_PEA_{—}1_P16 (SEQ ID NO:596), and a fourth amino acid sequence being at least 90% homologous to TVLESEGTRESAINVAEGKKQAQILASEAEKAEQINQAAGEASAVLAKAKAKAEAIRILAAALTQHNGDA AASLTVAEQYVSAFSKLAKDSNTILLPSNPGDVTSMVAQAMGVYGALTKAPVPGTPDSLSSGSSRDVQGT DASLDEELDRVKMS corresponding to amino acids 189-342 of Q9P042 (SEQ ID NO:639), which also corresponds to amino acids 158-311 of D11853_PEA_{—}1_P16 (SEQ ID NO:596), wherein said first amino acid sequence, second amino acid sequence, third amino acid sequence, bridging amino acid and fourth amino acid sequence are contiguous and in a sequential order.

[2170] 2. An isolated polypeptide encoding for a head of D11853_PEA_{—}1_P16 (SEQ ID NO:596), comprising a polypeptide being at least 70%, optionally at least about 80%, preferably at least about 85%, more preferably at least about 90% and most preferably at least about 95% homologous to the sequence MLARAARGTGALLLRGSLLASGRAPR (SEQ ID NO:1530) of D11853_PEA_{—}1_P16 (SEQ ID NO:596).

[2171] 3. An isolated chimeric polypeptide encoding for an edge portion of D11853_PEA_{—}1_P16 (SEQ ID NO:596) comprising a polypeptide having a length “n”, wherein n is at least about 10 amino acids in length, optionally at least about 20 amino acids in length, preferably at least about 30 amino acids in length, more preferably at least about 40 amino acids in length and most preferably at least about 50 amino acids in length, wherein at least two amino acids comprise RV, having a structure as follows: a sequence starting from any of amino acid numbers 148−x to 148; and ending at any of amino acid numbers 149+((n−2)−x), in which x varies from 0 to n−2.

[2172] Comparison Report Between D11853_PEA_{—}1_P16 (SEQ ID NO:596) and BAC85377 (SEQ ID NO:640):

[2173] 1. An isolated chimeric polypeptide encoding for D11853_PEA_{—}1_P16 (SEQ ID NO:596), comprising a first amino acid sequence being at least 70%, optionally at least 80%, preferably at least 85%, more preferably at least 90% and most preferably at least 95% homologous to a polypeptide having the sequence MLARAARGTGALLLRGSLLASGRAPRRASSGLPRNTVVLFVPQQEAWVVERMGRFHRILEPGLNILIPVLD RIRYVQSLKEIVINVPEQSAVTLDNVTLQIDGVLYLRI corresponding to amino acids 1-109 of D11853_PEA_{—}1_P16 (SEQ ID NO:596), a second amino acid sequence being at least 90% homologous to MDPYKASYGVEDPEYAVTQLAQTTMRSELGKLSLDKVFR corresponding to amino acids 1-39 of BAC85377 (SEQ ID NO:640), which also corresponds to amino acids 110-148 of D11853_PEA_{—}1_P16 (SEQ ID NO:596), a third amino acid sequence being at least 90% homologous to VEAERRKRATVLESEGTRESAINVAEGKKQAQILASEAEKAEQINQAAGEASAVLAKAKAKAEAIRILAA ALTQH corresponding to amino acids 85-159 of BAC85377 (SEQ ID NO:640), which also corresponds to amino acids 149-223 of D11853_PEA_{—}1_P16 (SEQ ID NO:596), and a fourth amino acid sequence being at least 70%, optionally at least 80%, preferably at least 85%, more preferably at least 90% and most preferably at least 95% homologous to a polypeptide having the sequence NGDAAASLTVAEQYVSAFSKLAKDSNTILLPSNPGDVTSMVAQAMGVYGALTKAPVPGTPDSLSSGSSRD VQGTDASLDEELDRVKMS (SEQ ID NO:1531) corresponding to amino acids 224-311 of D11853_PEA_{—}1_P16 (SEQ ID NO:596), wherein said first amino acid sequence, second amino acid sequence, third amino acid sequence and fourth amino acid sequence are contiguous and in a sequential order.

[2174] 2. An isolated polypeptide encoding for a head of D11853_PEA_{—}1_P16 (SEQ ID NO:596), comprising a polypeptide being at least 70%, optionally at least about 80%, preferably at least about 85%, more preferably at least about 90% and most preferably at least about 95% homologous to the sequence MLARAARGTGALLLRGSLLASGRAPRRASSGLPRNTVVLFVPQQEAWVVERMGRFHRILEPGLNILIPVLD RIRYVQSLKEIVINVPEQSAVTLDNVTLQIDGVLYLRI of D11853_PEA_{—}1_P16 (SEQ ID NO:596).

[2175] 3. An isolated chimeric polypeptide encoding for an edge portion of D11853_PEA_{—}1_P16 (SEQ ID NO:596) comprising a polypeptide having a length “n”, wherein n is at least about 10 amino acids in length, optionally at least about 20 amino acids in length, preferably at least about 30 amino acids in length, more preferably at least about 40 amino acids in length and most preferably at least about 50 amino acids in length, wherein at least two amino acids comprise RV, having a structure as follows: a sequence starting from any of amino acid numbers 148−x to 148; and ending at any of amino acid numbers 149+((n−2)−x), in which x varies from 0 to n−2.

[2176] 4. An isolated polypeptide encoding for a tail of D11853_PEA_{—}1_P16 (SEQ ID NO:596), comprising a polypeptide being at least 70%, optionally at least about 80%, preferably at least about 85%, more preferably at least about 90% and most preferably at least about 95% homologous to the sequence NGDAAASLTVAEQYVSAFSKLAKDSNTILLPSNPGDVTSMVAQAMGVYGALTKAPVPGTPDSLSSGSSRD VQGTDASLDEELDRVKMS (SEQ ID NO:1531) in D11853_PEA_{—}1_P16 (SEQ ID NO:596).

[2177] Comparison Report Between D11853_PEA_{—}1_P16 (SEQ ID NO:596) and Q96FY2 (SEQ ID NO:638):

[2178] 1. An isolated chimeric polypeptide encoding for D11853_PEA_{—}1_P16 (SEQ ID NO:596), comprising a first amino acid sequence being at least 90% homologous to MLARAARGTGALLLRGSLLASGRAPRRASSGLPRNTVLFVPQQEAWVVERMGRFHRILEPGLNILIPVLD RIRYVQSLKEIVINVPEQSAVTLDNVTLQIDGVLYLRIMDPYKASYGVEDPEYAVTQ corresponding to amino acids 1-128 of Q96FY2 (SEQ ID NO:638), which also corresponds to amino acids 1-128 of D11853_PEA_{—}1_P16 (SEQ ID NO:596), a bridging amino acid L corresponding to amino acid 129 of D11853_PEA_{—}1_P16 (SEQ ID NO:596), a second amino acid sequence being at least 90% homologous to AQTTMRSELGKLSLDKVFR corresponding to amino acids 130-148 of Q96FY2 (SEQ ID NO:638), which also corresponds to amino acids 130-148 of D11853_PEA_{—}1_P16 (SEQ ID NO:596), and a third amino acid sequence being at least 90% homologous to VEAERRKRATVLESEGTRESAINVAEGKKQAQILASEAEKAEQINQAAGEASAVLAKAKAKAEAIRILAA ALTQHNGDAAASLTVAEQYVSAFSKLAKDSNTILLPSNPGDVTSMVAQAMGVYGALTKAPVPGTPDSLSS GSSRDVQGTDASLDEELDRVKMS corresponding to amino acids 194-356 of Q96FY2 (SEQ ID NO:638), which also corresponds to amino acids 149-311 of D11853_PEA_{—}1_P16 (SEQ ID NO:596), wherein said first amino acid sequence, bridging amino acid, second amino acid sequence and third amino acid sequence are contiguous and in a sequential order.

[2179] 2. An isolated chimeric polypeptide encoding for an edge portion of D11853_PEA_{—}1_P16 (SEQ ID NO:596) comprising a polypeptide having a length “n”, wherein n is at least about 10 amino acids in length, optionally at least about 20 amino acids in length, preferably at least about 30 amino acids in length, more preferably at least about 40 amino acids in length and most preferably at least about 50 amino acids in length, wherein at least two amino acids comprise RV, having a structure as follows: a sequence starting from any of amino acid numbers 148−x to 148; and ending at any of amino acid numbers 149+((n−2)−x), in which x varies from 0 to n−2.

[2180] Comparison Report Between D11853_PEA_{—}1_P16 (SEQ ID NO:596) and Q9UJZ1 (SEQ ID NO:637):

[2181] 1. An isolated chimeric polypeptide encoding for D11853_PEA_{—}1_P16 (SEQ ID NO:596), comprising a first amino acid sequence being at least 90% homologous to MLARAARGTGALLLRGSLLASGRAPRRASSGLPRNTVVLFVPQQEAWVVERMGRFHRILEPGLNILIPVLD RIRYVQSLKEIVINVPEQSAVTLDNVTLQIDGVLYLRIMDPYKASYGVEDPEYAVTQLAQTTMRSELGKLS LDKVFR corresponding to amino acids 1-148 of Q9UJZ1 (SEQ ID NO:637), which also corresponds to amino acids 1-148 of D11853_PEA_{—}1_P16 (SEQ ID NO:596), and a second amino acid sequence being at least 90% homologous to VEAERRKRATVLESEGTRESAINVAEGKKQAQILASEAEKAEQINQAAGEASAVLAKAKAKAEAIRILAA ALTQHNGDAAASLTVAEQYVSAFSKLAKDSNTILLPSNPGDVTSMVAQAMGVYGALTKAPVPGTPDSLSS GSSRDVQGTDASLDEELDRVKMS corresponding to amino acids 194-356 of Q9UJZ1 (SEQ ID NO:637), which also corresponds to amino acids 149-311 of D11853_PEA_{—}1_P16 (SEQ ID NO:596), wherein said first amino acid sequence and second amino acid sequence are contiguous and in a sequential order.

[2182] 2. An isolated chimeric polypeptide encoding for an edge portion of D11853_PEA_{—}1_P16 (SEQ ID NO:596), comprising a polypeptide having a length “n”, wherein n is at least about 10 amino acids in length, optionally at least about 20 amino acids in length, preferably at least about 30 amino acids in length, more preferably at least about 40 amino acids in length and most preferably at least about 50 amino acids in length, wherein at least two amino acids comprise RV, having a structure as follows: a sequence starting from any of amino acid numbers 148−x to 148; and ending at any of amino acid numbers 149+((n−2)−x), in which x varies from 0 to n−2.

[2183] The location of the variant protein was determined according to results from a number of different software programs and analyses, including analyses from SignalP and other specialized programs. The variant protein is believed to be located as follows with regard to the cell: secreted. The protein localization is believed to be secreted because one of the two signal-peptide prediction programs (HMM:Signal peptide,NN:NO) predicts that this protein has a signal peptide.

[2184] Variant protein D11853_PEA_{—}1_P16 (SEQ ID NO:596) also has the following non-silent SNPs (Single Nucleotide Polymorphisms) as listed in Table 21, (given according to their position(s) on the amino acid sequence, with the alternative amino acid(s) listed; the last column indicates whether the SNP is known or not; the presence of known SNPs in variant protein D11853_PEA_{—}1_P16 (SEQ ID NO:596) sequence provides support for the deduced sequence of this variant protein according to the present invention).

TABLE 21
Amino acid mutations

| SNP position(s) on | Alternative | Previously |
|---|---|---|
| amino acid sequence | amino acid(s) | known SNP? |
| 25 | P -> | No |
| 32 | L -> | No |
| 161 | E -> K | No |
| 185 | E -> K | No |
| 185 | E -> Q | No |
| 190 | E -> | No |
| 190 | E -> D | No |
| 194 | Q -> P | No |
| 199 | A -> | No |
| 199 | A -> G | No |
| 222 | Q -> H | No |
| 233 | V -> G | No |
| 239 | S -> N | No |
| 239 | S -> T | No |
| 254 | P -> | No |
| 254 | P -> A | No |
| 281 | G -> | No |
| 284 | D -> N | No |
| 295 | Q -> | No |

[2185] Variant protein D11853_PEA_{—}1_P16 (SEQ ID NO:596) is encoded by the following transcript(s): D11853_PEA_{—}1_T24 (SEQ ID NO:71), for which the sequence(s) is/are given at the end of the application. The coding portion of transcript D11853_PEA_{—}1_T24 (SEQ ID NO:71) is shown in bold; this coding portion starts at position 108 and ends at position 1040. The transcript also has the following SNPs as listed in Table 22 (given according to their position on the nucleotide sequence, with the alternative nucleic acid listed; the last column indicates whether the SNP is known or not; the presence of known SNPs in variant protein D11853_PEA_{—}1_P16 (SEQ ID NO:596) sequence provides support for the deduced sequence of this variant protein according to the present invention).

TABLE 22
Nucleic acid SNPs

| SNP position on | Alternative | Previously |
|---|---|---|
| nucleotide sequence | nucleic acid | known SNP? |
| 180 | C -> | No |
| 182 | G -> | No |
| 185 | -> C | No |
| 201 | T -> | No |
| 588 | G -> A | No |
| 660 | G -> A | No |
| 660 | G -> C | No |
| 677 | A -> | No |
| 677 | A -> C | No |
| 688 | A -> C | No |
| 703 | C -> | No |
| 703 | C -> G | No |
| 773 | A -> C | No |
| 797 | A -> C | No |
| 805 | T -> G | No |
| 823 | G -> A | No |
| 823 | G -> C | No |
| 831 | -> C | No |
| 831 | -> T | No |
| 838 | -> G | No |
| 867 | C -> | No |
| 867 | C -> G | No |
| 898 | -> G | No |
| 948 | G -> | No |
| 957 | G -> A | No |
| 977 | C -> T | No |
| 992 | G -> | No |
| 1073 | G -> A | No |
| 1076 | A -> | No |
| 1076 | A -> C | No |
| 1122 | T -> | No |
| 1125 | T -> C | No |
| 1125 | T -> G | No |
| 1162 | T -> C | Yes |

[2186] Variant protein D11853_PEA_{—}1_P18 (SEQ ID NO:597) according to the present invention has an amino acid sequence as given at the end of the application; it is encoded by transcript(s) D11853_PEA_{—}1_T26 (SEQ ID NO:73). An alignment is given to the known protein (Membrane associated protein SLP-2 (SEQ ID NO:637)) at the end of the application. One or more alignments to one or more previously published protein sequences are given at the end of the application. A brief description of the relationship of the variant protein according to the present invention to each such aligned protein is as follows:

[2187] Comparison Report Between D11853_PEA_{—}1_P18 (SEQ ID NO:597) and Q9P042 (SEQ ID NO:639):

[2188] 1. An isolated chimeric polypeptide encoding for D11853_PEA_{—}1_P18 (SEQ ID NO:597), comprising a first amino acid sequence being at least 70%, optionally at least 80%, preferably at least 85%, more preferably at least 90% and most preferably at least 95% homologous to a polypeptide having the sequence MLARAARGTGALLLRGSLLASGRAPR (SEQ ID NO:1530) corresponding to amino acids 1-26 of D11853_PEA_{—}1_P18 (SEQ ID NO:597), a second amino acid sequence being at least 90% homologous to RASSGLPRNTVVLFVPQQEAWVVERMGRFHRILEPGLNILIPVLDRIRYVQSLKEIVINVPEQSAVTLDNVT LQIDGVLYLRIMDPYKASYGVEDPEYAVTQLAQTTMRSELGKLSLDKVFRERESLNASI corresponding to amino acids 13-143 of Q9P042 (SEQ ID NO:639), which also corresponds to amino acids 27-157 of D11853_PEA_{—}1_P18 (SEQ ID NO:597), and a third amino acid sequence being at least 90% homologous to VAQAMGVYGALTKAPVPGTPDSLSSGSSRDVQGTDASLDEELDRVKMS corresponding to amino acids 295-342 of Q9P042 (SEQ ID NO:639), which also corresponds to amino acids 158-205 of D11853_PEA_{—}1_P18 (SEQ ID NO:597), wherein said first amino acid sequence, second amino acid sequence and third amino acid sequence are contiguous and in a sequential order.

[2189] 2. An isolated polypeptide encoding for a head of D11853_PEA_{—}1_P18 (SEQ ID NO:597), comprising a polypeptide being at least 70%, optionally at least about 80%, preferably at least about 85%, more preferably at least about 90% and most preferably at least about 95% homologous to the sequence MLARAARGTGALLLRGSLLASGRAPR (SEQ ID NO:1530) of D11853_PEA_{—}1_P18 (SEQ ID NO:597).

[2190] 3. An isolated chimeric polypeptide encoding for an edge portion of D11853_PEA_{—}1_P18 (SEQ ID NO:597) comprising a polypeptide having a length “n”, wherein n is at least about 10 amino acids in length, optionally at least about 20 amino acids in length, preferably at least about 30 amino acids in length, more preferably at least about 40 amino acids in length and most preferably at least about 50 amino acids in length, wherein at least two amino acids comprise IV, having a structure as follows: a sequence starting from any of amino acid numbers 157−x to 157; and ending at any of amino acid numbers 158+((n−2)−x), in which x varies from 0 to n−2.

[2191] Comparison Report Between D11853_PEA_{—}1_P18 (SEQ ID NO:597) and Q96FY2 (SEQ ID NO:638):

[2192] 1. An isolated chimeric polypeptide encoding for D11853_PEA_{—}1_P18 (SEQ ID NO:597), comprising a first amino acid sequence being at least 90% homologous to MLARAARGTGALLLRGSLLASGRAPRRASSGLPRNTVVLFVPQQEAWVVERMGRFHRILEPGLNILIPVLD RIRYVQSLKEIVINVPEQSAVTLDNVTLQIDGVLYLRIMDPYKASYGVEDPEYAVTQ corresponding to amino acids 1-128 of Q96FY2 (SEQ ID NO:638), which also corresponds to amino acids 1-128 of D11853_PEA_{—}1_P18 (SEQ ID NO:597), a bridging amino acid L corresponding to amino acid 129 of D11853_PEA_{—}1_P18 (SEQ ID NO:597), a second amino acid sequence being at least 90% homologous to AQTTMRSELGKLSLDKVFRERESLNASI corresponding to amino acids 130-157 of Q96FY2 (SEQ ID NO:638), which also corresponds to amino acids 130-157 of D11853_PEA_{—}1_P18 (SEQ ID NO:597), and a third amino acid sequence being at least 90% homologous to VAQAMGVYGALTKAPVPGTPDSLSSGSSRDVQGTDASLDEELDRVKMS corresponding to amino acids 309-356 of Q96FY2 (SEQ ID NO:638), which also corresponds to amino acids 158-205 of D11853_PEA_{—}1_P18 (SEQ ID NO:597), wherein said first amino acid sequence, bridging amino acid, second amino acid sequence and third amino acid sequence are contiguous and in a sequential order.

[2193] 2. An isolated chimeric polypeptide encoding for an edge portion of D11853_PEA_{—}1_P18 (SEQ ID NO:597) comprising a polypeptide having a length “n”, wherein n is at least about 10 amino acids in length, optionally at least about 20 amino acids in length, preferably at least about 30 amino acids in length, more preferably at least about 40 amino acids in length and most preferably at least about 50 amino acids in length, wherein at least two amino acids comprise IV, having a structure as follows: a sequence starting from any of amino acid numbers 157−x to 157; and ending at any of amino acid numbers 158+((n−2)−x), in which x varies from 0 to n−2.

[2194] Comparison Report Between D11853_PEA_{—}1_P18 (SEQ ID NO:597) and Q9UJZ1 (SEQ ID NO:637):

[2195] 1. An isolated chimeric polypeptide encoding for D11853_PEA_{—}1_P18 (SEQ ID NO:597), comprising a first amino acid sequence being at least 90% homologous to MLARAARGTGALLLRGSLLASGRAPRRASSGLPRNTVVLFVPQQEAWVVERMGRFHRILEPGLNILIPVLD RIRYVQSLKEIVINVPEQSAVTLDNVTLQIDGVLYLRIMDPYKASYGVEDPEYAVTQLAQTTMRSELGKLS LDKVFRERESLNASI corresponding to amino acids 1-157 of Q9UJZ1 (SEQ ID NO:637), which also corresponds to amino acids 1-157 of D11853_PEA_{—}1_P18 (SEQ ID NO:597), and a second amino acid sequence being at least 90% homologous to VAQAMGVYGALTKAPVPGTPDSLSSGSSRDVQGTDASLDEELDRVKMS corresponding to amino acids 309-356 of Q9UJZ1 (SEQ ID NO:637), which also corresponds to amino acids 158-205 of D11853_PEA_{—}1_P18 (SEQ ID NO:597), wherein said first amino acid sequence and second amino acid sequence are contiguous and in a sequential order.

[2196] 2. An isolated chimeric polypeptide encoding for an edge portion of D11853_PEA_{—}1_P18 (SEQ ID NO:597) comprising a polypeptide having a length “n”, wherein n is at least about 10 amino acids in length, optionally at least about 20 amino acids in length, preferably at least about 30 amino acids in length, more preferably at least about 40 amino acids in length and most preferably at least about 50 amino acids in length, wherein at least two amino acids comprise IV, having a structure as follows: a sequence starting from any of amino acid numbers 157−x to 157; and ending at any of amino acid numbers 158+((n−2)−x), in which x varies from 0 to n−2.

[2197] The location of the variant protein was determined according to results from a number of different software programs and analyses, including analyses from SignalP and other specialized programs. The variant protein is believed to be located as follows with regard to the cell: secreted. The protein localization is believed to be secreted because one of the two signal-peptide prediction programs (HMM:Signal peptide,NN:NO) predicts that this protein has a signal peptide.

[2198] Variant protein D11853_PEA_{—}1_P18 (SEQ ID NO:597) also has the following non-silent SNPs (Single Nucleotide Polymorphisms) as listed in Table 23, (given according to their position(s) on the amino acid sequence, with the alternative amino acid(s) listed; the last column indicates whether the SNP is known or not; the presence of known SNPs in variant protein D11853_PEA_{—}1_P18 (SEQ ID NO:597) sequence provides support for the deduced sequence of this variant protein according to the present invention).

TABLE 23
Amino acid mutations

| SNP position(s) on | Alternative | Previously |
|---|---|---|
| amino acid sequence | amino acid(s) | known SNP? |
| 25 | P -> | No |
| 32 | L -> | No |
| 175 | G -> | No |
| 178 | D -> N | No |
| 189 | Q -> | No |

[2199] Variant protein D11853_PEA_{—}1_P18 (SEQ ID NO:597) is encoded by the following transcript(s): D11853_PEA_{—}1_T26 (SEQ ID NO:73), for which the sequence(s) is/are given at the end of the application. The coding portion of transcript D11853_PEA_{—}1_T26 (SEQ ID NO:73) is shown in bold; this coding portion starts at position 108 and ends at position 722. The transcript also has the following SNPs as listed in Table 24 (given according to their position on the nucleotide sequence, with the alternative nucleic acid listed; the last column indicates whether the SNP is known or not; the presence of known SNPs in variant protein D11853_PEA_{—}1_P18 (SEQ ID NO:597) sequence provides support for the deduced sequence of this variant protein according to the present invention).

TABLE 24
Nucleic acid SNPs

| SNP position on | Alternative | Previously |
|---|---|---|
| nucleotide sequence | nucleic acid | known SNP? |
| 180 | C -> | No |
| 182 | G -> | No |
| 185 | -> C | No |
| 201 | T -> | No |
| 630 | G -> | No |
| 639 | G -> A | No |
| 659 | C -> T | No |
| 674 | G -> | No |
| 755 | G -> A | No |
| 758 | A -> | No |
| 758 | A -> C | No |
| 804 | T -> | No |
| 807 | T -> C | No |
| 807 | T -> G | No |
| 844 | T -> C | Yes |

[2200] Variant protein D11853_PEA_{—}1_P19 (SEQ ID NO:598) according to the present invention has an amino acid sequence as given at the end of the application; it is encoded by transcript(s) D11853_PEA_{—}1_T27 (SEQ ID NO:74). An alignment is given to the known protein (Membrane associated protein SLP-2 (SEQ ID NO:637)) at the end of the application. One or more, alignments to one or more previously published protein sequences are given at the end of the application. A brief description of the relationship of the variant protein according to the present invention to each such aligned protein is as follows:

[2201] Comparison Report Between D11853_PEA_{—}1_P19 (SEQ ID NO:598) and Q9P042 (SEQ ID NO:639):

[2202] 1. An isolated chimeric polypeptide encoding for D11853_PEA_{—}1_P19 (SEQ ID NO:598), comprising a first amino acid sequence being at least 70%, optionally at least 80%, preferably at least 85%, more preferably at least 90% and most preferably at least 95% homologous to a polypeptide having the sequence MLARAARGTGALLLRGSLLASGRAPR (SEQ ID NO:1530) corresponding to amino acids 1-26 of D11853_PEA_{—}1_P19 (SEQ ID NO:598), a second amino acid sequence being at least 90% homologous to RASSGLPRNTVVLFVPQQEAWVVERMGRFHRILEPGLNILIPVLDRIRYVQSLKEIVINVPEQSAVTLDNVT LQIDGVLYLRIMDPYKASYGVEDPEYAVTQLAQTTMRSELGKLS corresponding to amino acids 13-128 of Q9P042 (SEQ ID NO:639), which also corresponds to amino acids 27-142 of D11853_PEA_{—}1_P19 (SEQ ID NO:598), and a third amino acid sequence being at least 70%, optionally at least 80%, preferably at least 85%, more preferably at least 90% and most preferably at least 95% homologous to a polypeptide having the sequence SRLTLQWEQQRCPGYRCKS (SEQ ID NO:1552) corresponding to amino acids 143-161 of D11853_PEA_{—}1_P19 (SEQ ID NO:598), wherein said first amino acid sequence, second amino acid sequence and third amino acid sequence are contiguous and in a sequential order.

[2203] 2. An isolated polypeptide encoding for a head of D11853_PEA_{—}1_P19 (SEQ ID NO:598), comprising a polypeptide being at least 70%, optionally at least about 80%, preferably at least about 85%, more preferably at least about 90% and most preferably at least about 95% homologous to the sequence MLARAARGTGALLLRGSLLASGRAPR (SEQ ID NO:1530) of D11853_PEA_{—}1_P19 (SEQ ID NO:598).

[2204] 3. An isolated polypeptide encoding for a tail of D11853_PEA_{—}1_P19 (SEQ ID NO:598), comprising a polypeptide being at least 70%, optionally at least about 80%, preferably at least about 85%, more preferably at least about 90% and most preferably at least about 95% homologous to the sequence SRLTLQWEQQRCPGYRCKS (SEQ ID NO:1552) in D11853_PEA_{—}1_P19 (SEQ ID NO:598).

[2205] Comparison Report Between D11853_PEA_{—}1_P19 (SEQ ID NO:598) and Q96FY2 (SEQ ID NO:638):

[2206] 1. An isolated chimeric polypeptide encoding for D11853_PEA_{—}1_P19 (SEQ ID NO:598), comprising a first amino acid sequence being at least 90% homologous to MLARAARGTGALLLRGSLLASGRAPRRASSGLPRNTVVLFVPQQEAWVVERMGRFHRILEPGLNILIPVLD RIRYVQSLKEIVINVPEQSAVTLDNVTLQIDGVLYLRIMDPYKASYGVEDPEYAVTQ corresponding to amino acids 1-128 of Q96FY2 (SEQ ID NO:638), which also corresponds to amino acids 1-128 of D11853_PEA_{—}1_P19 (SEQ ID NO:598), a bridging amino acid L corresponding to amino acid 129 of D11853_PEA_{—}1_P19 (SEQ ID NO:598), a second amino acid sequence being at least 90% homologous to AQTTMRSELGKLS corresponding to amino acids 130-142 of Q96FY2 (SEQ ID NO:638), which also corresponds to amino acids 130-142 of D11853_PEA_{—}1_P19 (SEQ ID NO:598), and a third amino acid sequence being at least 70%, optionally at least 80%, preferably at least 85%, more preferably at least 90% and most preferably at least 95% homologous to a polypeptide having the sequence SRLTLQWEQQRCPGYRCKS (SEQ ID NO:1552) corresponding to amino acids 143-161 of D11853_PEA_{—}1_P19 (SEQ ID NO:598), wherein said first amino acid sequence, bridging amino acid, second amino acid sequence and third amino acid sequence are contiguous and in a sequential order.

[2207] 2. An isolated polypeptide encoding for a tail of D11853_PEA_{—}1_P19 (SEQ ID NO:598), comprising a polypeptide being at least 70%, optionally at least about 80%, preferably at least about 85%, more preferably at least about 90% and most preferably at least about 95% homologous to the sequence SRLTLQWEQQRCPGYRCKS (SEQ ID NO:1552) in D11853_PEA_{—}1_P19 (SEQ ID NO:598).

[2208] Comparison Report Between D11853_PEA_{—}1_P19 (SEQ ID NO:598) and Q9UJZ1 (SEQ ID NO:637):

[2209] 1. An isolated chimeric polypeptide encoding for D11853_PEA_{—}1_P19 (SEQ ID NO:598), comprising a first amino acid sequence being at least 90% homologous to MLARAARGTGALLLRGSLLASGRAPRRASSGLPRNTVVLFVPQQEAWVVERMGRFHRILEPGLNILIPVLD RIRYVQSLKEWINVPEQSAVTLDNVTLQIDGVLYLRIMDPYKASYGVEDPEYAVTQLAQTTMRSELGKLS corresponding to amino acids 1-142 of Q9UJZ1 (SEQ ID NO:637), which also corresponds to amino acids 1-142 of D11853_PEA_{—}1_P19 (SEQ ID NO:598), and a second amino acid sequence being at least 70%, optionally at least 80%, preferably at least 85%, more preferably at least 90% and most preferably at least 95% homologous to a polypeptide having the sequence SRLTLQWEQQRCPGYRCKS (SEQ ID NO:1552) corresponding to amino acids 143-161 of D11853_PEA_{—}1_P19 (SEQ ID NO:598), wherein said first amino acid sequence and second amino acid sequence are contiguous and in a sequential order.

[2210] 2. An isolated polypeptide encoding for a tail of D11853_PEA_{—}1_P19 (SEQ ID NO:598), comprising a polypeptide being at least 70%, optionally at least about 80%, preferably at least about 85%, more preferably at least about 90% and most preferably at least about 95% homologous to the sequence SRLTLQWEQQRCPGYRCKS (SEQ ID NO:1552) in D11853_PEA_{—}1_P19 (SEQ ID NO:598).

[2211] The location of the variant protein was determined according to results from a number of different software programs and analyses, including analyses from SignalP and other specialized programs. The variant protein is believed to be located as follows with regard to the cell: secreted. The protein localization is believed to be secreted because one of the two signal-peptide prediction programs (HMM:Signal peptide,NN:NO) predicts that this protein has a signal peptide.

[2212] Variant protein D11853_PEA_{—}1_P19 (SEQ ID NO:598) also has the following non-silent SNPs (Single Nucleotide Polymorphisms) as listed in Table 25, (given according to their position(s) on the amino acid sequence, with the alternative amino acid(s) listed; the last column indicates whether the SNP is known or not; the presence of known SNPs in variant protein D11853_PEA_{—}1_P19 (SEQ ID NO:598) sequence provides support for the deduced sequence of this variant protein according to the present invention).

TABLE 25
Amino acid mutations

| SNP Position(s) | | |
|---|---|---|
| on amino acid | Alternative | Previously |
| sequence | amine acid(s) | known SNP? |
| 25 | P -> | No |
| 32 | L -> | No |
| 144 | R -> K | No |
| 151 | Q -> * | No |
| 156 | G -> | No |

[2213] Variant protein D11853_PEA_{—}1_P19 (SEQ ID NO:598) is encoded by the following transcript(s): D11853_PEA_{—}1_T27 (SEQ ID NO:74), for which the sequence(s) is/are given at the end of the application. The coding portion of transcript D11853_PEA_{—}1_T27 (SEQ ID NO:74) is shown in bold; this coding portion starts at position 108 and ends at position 590. The transcript also has the following SNPs as listed in Table 26 (given according to their position on the nucleotide sequence, with the alternative nucleic acid listed; the last column indicates whether the SNP is known or not; the presence of known SNPs in variant protein D11853_PEA_{—}1_P19 (SEQ ID NO:598) sequence provides support for the deduced sequence of this variant protein according to the present invention).

TABLE 26
Nucleic acid SNPs

| SNP position | | |
|---|---|---|
| on nucleotide | Alternative | Previously |
| sequence | nucleic acid | known SNP? |
| 180 | C -> | No |
| 182 | G -> | No |
| 185 | -> C | No |
| 201 | T -> | No |
| 538 | G -> A | No |
| 558 | C -> T | No |
| 573 | G -> | No |
| 654 | G -> A | No |
| 657 | A -> | No |
| 657 | A -> C | No |
| 703 | T -> | No |
| 706 | T -> C | No |
| 706 | T -> G | No |
| 743 | T -> C | Yes |

[2214] Variant protein D11853_PEA_{—}1_P20 (SEQ ID NO:599) according to the present invention has an amino acid sequence as given at the end of the application; it is encoded by transcript(s) D11853_PEA_{—}1_T7 (SEQ ID NO:59), D11853_PEA_{—}1_T17 (SEQ ID NO:67) and D11853_PEA_{—}1_T25 (SEQ ID NO:72). The location of the variant protein was determined according to results from a number of different software programs and analyses, including analyses from SignalP and other specialized programs. The variant protein is believed to be located as follows with regard to the cell: secreted. The protein localization is believed to be secreted because one of the two signal-peptide prediction programs (HMM:Signal peptide,NN:NO) predicts that this protein has a signal peptide.

[2215] Variant protein D11853_PEA_{—}1_P20 (SEQ ID NO:599) is encoded by the following transcript(s): D11853_PEA_{—}1_T7 (SEQ ID NO:59), D11853_PEA_{—}1_T17 (SEQ ID NO:67) and D11853_PEA_{—}1_T25 (SEQ ID NO:72), for which the sequence(s) is/are given at the end of the application.

[2216] The coding portion of transcript D11853_PEA_{—}1_T7 (SEQ ID NO:59) is shown in bold; this coding portion starts at position 108 and ends at position 287. The transcript also has the following SNPs as listed in Table 27 (given according to their position on the nucleotide sequence, with the alternative nucleic acid listed; the last column indicates whether the SNP is known or not; the presence of known SNPs in variant protein D11853_PEA_{—}1_P20 (SEQ ID NO:599) sequence provides support for the deduced sequence of this variant protein according to the present invention).

TABLE 27
Nucleic acid SNPs

| SNP position | | |
|---|---|---|
| on nucleotide | Alternative | Previously |
| sequence | nucleic acid | known SNP? |
| 406 | C -> | No |
| 408 | G -> | No |
| 411 | -> C | No |
| 427 | T -> | No |
| 1357 | A -> C | No |
| 1357 | A -> G | No |
| 1358 | G -> | No |
| 1358 | G -> A | No |
| 1377 | C -> G | No |
| 1384 | A -> C | No |
| 1440 | G -> A | No |
| 1512 | G -> A | No |
| 1512 | G -> C | No |
| 1529 | A -> | No |
| 1529 | A -> C | No |
| 1540 | A -> C | No |
| 1555 | C -> | No |
| 1555 | C -> G | No |
| 1625 | A -> C | No |
| 1649 | A -> C | No |
| 1657 | T -> G | No |
| 1675 | G -> A | No |
| 1675 | G -> C | No |
| 1683 | -> C | No |
| 1683 | -> T | No |
| 1690 | -> G | No |
| 1719 | C -> | No |
| 1719 | C -> G | No |
| 1750 | -> G | No |
| 1800 | G -> | No |
| 1809 | G -> A | No |
| 1829 | C -> T | No |
| 1844 | G -> | No |
| 1925 | G -> A | No |
| 1928 | A -> | No |
| 1928 | A -> C | No |
| 1974 | T -> | No |
| 1977 | T -> C | No |
| 1977 | T -> G | No |
| 2014 | T -> C | Yes |

[2217] The coding portion of transcript D11853_PEA_{—}1_T17 (SEQ ID NO:67) is shown in bold; this coding portion starts at position 108 and ends at position 287. The transcript also has the following SNPs as listed in Table 28 (given according to their position on the nucleotide sequence, with the alternative nucleic acid listed; the last column indicates whether the SNP is known or not; the presence of known SNPs in variant protein D11853_PEA_{—}1_P20 (SEQ ID NO:599) sequence provides support for the deduced sequence of this variant protein according to the present invention).

TABLE 28
Nucleic acid SNPs

| SNP position | | |
|---|---|---|
| on nucleotide | Alternative | Previously |
| sequence | nucleic acid | known SNP? |
| 406 | C -> | No |
| 408 | G -> | No |
| 411 | -> C | No |
| 427 | T -> | No |
| 1357 | A -> C | No |
| 1357 | A -> G | No |
| 1358 | G -> | No |
| 1358 | G -> A | No |
| 1377 | C -> G | No |
| 1384 | A -> C | No |
| 1440 | G -> A | No |
| 1512 | G -> A | No |
| 1512 | G -> C | No |
| 1529 | A -> | No |
| 1529 | A -> C | No |
| 1540 | A -> C | No |
| 1555 | C -> | No |
| 1555 | C -> G | No |
| 1625 | A -> C | No |
| 1649 | A -> C | No |
| 1657 | T -> G | No |
| 1675 | G -> A | No |
| 1675 | G -> C | No |
| 1683 | -> C | No |
| 1683 | -> T | No |
| 1690 | -> G | No |
| 1719 | C -> | No |
| 1719 | C -> G | No |
| 1750 | -> G | No |
| 1800 | G -> | No |
| 1809 | G -> A | No |
| 1829 | C -> T | No |
| 1844 | G -> | No |
| 1925 | G -> A | No |
| 1928 | A -> | No |
| 1928 | A -> C | No |
| 1974 | T -> | No |
| 1977 | T -> C | No |
| 1977 | T -> G | No |
| 2014 | T -> C | Yes |

[2218] The coding portion of transcript D11853_PEA_{—}1_T25 (SEQ ID NO:72) is shown in bold; this coding portion starts at position 108 and ends at position 287. The transcript also has the following SNPs as listed in Table 29 (given according to their position on the nucleotide sequence, with the alternative nucleic acid listed; the last column indicates whether the SNP is known or not; the presence of known SNPs in variant protein D11853_PEA_{—}1_P20 (SEQ ID NO:599) sequence provides support for the deduced sequence of this variant protein according to the present invention).

TABLE 29
Nucleic acid SNPs

| SNP position | | |
|---|---|---|
| on nucleotide | Alternative | Previously |
| sequence | nucleic acid | known SNP? |
| 406 | C -> | No |
| 408 | G -> | No |
| 411 | -> C | No |
| 427 | T -> | No |
| 1489 | A -> C | No |
| 1489 | A -> G | No |
| 1490 | G -> | No |
| 1490 | G -> A | No |
| 1509 | C -> G | No |
| 1516 | A -> C | No |
| 1572 | G -> A | No |
| 1644 | G -> A | No |
| 1644 | G -> C | No |
| 1661 | A -> | No |
| 1661 | A -> C | No |
| 1672 | A -> C | No |
| 1687 | C -> | No |
| 1687 | C -> G | No |
| 1757 | A -> C | No |
| 1986 | A -> C | No |
| 1994 | T -> G | No |
| 2012 | G -> A | No |
| 2012 | G -> C | No |
| 2020 | -> C | No |
| 2020 | -> T | No |
| 2027 | -> G | No |
| 2056 | C -> | No |
| 2056 | C -> G | No |
| 2087 | -> G | No |
| 2120 | C -> T | No |
| 2562 | G -> | No |
| 2571 | G -> A | No |
| 2591 | C -> T | No |
| 2606 | G -> | No |
| 2687 | G -> A | No |
| 2690 | A -> | No |
| 2690 | A -> C | No |
| 2736 | T -> | No |
| 2739 | T -> C | No |
| 2739 | T -> G | No |
| 2776 | T -> C | Yes |

[2219] Variant protein D11853_PEA_{—}1_P21 (SEQ ID NO:600) according to the present invention has an amino acid sequence as given at the end of the application; it is encoded by transcript(s) D11853_PEA_{—}1_T8 (SEQ ID NO:60). An alignment is given to the known protein (Membrane associated protein SLP-2 (SEQ ID NO:637)) at the end of the application. One or more alignments to one or more previously published protein sequences are given at the end of the application. A brief description of the relationship of the variant protein according to the present invention to each such aligned protein is as follows:

[2220] Comparison Report Between D11853_PEA_{—}1_P21 (SEQ ID NO:600) and Q96FY2 (SEQ ID NO:638):

[2221] 1. An isolated chimeric polypeptide encoding for D11853_PEA_{—}1_P21 (SEQ ID NO:600), comprising a first amino acid sequence being at least 90% homologous to MLARAARGTGALLLRGSLLASGRAPRRASSGLPRNTVVLFVPQQEAWVVERMGRFHRILEP corresponding to amino acids 1-61 of Q96FY2 (SEQ ID NO:638), which also corresponds to amino acids 1-61 of D11853_PEA_{—}1_P21 (SEQ ID NO:600), and a second amino acid sequence being at least 70%, optionally at least 80%, preferably at least 85%, more preferably at least 90% and most preferably at least 95% homologous to a polypeptide having the sequence VRNLFCPPWASQMTNPSRHAMSGGLPLGLPALLAPDSVGQT (SEQ ID NO:1553) corresponding to amino acids 62-102 of D11853_PEA_{—}1_P21 (SEQ ID NO:600), wherein said first amino acid sequence and second amino acid sequence are contiguous and in a sequential order.

[2222] 2. An isolated polypeptide encoding for a tail of D11853_PEA_{—}1_P21 (SEQ ID NO:600), comprising a polypeptide being at least 70%, optionally at least about 80%, preferably at least about 85%, more preferably at least about 90% and most preferably at least about 95% homologous to the sequence VRNLFCPPWASQMTNPSRHAMSGGLPLGLPALLAPDSVGQT (SEQ ID NO:1553) in D11853_PEA_{—}1_P21 (SEQ ID NO:600).

[2223] Comparison Report Between D11853_PEA_{—}1_P21 (SEQ ID NO:600) and Q9UJZ1 (SEQ ID NO:637):

[2224] 1. An isolated chimeric polypeptide encoding for D11853_PEA_{—}1_P21 (SEQ ID NO:600), comprising a first amino acid sequence being at least 90% homologous to MLARAARGTGALLLRGSLLASGRAPRRASSGLPRNTVVLFVPQQEAWVVERMGRFHRILEP corresponding to amino acids 1-61 of Q9UJZ1 (SEQ ID NO:637), which also corresponds to amino acids 1-61 of D11853_PEA_{—}1_P21 (SEQ ID NO:600), and a second amino acid sequence being at least 70%, optionally at least 80%, preferably at least 85%, more preferably at least 90% and most preferably at least 95% homologous to a polypeptide having the sequence VRNLFCPPWASQMTNPSRHAMSGGLPLGLPALLAPDSVGQT (SEQ ID NO:1553) corresponding to amino acids 62-102 of D11853_PEA_{—}1_P21 (SEQ ID NO:600), wherein said first amino acid sequence and second amino acid sequence are contiguous and in a sequential order.

[2225] 2. An isolated polypeptide encoding for a tail of D11853_PEA_{—}1_P21 (SEQ ID NO:600), comprising a polypeptide being at least 70%, optionally at least about 80%, preferably at least about 85%, more preferably at least about 90% and most preferably at least about 95% homologous to the sequence VRNLFCPPWASQMTNPSRHAMSGGLPLGLPALLAPDSVGQT (SEQ ID NO:1553) in D11853_PEA_{—}1_P21 (SEQ ID NO:600).

[2226] The location of the variant protein was determined according to results from a number of different software programs and analyses, including analyses from SignalP and other specialized programs. The variant protein is believed to be located as follows with regard to the cell: secreted. The protein localization is believed to be secreted because one of the two signal-peptide prediction programs (HMM:Signal peptide,NN:NO) predicts that this protein has a signal peptide.

[2227] Variant protein D11853_PEA_{—}1_P21 (SEQ ID NO:600) also has the following non-silent SNPs (Single Nucleotide Polymorphisms) as listed in Table 30, (given according to their position(s) on the amino acid sequence, with the alternative amino acid(s) listed; the last column indicates whether the SNP is known or not; the presence of known SNPs in variant protein D11853_PEA_{—}1_P21 (SEQ ID NO:600) sequence provides support for the deduced sequence of this variant protein according to the present invention).

TABLE 30
Amino acid mutations

| SNP position(s) | | |
|---|---|---|
| on amino acid | Alternative | Previously |
| sequence | amino acid(s) | known SNP? |
| 25 | P -> | No |
| 32 | L -> | No |

[2228] Variant protein D11853_PEA_{—}1_P21 (SEQ ID NO:600) is encoded by the following transcript(s): D11853_PEA_{—}1_T8 (SEQ ID NO:60), for which the sequence(s) is/are given at the end of the application. The coding portion of transcript D11853_PEA_{—}1_T8 (SEQ ID NO:60) is shown in bold; this coding portion starts at position 108 and ends at position 413. The transcript also has the following SNPs as listed in Table 31 (given according to their position on the nucleotide sequence, with the alternative nucleic acid listed; the last column indicates whether the SNP is known or not; the presence of known SNPs in variant protein D11853_PEA_{—}1_P21 (SEQ ID NO:600) sequence provides support for the deduced sequence of this variant protein according to the present invention).

TABLE 31
Nucleic acid SNPs

| SNP position | | |
|---|---|---|
| on nucleotide | Alternative | Previously |
| sequence | nucleic acid | known SNP? |
| 180 | C -> | No |
| 182 | G -> | No |
| 185 | -> C | No |
| 201 | T -> | No |
| 1131 | A -> C | No |
| 1131 | A -> G | No |
| 1132 | G -> | No |
| 1132 | G -> A | No |
| 1151 | C -> G | No |
| 1158 | A -> C | No |
| 1214 | G -> A | No |
| 1286 | G -> A | No |
| 1286 | G -> C | No |
| 1303 | A -> | No |
| 1303 | A -> C | No |
| 1314 | A -> C | No |
| 1329 | C -> | No |
| 1329 | C -> G | No |
| 1399 | A -> C | No |
| 1423 | A -> C | No |
| 1431 | T -> G | No |
| 1449 | G -> A | No |
| 1449 | G -> C | No |
| 1457 | -> C | No |
| 1457 | -> T | No |
| 1464 | -> G | No |
| 1493 | C -> | No |
| 1493 | C -> G | No |
| 1524 | -> G | No |
| 1574 | G -> | No |
| 1583 | G -> A | No |
| 1603 | C -> T | No |
| 1618 | G -> | No |
| 1699 | G -> A | No |
| 1702 | A -> | No |
| 1702 | A -> C | No |
| 1748 | T -> | No |
| 1751 | T -> C | No |
| 1751 | T -> G | No |
| 1788 | T -> C | Yes |

[2229] Variant protein D11853_PEA_{—}1_P22 (SEQ ID NO:601) according to the present invention has an amino acid sequence as given at the end of the application; it is encoded by transcript(s) D11853_PEA_{—}1_T9 (SEQ ID NO:61). An alignment is given to the known protein (Membrane associated protein SLP-2 (SEQ ID NO:637)) at the end of the application. One or more alignments to one or more previously published protein sequences are given at the end of the application. A brief description of the relationship of the variant protein according to the present invention to each such aligned protein is as follows:

[2230] Comparison Report Between D11853_PEA_{—}1_P22 (SEQ ID NO:601) and Q9P042 (SEQ ID NO:639):

[2231] 1. An isolated chimeric polypeptide encoding for D11853_PEA_{—}1_P22 (SEQ ID NO:601), comprising a first amino acid sequence being at least 70%, optionally at least 80%, preferably at least 85%, more preferably at least 90% and most preferably at least 95% homologous to a polypeptide having the sequence MLARAARGTGALLLRGSLLASGRAPR (SEQ ID NO:1530) corresponding to amino acids 1-26 of D11853_PEA_{—}1_P22 (SEQ ID NO:601), a second amino acid sequence being at least 90% homologous to RASSGLPRNTVVLFVPQQEAWVVERMGRFHRILEP corresponding to amino acids 13-47 of Q9P042 (SEQ ID NO:639), which also corresponds to amino acids 27-61 of D11853_PEA_{—}1_P22 (SEQ ID NO:601), and a third amino acid sequence being at least 70%, optionally at least 80%, preferably at least 85%, more preferably at least 90% and most preferably at least 95% homologous to a polypeptide having the sequence ELLLFWACSMC (SEQ ID NO:1555) corresponding to amino acids 62-72 of D11853_PEA_{—}1_P22 (SEQ ID NO:601), wherein said first amino acid sequence, second amino acid sequence and third amino acid sequence are contiguous and in a sequential order.

[2232] 2. An isolated polypeptide encoding for a head of D11853_PEA_{—}1_P22 (SEQ ID NO:601), comprising a polypeptide being at least 70%, optionally at least about 80%, preferably at least about 85%, more preferably at least about 90% and most preferably at least about 95% homologous to the sequence MLARAARGTGALLLRGSLLASGRAPR (SEQ ID NO:1530) of D11853_PEA_{—}1_P22 (SEQ ID NO:601).

[2233] 3. An isolated polypeptide encoding for a tail of D11853_PEA_{—}1_P22 (SEQ ID NO:601), comprising a polypeptide being at least 70%, optionally at least about 80%, preferably at least about 85%, more preferably at least about 90% and most preferably at least about 95% homologous to the sequence ELLLFWACSMC (SEQ ID NO:1555) in D11853_PEA_{—}1_P22 (SEQ ID NO:601).

[2234] Comparison Report Between D11853_PEA_{—}1_P22 (SEQ ID NO:601) and Q96FY2 (SEQ ID NO:638):

[2235] 1. An isolated chimeric polypeptide encoding for D11853_PEA_{—}1_P22 (SEQ ID NO:601), comprising a first amino acid sequence being at least 90% homologous to MLARAARGTGALLLRGSLLASGRAPRRASSGLPRNTVVLFVPQQEAWVVERMGRFHRILEP corresponding to amino acids 1-61 of Q96FY2 (SEQ ID NO:638), which also corresponds to amino acids 1-61 of D11853_PEA_{—}1_P22 (SEQ ID NO:601), and a second amino acid sequence being at least 70%, optionally at least 80%, preferably at least 85%, more preferably at least 90% and most preferably at least 95% homologous to a polypeptide having the sequence ELLLFWACSMC (SEQ ID NO:1555) corresponding to amino acids 62-72 of D11853_PEA_{—}1_P22 (SEQ ID NO:601), wherein said first amino acid sequence and second amino acid sequence are contiguous and in a sequential order.

[2236] 2. An isolated polypeptide encoding for a tail of D11853_PEA_{—}1_P22 (SEQ ID NO:601), comprising a polypeptide being at least 70%, optionally at least about 80%, preferably at least about 85%, more preferably at least about 90% and most preferably at least about 95% homologous to the sequence ELLLFWACSMC (SEQ ID NO:1555) in D11853_PEA_{—}1_P22 (SEQ ID NO:601).

[2237] Comparison report between D11853_PEA_{—}1_P22 (SEQ ID NO:601) and Q9UJZ1 (SEQ ID NO:637):

[2238] 1. An isolated chimeric polypeptide encoding for D11853_PEA_{—}1_P22 (SEQ ID NO:601), comprising a first amino acid sequence being at least 90% homologous to MLARAARGTGALLLRGSLLASGRAPRRASSGLPRNTVVLFVPQQEAWVVERMGRFHRILEP corresponding to amino acids 1-61 of Q9UJZ1 (SEQ ID NO:637), which also corresponds to amino acids 1-61 of D11853_PEA_{—}1_P22 (SEQ ID NO:601), and a second amino acid sequence being at least 70%, optionally at least 80%, preferably at least 85%, more preferably at least 90% and most preferably at least 95% homologous to a polypeptide having the sequence ELLLFWACSMC (SEQ ID NO:1555) corresponding to amino acids 62-72 of D11853_PEA_{—}1_P22 (SEQ ID NO:601), wherein said first amino acid sequence and second amino acid sequence are contiguous and in a sequential order.

[2239] 2. An isolated polypeptide encoding for a tail of D11853_PEA_{—}1_P22 (SEQ ID NO:601), comprising a polypeptide being at least 70%, optionally at least about 80%, preferably at least about 85%, more preferably at least about 90% and most preferably at least about 95% homologous to the sequence ELLLFWACSMC (SEQ ID NO:1555) in D11853_PEA_{—}1_P22 (SEQ ID NO:601).

[2240] The location of the variant protein was determined according to results from a number of different software programs and analyses, including analyses from SignalP and other specialized programs. The variant protein is believed to be located as follows with regard to the cell: secreted. The protein localization is believed to be secreted because one of the two signal-peptide prediction programs (HMM:Signal peptide,NN:NO) predicts that this protein has a signal peptide.

[2241] Variant protein D11853_PEA_{—}1_P22 (SEQ ID NO:601) also has the following non-silent SNPs (Single Nucleotide Polymorphisms) as listed in Table 32, (given according to their position(s) on the amino acid sequence, with the alternative amino acid(s) listed; the last column indicates whether the SNP is known or not; the presence of known SNPs in variant protein D11853_PEA_{—}1_P22 (SEQ ID NO:601) sequence provides support for the deduced sequence of this variant protein according to the present invention).

TABLE 32
Amino acid mutations

| SNP position(s) | | |
|---|---|---|
| on amino acid | Alternative | Previously |
| sequence | amino acid(s) | known SNP? |
| 25 | P -> | No |
| 32 | L -> | No |

[2242] Variant protein D11853_PEA_{—}1_P22 (SEQ ID NO:601) is encoded by the following transcript(s): D11853_PEA_{—}1_T9 (SEQ ID NO:61), for which the sequence(s) is/are given at the end of the application. The coding portion of transcript D11853_PEA_{—}1_T9 (SEQ ID NO:61) is shown in bold; this coding portion starts at position 108 and ends at position 323. The transcript also has the following SNPs as listed in Table 33 (given according to their position on the nucleotide sequence, with the alternative nucleic acid listed; the last column indicates whether the SNP is known or not; the presence of known SNPs in variant protein D11853_PEA_{—}1_P22 (SEQ ID NO:601) sequence provides support for the deduced sequence of this variant protein according to the present invention).

TABLE 33
Nucleic acid SNPs

| SNP position | | |
|---|---|---|
| on nucleotide | Alternative | Previously |
| sequence | nucleic acid | known SNP? |
| 180 | C -> | No |
| 182 | G -> | No |
| 185 | -> C | No |
| 201 | T -> | No |
| 757 | A -> C | No |
| 757 | A -> G | No |
| 758 | G -> | No |
| 758 | G -> A | No |
| 777 | C -> G | No |
| 784 | A -> C | No |
| 840 | G -> A | No |
| 912 | G -> A | No |
| 912 | G -> C | No |
| 929 | A -> | No |
| 929 | A -> C | No |
| 940 | A -> C | No |
| 955 | C -> | No |
| 955 | C -> G | No |
| 1025 | A -> C | No |
| 1049 | A -> C | No |
| 1057 | T -> G | No |
| 1075 | G -> A | No |
| 1075 | G -> C | No |
| 1083 | -> C | No |
| 1083 | -> T | No |
| 1090 | -> G | No |
| 1119 | C -> | No |
| 1119 | C -> G | No |
| 1150 | -> G | No |
| 1200 | G -> | No |
| 1209 | G -> A | No |
| 1229 | C -> T | No |
| 1244 | G -> | No |
| 1325 | G -> A | No |
| 1328 | A -> | No |
| 1328 | A -> C | No |
| 1374 | T -> | No |
| 1377 | T -> C | No |
| 1377 | T -> G | No |
| 1414 | T -> C | Yes |

[2243] Variant protein D11853_PEA_{—}1_P24 (SEQ ID NO:602) according to the present invention has an amino acid sequence as given at the end of the application; it is encoded by transcript(s) D11853_PEA_{—}1_T21 (SEQ ID NO:69). An alignment is given to the known protein (Membrane associated protein SLP-2 (SEQ ID NO:637)) at the end of the application. One or more alignments to one or more previously published protein sequences are given at the end of the application. A brief description of the relationship of the variant protein according to the present invention to each such aligned protein is as follows:

[2244] Comparison Report Between D11853_PEA_{—}1_P24 (SEQ ID NO:602) and Q9P042 (SEQ ID NO:639):

[2245] 1. An isolated chimeric polypeptide encoding for D11853_PEA_{—}1_P24 (SEQ ID NO:602), comprising a first amino acid sequence being at least 70%, optionally at least 80%, preferably at least 85%, more preferably at least 90% and most preferably at least 95% homologous to a polypeptide having the sequence MLARAARGTGALLLRGSLLASGRAPR (SEQ ID NO:1530) corresponding to amino acids 1-26 of D11853_PEA_{—}1_P24 (SEQ ID NO:602), a second amino acid sequence being at least 90% homologous to RASSGLPRNTVVLFVPQQEAWVVERMGRFHRILEPGLNILIPVLDRIRYVQSLKEIVINVPEQSAVTL corresponding to amino acids 13-80 of Q9P042 (SEQ ID NO:639), which also corresponds to amino acids 27-94 of D11853_PEA_{—}1_P24 (SEQ ID NO:602), and a third amino acid sequence being at least 70%, optionally at least 80%, preferably at least 85%, more preferably at least 90% and most preferably at least 95% homologous to a polypeptide having the sequence GTGVPECQHCGCHQPSC (SEQ ID NO:1557) corresponding to amino acids 95-111 of D11853_PEA_{—}1_P24 (SEQ ID NO:602), wherein said first amino acid sequence, second amino acid sequence and third amino acid sequence are contiguous and in a sequential order.

[2246] 2. An isolated polypeptide encoding for a head of D11853_PEA_{—}1_P24 (SEQ ID NO:602), comprising a polypeptide being at least 70%, optionally at least about 80%, preferably at least about 85%, more preferably at least about 90% and most preferably at least about 95% homologous to the sequence MLARAARGTGALLLRGSLLASGRAPR (SEQ ID NO:1530) of D11853_PEA_{—}1_P24 (SEQ ID NO:602).

[2247] 3. An isolated polypeptide encoding for a tail of D11853_PEA_{—}1_P24 (SEQ ID NO:602), comprising a polypeptide being at least 70%, optionally at least about 80%, preferably at least about 85%, more preferably at least about 90% and most preferably at least about 95% homologous to the sequence GTGVPECQHCGCHQPSC (SEQ ID NO:1557) in D11853_PEA_{—}1_P24 (SEQ ID NO:602).

[2248] Comparison Report Between D11853_PEA_{—}1_P24 (SEQ ID NO:602) and Q96FY2 (SEQ ID NO:638):

[2249] 1. An isolated chimeric polypeptide encoding for D11853_PEA_{—}1_P24 (SEQ ID NO:602), comprising a first amino acid sequence being at least 90% homologous to MLARAARGTGALLLRGSLLASGRAPRRASSGLPRNTVVLFVPQQEAWVVERMGRFHRILEPGLNILIPVLD RIRYVQSLKEIVINVPEQSAVTL corresponding to amino acids 1-94 of Q96FY2 (SEQ ID NO:638), which also corresponds to amino acids 1-94 of D11853_PEA_{—}1_P24 (SEQ ID NO:602), and a second amino acid sequence being at least 70%, optionally at least 80%, preferably at least 85%, more preferably at least 90% and most preferably at least 95% homologous to a polypeptide having the sequence GTGVPECQHCGCHQPSC (SEQ ID NO:1557) corresponding to amino acids 95-111 of D11853_PEA_{—}1_P24 (SEQ ID NO:602), wherein said first amino acid sequence and second amino acid sequence are contiguous and in a sequential order.

[2250] 2. An isolated polypeptide encoding for a tail of D11853_PEA_{—}1_P24 (SEQ ID NO:602), comprising a polypeptide being at least 70%, optionally at least about 80%, preferably at least about 85%, more preferably at least about 90% and most preferably at least about 95% homologous to the sequence GTGVPECQHCGCHQPSC (SEQ ID NO:1557) in D11853_PEA_{—}1_P24 (SEQ ID NO:602).

[2251] Comparison Report Between D11853_PEA_{—}1_P24 (SEQ ID NO:602) and Q9UJZ1 (SEQ ID NO:637):

[2252] 1. An isolated chimeric polypeptide encoding for D11853_PEA_{—}1_P24 (SEQ ID NO:602), comprising a first amino acid sequence being at least 90% homologous to MLARAARGTGALLLRGSLLASGRAPRRASSGLPRNTVVLFVPQQEAWVVERMGRFHRILEPGLNILIPVLD RIRYVQSLKEIVINVPEQSAVTL corresponding to amino acids 1-94 of Q9UJZ1 (SEQ ID NO:637), which also corresponds to amino acids 1-94 of D11853_PEA_{—}1_P24 (SEQ ID NO:602), and a second amino acid sequence being at least 70%, optionally at least 80%, preferably at least 85%, more preferably at least 90% and most preferably at least 95% homologous to a polypeptide having the sequence GTGVPECQHCGCHQPSC (SEQ ID NO:1557) corresponding to amino acids 95-111 of D11853_PEA_{—}1_P24 (SEQ ID NO:602), wherein said first amino acid sequence and second amino acid sequence are contiguous and in a sequential order.

[2253] 2. An isolated polypeptide encoding for a tail of D11853_PEA_{—}1_P24 (SEQ ID NO:602), comprising a polypeptide being at least 70%, optionally at least about 80%, preferably at least about 85%, more preferably at least about 90% and most preferably at least about 95% homologous to the sequence GTGVPECQHCGCHQPSC (SEQ ID NO:1557) in D11853_PEA_{—}1_P24 (SEQ ID NO:602).

[2254] The location of the variant protein was determined according to results from a number of different software programs and analyses, including analyses from SignalP and other specialized programs. The variant protein is believed to be located as follows with regard to the cell: secreted. The protein localization is believed to be secreted because one of the two signal-peptide prediction programs (HMM:Signal peptide,NN:NO) predicts that this protein has a signal peptide.

[2255] Variant protein D11853_PEA_{—}1_P24 (SEQ ID NO:602) also has the following non-silent SNPs (Single Nucleotide Polymorphisms) as listed in Table 34, (given according to their position(s) on the amino acid sequence, with the alternative amino acid(s) listed; the last column indicates whether the SNP is known or not; the presence of known SNPs in variant protein D11853_PEA_{—}1_P24 (SEQ ID NO:602) sequence provides support for the deduced sequence of this variant protein according to the present invention).

TABLE 34
Amino acid mutations

| SNP position(s) | | |
|---|---|---|
| on amino acid | Alternative | Previously |
| sequence | amino acid(s) | known SNP? |
| 25 | P -> | No |
| 32 | L -> | No |

[2256] Variant protein D11853_PEA_{—}1_P24 (SEQ ID NO:602) is encoded by the following transcript(s): D11853_PEA_{—}1_T21 (SEQ ID NO:69), for which the sequence(s) is/are given at the end of the application. The coding portion of transcript D11853_PEA_{—}1_T21 (SEQ ID NO:69) is shown in bold; this coding portion starts at position 108 and ends at position 440. The transcript also has the following SNPs as listed in Table 35 (given according to their position on the nucleotide sequence, with the alternative nucleic acid listed; the last column indicates whether the SNP is known or not; the presence of known SNPs in variant protein D11853_PEA_{—}1_P24 (SEQ ID NO:602) sequence provides support for the deduced sequence of this variant protein according to the present invention).

TABLE 35
Nucleic acid SNPs

| SNP position | | |
|---|---|---|
| on nucleotide | Alternative | Previously |
| sequence | nucleic acid | known SNP? |
| 180 | C -> | No |
| 182 | G -> | No |
| 185 | -> C | No |
| 201 | T -> | No |
| 479 | A -> C | No |
| 479 | A -> G | No |
| 480 | G -> | No |
| 480 | G -> A | No |
| 499 | C -> G | No |
| 506 | A -> C | No |
| 562 | G -> A | No |
| 634 | G -> A | No |
| 634 | G -> C | No |
| 651 | A -> | No |
| 651 | A -> C | No |
| 662 | A -> C | No |
| 677 | C -> | No |
| 677 | C -> G | No |
| 747 | A -> C | No |
| 771 | A -> C | No |
| 779 | T -> G | No |
| 797 | G -> A | No |
| 797 | G -> C | No |
| 805 | -> C | No |
| 805 | -> T | No |
| 812 | -> G | No |
| 841 | C -> | No |
| 841 | C -> G | No |
| 872 | -> G | No |
| 922 | G -> | No |
| 931 | G -> A | No |
| 951 | C -> T | No |
| 966 | G -> | No |
| 1047 | G -> A | No |
| 1050 | A -> | No |
| 1050 | A -> C | No |
| 1096 | T -> | No |
| 1099 | T -> C | No |
| 1099 | T -> G | No |
| 1136 | T -> C | Yes |

[2257] As noted above, cluster D11853 features 31 segment(s), which were listed in Table 2 above and for which the sequence(s) are given at the end of the application. These segment(s) are portions of nucleic acid sequence(s) which are described herein separately because they are of particular interest. A description of each segment according to the present invention is now provided.

[2258] Segment cluster D11853_PEA_{—}1_node_{—}3 (SEQ ID NO:419) according to the present invention is supported by 24 libraries. The number of libraries was determined as previously described. This segment can be found in the following transcript(s): D11853_PEA_{—}1_T7 (SEQ ID NO:59), D11853_PEA_{—}1_T17 (SEQ ID NO:67) and D11853_PEA_{—}1_T25 (SEQ ID NO:72). Table 36 below describes the starting and ending position of this segment on each transcript.

TABLE 36
Segment location on transcripts

| | | Segment |
|---|---|---|
| | Segment | ending |
| Transcript name | starting position | position |
| D11853_PEA_1_T7 (SEQ ID NO: 59) | 153 | 378 |
| D11853_PEA_1_T17 (SEQ ID NO: 67) | 153 | 378 |
| D11853_PEA_1_T25 (SEQ ID NO: 72) | 153 | 378 |

[2259] Segment cluster D11853_PEA_{—}1_node_{—}6 (SEQ ID NO:420) according to the present invention is supported by 25 libraries. The number of libraries was determined as previously described. This segment can be found in the following transcript(s): D11853_PEA_{—}1_T7 (SEQ ID NO:59), D11853_PEA_{—}1_T8 (SEQ ID NO:60), D11853_PEA_{—}1_T17 (SEQ ID NO:67) and D11853_PEA_{—}1_T25 (SEQ ID NO:72). Table 37 below describes the starting and ending position of this segment on each transcript.

TABLE 37
Segment location on transcripts

| | | Segment |
|---|---|---|
| | Segment | ending |
| Transcript name | starting position | position |
| D11853_PEA_1_T7 (SEQ ID NO: 59) | 517 | 890 |
| D11853_PEA_1_T8 (SEQ ID NO: 60) | 291 | 664 |
| D11853_PEA_1_T17 (SEQ ID NO: 67) | 517 | 890 |
| D11853_PEA_1_T25 (SEQ ID NO: 72) | 517 | 890 |

[2260] Segment cluster D11853_PEA_{—}1_node_{—}9 (SEQ ID NO:421) according to the present invention is supported by 1 libraries. The number of libraries was determined as previously described. This segment can be found in the following transcript(s): D11853_PEA_{—}1_T25 (SEQ ID NO:72). Table 38 below describes the starting and ending position of this segment on each transcript.

TABLE 38
Segment location on transcripts

| | | Segment |
|---|---|---|
| | Segment | ending |
| Transcript name | starting position | position |
| D11853_PEA_1_T25 (SEQ ID NO: 72) | 1108 | 1239 |

[2261] Segment cluster D11853_PEA_{—}1_node_{—}17 (SEQ ID NO:422) according to the present invention is supported by 3 libraries. The number of libraries was determined as previously described. This segment can be found in the following transcript(s): D11853_PEA_{—}1_T16 (SEQ ID NO:66) and D11853_PEA_{—}1_T23 (SEQ ID NO:70). Table 39 below describes the starting and ending position of this segment on each transcript.

TABLE 39
Segment location on transcripts

| | | Segment |
|---|---|---|
| | Segment | ending |
| Transcript name | starting position | position |
| D11853_PEA_1_T16 (SEQ ID NO: 66) | 552 | 700 |
| D11853_PEA_1_T23 (SEQ ID NO: 70) | 552 | 700 |

[2262] Segment cluster D11853_PEA_{—}1_node_{—}21 (SEQ ID NO:423) according to the present invention is supported by 6 libraries. The number of libraries was determined as previously described. This segment can be found in the following transcript(s): D11853_PEA_{—}1_T19 (SEQ ID NO:68) and D11853_PEA_{—}1_T23 (SEQ ID NO:70). Table 40 below describes the starting and ending position of this segment on each transcript.

TABLE 40
Segment location on transcripts

| | Segment | Segment |
|---|---|---|
| | starting | ending |
| Transcript name | position | position |
| D11853_PEA_1_T19 (SEQ ID NO: 68) | 687 | 830 |
| D11853_PEA_1_T23 (SEQ ID NO: 70) | 836 | 979 |

[2263] Segment cluster D11853_PEA_{—}1_node_{—}22 (SEQ ID NO:424) according to the present invention is supported by 287 libraries. The number of libraries was determined as previously described. This segment can be found in the following transcript(s): D11853_PEA_{—}1_T1 (SEQ ID NO:57), D11853_PEA_{—}1_T3 (SEQ ID NO:58), D11853_PEA_{—}1_T17 (SEQ ID NO:59), D11853_PEA_{—}1_T8 (SEQ ID NO:60), D11853_PEA_{—}1_T19 (SEQ ID NO:61), D11853_PEA_{—}1_T10 (SEQ ID NO:62), D11853_PEA_{—}1_T13 (SEQ ID NO:63), D11853_PEA_{—}1_T14 (SEQ ID NO:64), D11853_PEA_{—}1_T15 (SEQ ID NO:65), D11853_PEA_{—}1_T16 (SEQ ID NO:66), D11853_PEA_{—}1_T17 (SEQ ID NO:67), D11853_PEA_{—}1_T19 (SEQ ID NO:68), D11853_PEA_{—}1_T21 (SEQ ID NO:69), D11853_PEA_{—}1_T23 (SEQ ID NO:70), D11853_PEA_{—}1_T24 (SEQ ID NO:71) and D11853_PEA_{—}1_T25 (SEQ ID NO:72). Table 41 below describes the starting and ending position of this segment on each transcript.

TABLE 41
Segment location on transcripts

| | Segment | Segment |
|---|---|---|
| | starting | ending |
| Transcript name | position | position |
| D11853_PEA_1_T1 (SEQ ID NO: 57) | 687 | 831 |
| D11853_PEA_1_T3 (SEQ ID NO: 58) | 687 | 831 |
| D11853_PEA_1_T7 (SEQ ID NO: 59) | 1404 | 1548 |
| D11853_PEA_1_T8 (SEQ ID NO: 60) | 1178 | 1322 |
| D11853_PEA_1_T9 (SEQ ID NO: 61) | 804 | 948 |
| D11853_PEA_1_T10 (SEQ ID NO: 62) | 687 | 831 |
| D11853_PEA_1_T13 (SEQ ID NO: 63) | 687 | 831 |
| D11853_PEA_1_T14 (SEQ ID NO: 64) | 687 | 831 |
| D11853_PEA_1_T15 (SEQ ID NO: 65) | 687 | 831 |
| D11853_PEA_1_T16 (SEQ ID NO: 66) | 836 | 980 |
| D11853_PEA_1_T17 (SEQ ID NO: 67) | 1404 | 1548 |
| D11853_PEA_1_T19 (SEQ ID NO: 68) | 831 | 975 |
| D11853_PEA_1_T21 (SEQ ID NO: 69) | 526 | 670 |
| D11853_PEA_1_T23 (SEQ ID NO: 70) | 980 | 1124 |
| D11853_PEA_1_T24 (SEQ ID NO: 71) | 552 | 696 |
| D11853_PEA_1_T25 (SEQ ID NO: 72) | 1536 | 1680 |

[2264] Segment cluster D11853_PEA_{—}1_node_{—}23 (SEQ ID NO:425) according to the present invention is supported by 4 libraries. The number of libraries was determined as previously described. This segment can be found in the following transcript(s): D11853_PEA_{—}1_T13 (SEQ ID NO:63) and D11853_PEA_{—}1_T15 (SEQ ID NO:65). Table 42 below describes the starting and ending position of this segment on each transcript.

TABLE 42
Segment location on transcripts

| | Segment | Segment |
|---|---|---|
| | starting | ending |
| Transcript name | position | position |
| D11853_PEA_1_T13 (SEQ ID NO: 63) | 832 | 954 |
| D11853_PEA_1_T15 (SEQ ID NO: 65) | 832 | 954 |

[2265] Segment cluster D11853_PEA_{—}1_node_{—}25 (SEQ ID NO:426) according to the present invention is supported by 11 libraries. The number of libraries was determined as previously described. This segment can be found in the following transcript(s): D11853_PEA_{—}1_T10 (SEQ ID NO:62), D11853_PEA_{—}1_T15 (SEQ ID NO:65) and D11853_PEA_{—}1_T25 (SEQ ID NO:72). Table 43 below describes the starting and ending position of this segment on each transcript.

TABLE 43
Segment location on transcripts

| | Segment | Segment |
|---|---|---|
| | starting | ending |
| Transcript name | position | position |
| D11853_PEA_1_T10 (SEQ ID NO: 62) | 912 | 1116 |
| D11853_PEA_1_T15 (SEQ ID NO: 65) | 1035 | 1239 |
| D11853_PEA_1_T25 (SEQ ID NO: 72) | 1761 | 1965 |

[2266] Segment cluster D11853_PEA_{—}1_node_{—}26 (SEQ ID NO:427) according to the present invention is supported by 290 libraries. The number of libraries was determined as previously described. This segment can be found in the following transcript(s): D11853_PEA_{—}1_T1 (SEQ ID NO:57), D11853_PEA_{—}1_T3 (SEQ ID NO:58), D11853_PEA_{—}1_T7 (SEQ ID NO:59), D11853_PEA_{—}1_T8 (SEQ ID NO:60), D11853_PEA_{—}1_T9 (SEQ ID NO:61), D11853_PEA_{—}1_T10 (SEQ ID NO:62), D11853_PEA_{—}1_T13 (SEQ ID NO:63), D11853_PEA_{—}1_T15 (SEQ ID NO:65), D11853_PEA_{—}1_T16 (SEQ ID NO:66), D11853_PEA_{—}1_T17 (SEQ ID NO:67), D11853_PEA_{—}1_T19 (SEQ ID NO:68), D11853_PEA_{—}1_T21 (SEQ ID NO:69), D11853_PEA_{—}1_T23 (SEQ ID NO:70), D11853_PEA_{—}1_T24 (SEQ ID NO:71) and D11853_PEA_{—}1_T25 (SEQ ID NO:72). Table 44 below describes the starting and ending position of this segment on each transcript.

TABLE 44
Segment location on transcripts

| | Segment | Segment |
|---|---|---|
| | starting | ending |
| Transcript name | position | position |
| D11853_PEA_1_T1 (SEQ ID NO: 57) | 912 | 1040 |
| D11853_PEA_1_T3 (SEQ ID NO: 58) | 912 | 1040 |
| D11853_PEA_1_T7 (SEQ ID NO: 59) | 1629 | 1757 |
| D11853_PEA_1_T8 (SEQ ID NO: 60) | 1403 | 1531 |
| D11853_PEA_1_T9 (SEQ ID NO: 61) | 1029 | 1157 |
| D11853_PEA_1_T10 (SEQ ID NO: 62) | 1117 | 1245 |
| D11853_PEA_1_T13 (SEQ ID NO: 63) | 1035 | 1163 |
| D11853_PEA_1_T15 (SEQ ID NO: 65) | 1240 | 1368 |
| D11853_PEA_1_T16 (SEQ ID NO: 66) | 1061 | 1189 |
| D11853_PEA_1_T17 (SEQ ID NO: 67) | 1629 | 1757 |
| D11853_PEA_1_T19 (SEQ ID NO: 68) | 1056 | 1184 |
| D11853_PEA_1_T21 (SEQ ID NO: 69) | 751 | 879 |
| D11853_PEA_1_T23 (SEQ ID NO: 70) | 1205 | 1333 |
| D11853_PEA_1_T24 (SEQ ID NO: 71) | 777 | 905 |
| D11853_PEA_1_T25 (SEQ ID NO: 72) | 1966 | 2094 |

[2267] Segment cluster D11853_PEA_{—}1_node_{—}27 (SEQ ID NO:428) according to the present invention is supported by 8 libraries. The number of libraries was determined as previously described. This segment can be found in the following transcript(s): D11853_PEA_{—}1_T3 (SEQ ID NO:58) and D11853_PEA_{—}1_T25 (SEQ ID NO:72). Table 45 below describes the starting and ending position of this segment on each transcript.

TABLE 45
Segment location on transcripts

| | Segment | Segment |
|---|---|---|
| | starting | ending |
| Transcript name | position | position |
| D11853_PEA_1_T3 (SEQ ID NO: 58) | 1041 | 1460 |
| D11853_PEA_1_T25 (SEQ ID NO: 72) | 2095 | 2514 |

[2268] Segment cluster D11853_PEA_{—}1_node_{—}30 (SEQ ID NO:429) according to the present invention is supported by 249 libraries. The number of libraries was determined as previously described. This segment can be found in the following transcript(s): D11853_PEA_{—}1_T1 (SEQ ID NO:57), D11853_PEA_{—}1_T3 (SEQ ID NO:58), D11853_PEA_{—}1_T7 (SEQ ID NO:59), D11853_PEA_{—}1_T8 (SEQ ID NO:60), D11853_PEA_{—}1_T9 (SEQ ID NO:61), D11853_PEA_{—}1_T10 (SEQ ID NO:62), D11853_PEA_{—}1_T13 (SEQ ID NO:63), D11853_PEA_{—}1_T14 (SEQ ID NO:64), D11853_PEA_{—}1_T15 (SEQ ID NO:65), D11853_PEA_{—}1_T16 (SEQ ID NO:66), D11853_PEA_{—}1_T17 (SEQ ID NO:67), D11853_PEA_{—}1_T19 (SEQ ID NO:68), D11853_PEA_{—}1_T21 (SEQ ID NO:69), D11853_PEA_{—}1_T23 (SEQ ID NO:70), D11853_PEA_{—}1_T24 (SEQ ID NO:71), D11853_PEA_{—}1_T25 (SEQ ID NO:72), D11853_PEA_{—}1_T26 (SEQ ID NO:73) and D11853_PEA_{—}1_T27 (SEQ ID NO:74). Table 46 below describes the starting and ending position of this segment on each transcript.

TABLE 46
Segment location on transcripts

| | Segment | Segment |
|---|---|---|
| | starting | ending |
| Transcript name | position | position |
| D11853_PEA_1_T1 (SEQ ID NO: 57) | 1088 | 1207 |
| D11853_PEA_1_T3 (SEQ ID NO: 58) | 1513 | 1632 |
| D11853_PEA_1_T7 (SEQ ID NO: 59) | 1805 | 1924 |
| D11853_PEA_1_T8 (SEQ ID NO: 60) | 1579 | 1698 |
| D11853_PEA_1_T9 (SEQ ID NO: 61) | 1205 | 1324 |
| D11853_PEA_1_T10 (SEQ ID NO: 62) | 1293 | 1412 |
| D11853_PEA_1_T13 (SEQ ID NO: 63) | 1211 | 1330 |
| D11853_PEA_1_T14 (SEQ ID NO: 64) | 959 | 1078 |
| D11853_PEA_1_T15 (SEQ ID NO: 65) | 1416 | 1535 |
| D11853_PEA_1_T16 (SEQ ID NO: 66) | 1237 | 1356 |
| D11853_PEA_1_T17 (SEQ ID NO: 67) | 1805 | 1924 |
| D11853_PEA_1_T19 (SEQ ID NO: 68) | 1232 | 1351 |
| D11853_PEA_1_T21 (SEQ ID NO: 69) | 927 | 1046 |
| D11853_PEA_1_T23 (SEQ ID NO: 70) | 1381 | 1500 |
| D11853_PEA_1_T24 (SEQ ID NO: 71) | 953 | 1072 |
| D11853_PEA_1_T25 (SEQ ID NO: 72) | 2567 | 2686 |
| D11853_PEA_1_T26 (SEQ ID NO: 73) | 635 | 754 |
| D11853_PEA_1_T27 (SEQ ID NO: 74) | 534 | 653 |

[2269] Segment cluster D11853_PEA_{—}1_node_{—}32 (SEQ ID NO:430) according to the present invention is supported by 215 libraries. The number of libraries was determined as previously described. This segment can be found in the following transcript(s): D11853_PEA_{—}1_T1 (SEQ ID NO:57), D11853_PEA_{—}1_T3 (SEQ ID NO:58), D11853_PEA_{—}1_T7 (SEQ ID NO:59), D11853_PEA_{—}1_T8 (SEQ ID NO:60), D11853_PEA_{—}1_T9 (SEQ ID NO:61), D11853_PEA_{—}1_T10 (SEQ ID NO:62), D11853_PEA_{—}1_T13 (SEQ ID NO:63), D11853_PEA_{—}1_T14 (SEQ ID NO:64), D11853_PEA_{—}1_T15 (SEQ ID NO:65), D11853_PEA_{—}1_T16 (SEQ ID NO:66), D11853_PEA_{—}1_T17 (SEQ ID NO:67), D11853_PEA_{—}1_T19 (SEQ ID NO:68), D11853_PEA_{—}1_T21 (SEQ ID NO:69), D11853_PEA_{—}1_T23 (SEQ ID NO:70), D11853_PEA_{—}1_T24 (SEQ ID NO:71), D11853_PEA_{—}1_T25 (SEQ ID NO:72), D11853_PEA_{—}1_T26 (SEQ ID NO:73) and D11853_PEA_{—}1_T27 (SEQ ID NO:74). Table 47 below describes the starting and ending position of this segment on each transcript.

TABLE 47
Segment location on transcripts

| | Segment | Segment |
|---|---|---|
| | starting | ending |
| Transcript name | position | position |
| D11853_PEA_1_T1 (SEQ ID NO: 57) | 1208 | 1437 |
| D11853_PEA_1_T3 (SEQ ID NO: 58) | 1633 | 1745 |
| D11853_PEA_1_T7 (SEQ ID NO: 59) | 1925 | 2037 |
| D11853_PEA_1_T8 (SEQ ID NO: 60) | 1699 | 1811 |
| D11853_PEA_1_T9 (SEQ ID NO: 61) | 1325 | 1437 |
| D11853_PEA_1_T10 (SEQ ID NO: 62) | 1413 | 1525 |
| D11853_PEA_1_T13 (SEQ ID NO: 63) | 1331 | 1443 |
| D11853_PEA_1_T14 (SEQ ID NO: 64) | 1079 | 1191 |
| D11853_PEA_1_T15 (SEQ ID NO: 65) | 1536 | 1648 |
| D11853_PEA_1_T16 (SEQ ID NO: 66) | 1357 | 1469 |
| D11853_PEA_1_T17 (SEQ ID NO: 67) | 1925 | 2154 |
| D11853_PEA_1_T19 (SEQ ID NO: 68) | 1352 | 1464 |
| D11853_PEA_1_T21 (SEQ ID NO: 69) | 1047 | 1159 |
| D11853_PEA_1_T23 (SEQ ID NO: 70) | 1501 | 1613 |
| D11853_PEA_1_T24 (SEQ ID NO: 71) | 1073 | 1185 |
| D11853_PEA_1_T25 (SEQ ID NO: 72) | 2687 | 2799 |
| D11853_PEA_1_T26 (SEQ ID NO: 73) | 755 | 984 |
| D11853_PEA_1_T27 (SEQ ID NO: 74) | 654 | 766 |

[2270] According to an optional embodiment of the present invention, short segments related to the above cluster are also provided. These segments are up to about 120 bp in length, and so are included in a separate description.

[2271] Segment cluster D11853_PEA_{—}1_node_{—}0 (SEQ ID NO:431) according to the present invention is supported by 14 libraries. The number of libraries was determined as previously described. This segment can be found in the following transcript(s): D11853_PEA_{—}1_T1 (SEQ ID NO:57), D11853_PEA_{—}1_T3 (SEQ ID NO:58), D11853_PEA_{—}1_T7 (SEQ ID NO:59), D11853_PEA_{—}1_T8 (SEQ ID NO:60), D11853_PEA_{—}1_T9 (SEQ ID NO:61), D11853_PEA_{—}1_T10 (SEQ ID NO:62), D11853_PEA_{—}1_T13 (SEQ ID NO:63), D11853_PEA_{—}1_T14 (SEQ ID NO:64), D11853_PEA_{—}1_T15 (SEQ ID NO:65), D11853_PEA_{—}1_T16 (SEQ ID NO:66), D11853_PEA_{—}1_T17 (SEQ ID NO:67), D11853_PEA_{—}1_T19 (SEQ ID NO:68), D11853_PEA_{—}1_T21 (SEQ ID NO:69), D11853_PEA_{—}1_T23 (SEQ ID NO:70), D11853_PEA_{—}1_T24 (SEQ ID NO:71), D11853_PEA_{—}1_T25 (SEQ ID NO:72), D11853_PEA_{—}1_T26 (SEQ ID NO:73) and D11853_PEA_{—}1_T27 (SEQ ID NO:74). Table 48 below describes the starting and ending position of this segment on each transcript.

TABLE 48
Segment location on transcripts

| | Segment | Segment |
|---|---|---|
| | starting | ending |
| Transcript name | position | position |
| D11853_PEA_1_T1 (SEQ ID NO: 57) | 1 | 41 |
| D11853_PEA_1_T3 (SEQ ID NO: 58) | 1 | 41 |
| D11853_PEA_1_T7 (SEQ ID NO: 59) | 1 | 41 |
| D11853_PEA_1_T8 (SEQ ID NO: 60) | 1 | 41 |
| D11853_PEA_1_T9 (SEQ ID NO: 61) | 1 | 41 |
| D11853_PEA_1_T10 (SEQ ID NO: 62) | 1 | 41 |
| D11853_PEA_1_T13 (SEQ ID NO: 63) | 1 | 41 |
| D11853_PEA_1_T14 (SEQ ID NO: 64) | 1 | 41 |
| D11853_PEA_1_T15 (SEQ ID NO: 65) | 1 | 41 |
| D11853_PEA_1_T16 (SEQ ID NO: 66) | 1 | 41 |
| D11853_PEA_1_T17 (SEQ ID NO: 67) | 1 | 41 |
| D11853_PEA_1_T19 (SEQ ID NO: 68) | 1 | 41 |
| D11853_PEA_1_T21 (SEQ ID NO: 69) | 1 | 41 |
| D11853_PEA_1_T23 (SEQ ID NO: 70) | 1 | 41 |
| D11853_PEA_1_T24 (SEQ ID NO: 71) | 1 | 41 |
| D11853_PEA_1_T25 (SEQ ID NO: 72) | 1 | 41 |
| D11853_PEA_1_T26 (SEQ ID NO: 73) | 1 | 41 |
| D11853_PEA_1_T27 (SEQ ID NO: 74) | 1 | 41 |

[2272] Segment cluster D11853_PEA_{—}1_node_{—}1 (SEQ ID NO:432) according to the present invention is supported by 158 libraries. The number of libraries was determined as previously described. This segment can be found in the following transcript(s): D11853_PEA_{—}1_T1 (SEQ ID NO:57), D11853_PEA_{—}1_T3 (SEQ ID NO:58), D11853_PEA_{—}1_T7 (SEQ ID NO:59), D11853_PEA_{—}1_T8 (SEQ ID NO:60), D11853_PEA_{—}1_T9 (SEQ ID NO:61), D11853_PEA_{—}1_T10 (SEQ ID NO:62), D11853_PEA_{—}1_T13 (SEQ ID NO:63), D11853_PEA_{—}1_T14 (SEQ ID NO:64), D11853_PEA_{—}1_T15 (SEQ ID NO:65), D11853_PEA_{—}1_T16 (SEQ ID NO:66), D11853_PEA_{—}1_T17 (SEQ ID NO:67), D11853_PEA_{—}1_T19 (SEQ ID NO:68), D11853_PEA_{—}1_T21 (SEQ ID NO:69), D11853_PEA_{—}1_T23 (SEQ ID NO:70), D11853_PEA_{—}1_T24 (SEQ ID NO:71), D11853_PEA_{—}1_T25 (SEQ ID NO:72), D11853_PEA_{—}1_T26 (SEQ ID NO:73) and D11853_PEA_{—}1_T27 (SEQ ID NO:74). Table 49 below describes the starting and ending position of this segment on each transcript.

TABLE 49
Segment location on transcripts

| | Segment | Segment |
|---|---|---|
| | starting | ending |
| Transcript name | position | position |
| D11853_PEA_1_T1 (SEQ ID NO: 57) | 42 | 110 |
| D11853_PEA_1_T3 (SEQ ID NO: 58) | 42 | 110 |
| D11853_PEA_1_T7 (SEQ ID NO: 59) | 42 | 110 |
| D11853_PEA_1_T8 (SEQ ID NO: 60) | 42 | 110 |
| D11853_PEA_1_T9 (SEQ ID NO: 61) | 42 | 110 |
| D11853_PEA_1_T10 (SEQ ID NO: 62) | 42 | 110 |
| D11853_PEA_1_T13 (SEQ ID NO: 63) | 42 | 110 |
| D11853_PEA_1_T14 (SEQ ID NO: 64) | 42 | 110 |
| D11853_PEA_1_T15 (SEQ ID NO: 65) | 42 | 110 |
| D11853_PEA_1_T16 (SEQ ID NO: 66) | 42 | 110 |
| D11853_PEA_1_T17 (SEQ ID NO: 67) | 42 | 110 |
| D11853_PEA_1_T19 (SEQ ID NO: 68) | 42 | 110 |
| D11853_PEA_1_T21 (SEQ ID NO: 69) | 42 | 110 |
| D11853_PEA_1_T23 (SEQ ID NO: 70) | 42 | 110 |
| D11853_PEA_1_T24 (SEQ ID NO: 71) | 42 | 110 |
| D11853_PEA_1_T25 (SEQ ID NO: 72) | 42 | 110 |
| D11853_PEA_1_T26 (SEQ ID NO: 73) | 42 | 110 |
| D11853_PEA_1_T27 (SEQ ID NO: 74) | 42 | 110 |

[2273] Segment cluster D11853_PEA_{—}1_node_{—}2 (SEQ ID NO:433) according to the present invention is supported by 247 libraries. The number of libraries was determined as previously described. This segment can be found in the following transcript(s): D11853_PEA_{—}1_T1 (SEQ ID NO:57), D11853_PEA_{—}1_T3 (SEQ ID NO:58), D11853_PEA_{—}1_T7 (SEQ ID NO:59), D11853_PEA_{—}1_T8 (SEQ ID NO:60), D11853_PEA_{—}1_T9 (SEQ ID NO:61), D11853_PEA_{—}1_T10 (SEQ ID NO:62), D11853_PEA_{—}1_T13 (SEQ ID NO:63), D11853_PEA_{—}1_T14 (SEQ ID NO:64), D11853_PEA_{—}1_T15 (SEQ ID NO:65), D11853_PEA_{—}1_T16 (SEQ ID NO:66), D11853_PEA_{—}1_T17 (SEQ ID NO:67), D11853_PEA_{—}1_T19 (SEQ ID NO:68), D11853_PEA_{—}1_T21 (SEQ ID NO:69), D11853_PEA_{—}1_T23 (SEQ ID NO:70), D11853_PEA_{—}1_T24 (SEQ ID NO:71), D11853_PEA_{—}1_T25 (SEQ ID NO:72), D11853_PEA_{—}1_T26 (SEQ ID NO:73) and D11853_PEA_{—}1_T27 (SEQ ID NO:74). Table 50 below describes the starting and ending position of this segment on each transcript.

TABLE 50
Segment location on transcripts

| | Segment | Segment |
|---|---|---|
| | starting | ending |
| Transcript name | position | position |
| D11853_PEA_1_T1 (SEQ ID NO: 57) | 111 | 152 |
| D11853_PEA_1_T3 (SEQ ID NO: 58) | 111 | 152 |
| D11853_PEA_1_T7 (SEQ ID NO: 59) | 111 | 152 |
| D11853_PEA_1_T8 (SEQ ID NO: 60) | 111 | 152 |
| D11853_PEA_1_T9 (SEQ ID NO: 61) | 111 | 152 |
| D11853_PEA_1_T10 (SEQ ID NO: 62) | 111 | 152 |
| D11853_PEA_1_T13 (SEQ ID NO: 63) | 111 | 152 |
| D11853_PEA_1_T14 (SEQ ID NO: 64) | 111 | 152 |
| D11853_PEA_1_T15 (SEQ ID NO: 65) | 111 | 152 |
| D11853_PEA_1_T16 (SEQ ID NO: 66) | 111 | 152 |
| D11853_PEA_1_T17 (SEQ ID NO: 67) | 111 | 152 |
| D11853_PEA_1_T19 (SEQ ID NO: 68) | 111 | 152 |
| D11853_PEA_1_T21 (SEQ ID NO: 69) | 111 | 152 |
| D11853_PEA_1_T23 (SEQ ID NO: 70) | 111 | 152 |
| D11853_PEA_1_T24 (SEQ ID NO: 71) | 111 | 152 |
| D11853_PEA_1_T25 (SEQ ID NO: 72) | 111 | 152 |
| D11853_PEA_1_T26 (SEQ ID NO: 73) | 111 | 152 |
| D11853_PEA_1_T27 (SEQ ID NO: 74) | 111 | 152 |

[2274] Segment cluster D11853_PEA_{—}1_node_{—}4 (SEQ ID NO:434) according to the present invention is supported by 258 libraries. The number of libraries was determined as previously described. This segment can be found in the following transcript(s): D11853_PEA_{—}1_T1 (SEQ ID NO:57), D11853_PEA_{—}1_T3 (SEQ ID NO:58), D11853_PEA_{—}1_T7 (SEQ ID NO:59), D11853_PEA_{—}1_T8 (SEQ ID NO:60), D11853_PEA_{—}1_T9 (SEQ ID NO:61), D11853_PEA_{—}1_T10 (SEQ ID NO:62), D11853_PEA_{—}1_T13 (SEQ ID NO:63), D11853_PEA_{—}1_T14 (SEQ ID NO:64), D11853_PEA_{—}1_T15 (SEQ ID NO:65), D11853_PEA_{—}1_T16 (SEQ ID NO:66), D11853_PEA_{—}1_T17 (SEQ ID NO:67), D11853_PEA_{—}1_T19 (SEQ ID NO:68), D11853_PEA_{—}1_T21 (SEQ ID NO:69), D11853_PEA_{—}1_T23 (SEQ ID NO:70), D11853_PEA_{—}1_T24 (SEQ ID NO:71), D11853_PEA_{—}1_T25 (SEQ ID NO:72), D11853_PEA_{—}1_T26 (SEQ ID NO:73) and D11853_PEA_{—}1_T27 (SEQ ID NO:74). Table 51 below describes the starting and ending position of this segment on each transcript.

TABLE 51
Segment location on transcripts

| | Segment | Segment |
|---|---|---|
| | starting | ending |
| Transcript name | position | position |
| D11853_PEA_1_T1 (SEQ ID NO: 57) | 153 | 185 |
| D11853_PEA_1_T3 (SEQ ID NO: 58) | 153 | 185 |
| D11853_PEA_1_T7 (SEQ ID NO: 59) | 379 | 411 |
| D11853_PEA_1_T8 (SEQ ID NO: 60) | 153 | 185 |
| D11853_PEA_1_T9 (SEQ ID NO: 61) | 153 | 185 |
| D11853_PEA_1_T10 (SEQ ID NO: 62) | 153 | 185 |
| D11853_PEA_1_T13 (SEQ ID NO: 63) | 153 | 185 |
| D11853_PEA_1_T14 (SEQ ID NO: 64) | 153 | 185 |
| D11853_PEA_1_T15 (SEQ ID NO: 65) | 153 | 185 |
| D11853_PEA_1_T16 (SEQ ID NO: 66) | 153 | 185 |
| D11853_PEA_1_T17 (SEQ ID NO: 67) | 379 | 411 |
| D11853_PEA_1_T19 (SEQ ID NO: 68) | 153 | 185 |
| D11853_PEA_1_T21 (SEQ ID NO: 69) | 153 | 185 |
| D11853_PEA_1_T23 (SEQ ID NO: 70) | 153 | 185 |
| D11853_PEA_1_T24 (SEQ ID NO: 71) | 153 | 185 |
| D11853_PEA_1_T25 (SEQ ID NO: 72) | 379 | 411 |
| D11853_PEA_1_T26 (SEQ ID NO: 73) | 153 | 185 |
| D11853_PEA_1_T27 (SEQ ID NO: 74) | 153 | 185 |

[2275] Segment cluster D11853_PEA_{—}1_node_{—}5 (SEQ ID NO:435) according to the present invention is supported by 291 libraries. The number of libraries was determined as previously described. This segment can be found in the following transcript(s): D11853_PEA_{—}1_T1 (SEQ ID NO:57), D11853_PEA_{—}1_T3 (SEQ ID NO:58), D11853_PEA_{—}1_T7 (SEQ ID NO:59), D11853_PEA_{—}1_T8 (SEQ ID NO:60), D11853_PEA_{—}1_T9 (SEQ ID NO:61), D11853_PEA_{—}1_T10 (SEQ ID NO:62), D11853_PEA_{—}1_T13 (SEQ ID NO:63), D11853_PEA_{—}1_T14 (SEQ ID NO:64), D11853_PEA_{—}1_T15 (SEQ ID NO:65), D11853_PEA_{—}1_T16 (SEQ ID NO:66), D11853_PEA_{—}1_T17 (SEQ ID NO:67), D11853_PEA_{—}1_T19 (SEQ ID NO:68), D11853_PEA_{—}1_T21 (SEQ ID NO:69), D11853_PEA_{—}1_T23 (SEQ ID NO:70), D11853_PEA_{—}1_T24 (SEQ ID NO:71), D11853_PEA_{—}1_T25 (SEQ ID NO:72), D11853_PEA_{—}1_T26 (SEQ ID NO:73) and D11853_PEA_{—}1_T27 (SEQ ID NO:74). Table 52 below describes the starting and ending position of this segment on each transcript.

TABLE 52
Segment location on transcripts

| | Segment | Segment |
|---|---|---|
| | starting | ending |
| Transcript name | position | position |
| D11853_PEA_1_T1 (SEQ ID NO: 57) | 186 | 290 |
| D11853_PEA_1_T3 (SEQ ID NO: 58) | 186 | 290 |
| D11853_PEA_1_T7 (SEQ ID NO: 59) | 412 | 516 |
| D11853_PEA_1_T8 (SEQ ID NO: 60) | 186 | 290 |
| D11853_PEA_1_T9 (SEQ ID NO: 61) | 186 | 290 |
| D11853_PEA_1_T10 (SEQ ID NO: 62) | 186 | 290 |
| D11853_PEA_1_T13 (SEQ ID NO: 63) | 186 | 290 |
| D11853_PEA_1_T14 (SEQ ID NO: 64) | 186 | 290 |
| D11853_PEA_1_T15 (SEQ ID NO: 65) | 186 | 290 |
| D11853_PEA_1_T16 (SEQ ID NO: 66) | 186 | 290 |
| D11853_PEA_1_T17 (SEQ ID NO: 67) | 412 | 516 |
| D11853_PEA_1_T19 (SEQ ID NO: 68) | 186 | 290 |
| D11853_PEA_1_T21 (SEQ ID NO: 69) | 186 | 290 |
| D11853_PEA_1_T23 (SEQ ID NO: 70) | 186 | 290 |
| D11853_PEA_1_T24 (SEQ ID NO: 71) | 186 | 290 |
| D11853_PEA_1_T25 (SEQ ID NO: 72) | 412 | 516 |
| D11853_PEA_1_T26 (SEQ ID NO: 73) | 186 | 290 |
| D11853_PEA_1_T27 (SEQ ID NO: 74) | 186 | 290 |

[2276] Segment cluster D11853_PEA_{—}1_node_{—}7 (SEQ ID NO:436) according to the present invention is supported by 20 libraries. The number of libraries was determined as previously described. This segment can be found in the following transcript(s): D11853_PEA_{—}1_T7 (SEQ ID NO:59), D11853_PEA_{—}1_T8 (SEQ ID NO:60), D11853_PEA_{—}1_T9 (SEQ ID NO:61), D11853_PEA_{—}1_T17 (SEQ ID NO:67) and D11853_PEA_{—}1_T25 (SEQ ID NO:72). Table 53 below describes the starting and ending position of this segment on each transcript.

TABLE 53
Segment location on transcripts

| | Segment | Segment |
|---|---|---|
| | starting | ending |
| Transcript name | position | position |
| D11853_PEA_1_T7 (SEQ ID NO: 59) | 891 | 1007 |
| D11853_PEA_1_T8 (SEQ ID NO: 60) | 665 | 781 |
| D11853_PEA_1_T9 (SEQ ID NO: 61) | 291 | 407 |
| D11853_PEA_1_T17 (SEQ ID NO: 67) | 891 | 1007 |
| D11853_PEA_1_T25 (SEQ ID NO: 72) | 891 | 1007 |

[2277] Segment cluster D11853_PEA_{—}1_node_{—}8 (SEQ ID NO:437) according to the present invention is supported by 304 libraries. The number of libraries was determined as previously described. This segment can be found in the following transcript(s): D11853_PEA_{—}1_T1 (SEQ ID NO:57), D11853_PEA_{—}1_T3 (SEQ ID NO:58), D11853_PEA_{—}1_T7 (SEQ ID NO:59), D11853_PEA_{—}1_T8 (SEQ ID NO:60), D11853_PEA_{—}1_T9 (SEQ ID NO:61), D11853_PEA_{—}1_T10 (SEQ ID NO:62), D11853_PEA_{—}1_T13 (SEQ ID NO:63), D11853_PEA_{—}1_T14 (SEQ ID NO:64), D11853_PEA_{—}1_T15 (SEQ ID NO:65), D11853_PEA_{—}1_T16 (SEQ ID NO:66), D11853_PEA_{—}1_T17 (SEQ ID NO:67), D11853_PEA_{—}1_T19 (SEQ ID NO:68), D11853_PEA_{—}1_T21 (SEQ ID NO:69), D11853_PEA_{—}1_T23 (SEQ ID NO:70), D11853_PEA_{—}1_T24 (SEQ ID NO:71), D11853_PEA_{—}1_T25 (SEQ ID NO:72), D11853_PEA_{—}1_T26 (SEQ ID NO:73) and D11853_PEA_{—}1_T27 (SEQ ID NO:74). Table 54 below describes the starting and ending position of this segment on each transcript.

TABLE 54
Segment location on transcripts

| | Segment | Segment |
|---|---|---|
| | starting | ending |
| Transcript name | position | position |
| D11853_PEA_1_T1 (SEQ ID NO: 57) | 291 | 390 |
| D11853_PEA_1_T3 (SEQ ID NO: 58) | 291 | 390 |
| D11853_PEA_1_T7 (SEQ ID NO: 59) | 1008 | 1107 |
| D11853_PEA_1_T8 (SEQ ID NO: 60) | 782 | 881 |
| D11853_PEA_1_T9 (SEQ ID NO: 61) | 408 | 507 |
| D11853_PEA_1_T10 (SEQ ID NO: 62) | 291 | 390 |
| D11853_PEA_1_T13 (SEQ ID NO: 63) | 291 | 390 |
| D11853_PEA_1_T14 (SEQ ID NO: 64) | 291 | 390 |
| D11853_PEA_1_T15 (SEQ ID NO: 65) | 291 | 390 |
| D11853_PEA_1_T16 (SEQ ID NO: 66) | 291 | 390 |
| D11853_PEA_1_T17 (SEQ ID NO: 67) | 1008 | 1107 |
| D11853_PEA_1_T19 (SEQ ID NO: 68) | 291 | 390 |
| D11853_PEA_1_T21 (SEQ ID NO: 69) | 291 | 390 |
| D11853_PEA_1_T23 (SEQ ID NO: 70) | 291 | 390 |
| D11853_PEA_1_T24 (SEQ ID NO: 71) | 291 | 390 |
| D11853_PEA_1_T25 (SEQ ID NO: 72) | 1008 | 1107 |
| D11853_PEA_1_T26 (SEQ ID NO: 73) | 291 | 390 |
| D11853_PEA_1_T27 (SEQ ID NO: 74) | 291 | 390 |

[2278] Segment cluster D11853_PEA_{—}1_node_{—}10 (SEQ ID NO:438) according to the present invention is supported by 237 libraries. The number of libraries was determined as previously described. This segment can be found in the following transcript(s): D11853_PEA_{—}1_T1 (SEQ ID NO:57), D11853_PEA_{—}1_T3 (SEQ ID NO:58), D11853_PEA_{—}1_T7 (SEQ ID NO:59), D11853_PEA_{—}1_T8 (SEQ ID NO:60), D11853_PEA_{—}1_T9 (SEQ ID NO:61), D11853_PEA_{—}1_T10 (SEQ ID NO:62), D11853_PEA_{—}1_T13 (SEQ ID NO:63), D11853_PEA_{—}1_T14 (SEQ ID NO:64), D11853_PEA_{—}1_T15 (SEQ ID NO:65), D11853_PEA_{—}1_T16 (SEQ ID NO:66), D11853_PEA_{—}1_T17 (SEQ ID NO:67), D11853_PEA_{—}1_T19 (SEQ ID NO:68), D11853_PEA_{—}1_T23 (SEQ ID NO:70), D11853_PEA_{—}1_T24 (SEQ ID NO:71), D11853_PEA_{—}1_T25 (SEQ ID NO:72), D11853_PEA_{—}1_T26 (SEQ ID NO:73) and D11853_PEA_{—}1_T27 (SEQ ID NO:74). Table 55 below describes the starting and ending position of this segment on each transcript.

TABLE 55
Segment location on transcripts

| | | Segment |
|---|---|---|
| | Segment | ending |
| Transcript name | starting position | position |
| D11853_PEA_1_T1 (SEQ ID NO: 57) | 391 | 449 |
| D11853_PEA_1_T3 (SEQ ID NO: 58) | 391 | 449 |
| D11853_PEA_1_T7 (SEQ ID NO: 59) | 1108 | 1166 |
| D11853_PEA_1_T8 (SEQ ID NO: 60) | 882 | 940 |
| D11853_PEA_1_T9 (SEQ ID NO: 61) | 508 | 566 |
| D11853_PEA_1_T10 (SEQ ID NO: 62) | 391 | 449 |
| D11853_PEA_1_T13 (SEQ ID NO: 63) | 391 | 449 |
| D11853_PEA_1_T14 (SEQ ID NO: 64) | 391 | 449 |
| D11853_PEA_1_T15 (SEQ ID NO: 65) | 391 | 449 |
| D11853_PEA_1_T16 (SEQ ID NO: 66) | 391 | 449 |
| D11853_PEA_1_T17 (SEQ ID NO: 67) | 1108 | 1166 |
| D11853_PEA_1_T19 (SEQ ID NO: 68) | 391 | 449 |
| D11853_PEA_1_T23 (SEQ ID NO: 70) | 391 | 449 |
| D11853_PEA_1_T24 (SEQ ID NO: 71) | 391 | 449 |
| D11853_PEA_1_T25 (SEQ ID NO: 72) | 1240 | 1298 |
| D11853_PEA_1_T26 (SEQ ID NO: 73) | 391 | 449 |
| D11853_PEA_1_T27 (SEQ ID NO: 74) | 391 | 449 |

[2279] Segment cluster D11853_PEA_{—}1_node_{—}12 (SEQ ID NO:439) according to the present invention is supported by 239 libraries. The number of libraries was determined as previously described. This segment can be found in the following transcript(s): D11853_PEA_{—}1_T1 (SEQ ID NO:57), D11853_PEA_{—}1_T3 (SEQ ID NO:58), D11853_PEA_{—}1_T7 (SEQ ID NO:59), D11853_PEA_{—}1_T8 (SEQ ID NO:60), D11853_PEA_{—}1_T9 (SEQ ID NO:61), D11853_PEA_{—}1_T10 (SEQ ID NO:62), D11853_PEA_{—}1_T13 (SEQ ID NO:63), D11853_PEA_{—}1_T14 (SEQ ID NO:64), D11853_PEA_{—}1_T15 (SEQ ID NO:65), D11853_PEA_{—}1_T16 (SEQ ID NO:66), D11853_PEA_{—}1_T17 (SEQ ID NO:67), D11853_PEA_{—}1_T19 (SEQ ID NO:68), D11853_PEA_{—}1_T23 (SEQ ID NO:70), D11853_PEA_{—}1_T24 (SEQ ID NO:71), D11853_PEA_{—}1_T25 (SEQ ID NO:72), D11853_PEA_{—}1_T26 (SEQ ID NO:73) and D11853_PEA_{—}1_T27 (SEQ ID NO:74). Table 56 below describes the starting and ending position of this segment on each transcript.

TABLE 56
Segment location on transcripts

| | | Segment |
|---|---|---|
| | Segment | ending |
| Transcript name | starting position | position |
| D11853_PEA_1_T1 (SEQ ID NO: 57) | 450 | 482 |
| D11853_PEA_1_T3 (SEQ ID NO: 58) | 450 | 482 |
| D11853_PEA_1_T7 (SEQ ID NO: 59) | 1167 | 1199 |
| D11853_PEA_1_T8 (SEQ ID NO: 60) | 941 | 973 |
| D11853_PEA_1_T9 (SEQ ID NO: 61) | 567 | 599 |
| D11853_PEA_1_T10 (SEQ ID NO: 62) | 450 | 482 |
| D11853_PEA_1_T13 (SEQ ID NO: 63) | 450 | 482 |
| D11853_PEA_1_T14 (SEQ ID NO: 64) | 450 | 482 |
| D11853_PEA_1_T15 (SEQ ID NO: 65) | 450 | 482 |
| D11853_PEA_1_T16 (SEQ ID NO: 66) | 450 | 482 |
| D11853_PEA_1_T17 (SEQ ID NO: 67) | 1167 | 1199 |
| D11853_PEA_1_T19 (SEQ ID NO: 68) | 450 | 482 |
| D11853_PEA_1_T23 (SEQ ID NO: 70) | 450 | 482 |
| D11853_PEA_1_T24 (SEQ ID NO: 71) | 450 | 482 |
| D11853_PEA_1_T25 (SEQ ID NO: 72) | 1299 | 1331 |
| D11853_PEA_1_T26 (SEQ ID NO: 73) | 450 | 482 |
| D11853_PEA_1_T27 (SEQ ID NO: 74) | 450 | 482 |

[2280] Segment cluster D11853_PEA_{—}1_node_{—}13 (SEQ ID NO:440) according to the present invention can be found in the following transcript(s): D11853_PEA_{—}1_T1 (SEQ ID NO:57), D11853_PEA_{—}1_T3 (SEQ ID NO:58), D11853_PEA_{—}1_T7 (SEQ ID NO:59), D11853_PEA_{—}1_T8 (SEQ ID NO:60), D11853_PEA_{—}1_T9 (SEQ ID NO:61), D11853_PEA_{—}1_T10 (SEQ ID NO:62) D11853_PEA_{—}1_T13 (SEQ ID NO:63), D11853_PEA_{—}1_T14 (SEQ ID NO:64), D11853_PEA_{—}1_T15 (SEQ ID NO:65), D11853_PEA_{—}1_T16 (SEQ ID NO:66), D11853_PEA_{—}1_T17 (SEQ ID NO:67), D11853_PEA_{—}1_T19 (SEQ ID NO:68), D11853_PEA_{—}1_T23 (SEQ ID NO:70), D11853_PEA_{—}1_T24 (SEQ ID NO:71), D11853_PEA_{—}1_T25 (SEQ ID NO:72), D11853_PEA_{—}1_T26 (SEQ ID NO:73) and D11853_PEA_{—}1_T27 (SEQ ID NO:74). Table 57 below describes the starting and ending position of this segment on each transcript.

TABLE 57
Segment location on transcripts

| | | Segment |
|---|---|---|
| | Segment | ending |
| Transcript name | starting position | position |
| D11853_PEA_1_T1 (SEQ ID NO: 57) | 483 | 495 |
| D11853_PEA_1_T3 (SEQ ID NO: 58) | 483 | 495 |
| D11853_PEA_1_T7 (SEQ ID NO: 59) | 1200 | 1212 |
| D11853_PEA_1_T8 (SEQ ID NO: 60) | 974 | 986 |
| D11853_PEA_1_T9 (SEQ ID NO: 61) | 600 | 612 |
| D11853_PEA_1_T10 (SEQ ID NO: 62) | 483 | 495 |
| D11853_PEA_1_T13 (SEQ ID NO: 63) | 483 | 495 |
| D11853_PEA_1_T14 (SEQ ID NO: 64) | 483 | 495 |
| D11853_PEA_1_T15 (SEQ ID NO: 65) | 483 | 495 |
| D11853_PEA_1_T16 (SEQ ID NO: 66) | 483 | 495 |
| D11853_PEA_1_T17 (SEQ ID NO: 67) | 1200 | 1212 |
| D11853_PEA_1_T19 (SEQ ID NO: 68) | 483 | 495 |
| D11853_PEA_1_T23 (SEQ ID NO: 70) | 483 | 495 |
| D11853_PEA_1_T24 (SEQ ID NO: 71) | 483 | 495 |
| D11853_PEA_1_T25 (SEQ ID NO: 72) | 1332 | 1344 |
| D11853_PEA_1_T26 (SEQ ID NO: 73) | 483 | 495 |
| D11853_PEA_1_T27 (SEQ ID NO: 74) | 483 | 495 |

[2281] Segment cluster D11853_PEA_{—}1_node_{—}14 (SEQ ID NO:441) according to the present invention can be found in the following transcript(s): D11853_PEA_{—}1_T1 (SEQ ID NO:57), D11853_PEA_{—}1_T3 (SEQ ID NO:58), D11853_PEA_{—}1_T7 (SEQ ID NO:59), D11853_PEA_{—}1_T8 (SEQ ID NO:60), D11853_PEA_{—}1_T9 (SEQ ID NO:61), D11853_PEA_{—}1_T10 (SEQ ID NO:62), D11853_PEA_{—}1_T13 (SEQ ID NO:63), D11853_PEA_{—}1_T14 (SEQ ID NO:64), D11853_PEA_{—}1_T15 (SEQ ID NO:65), D11853_PEA_{—}1_T16 (SEQ ID NO:66), D11853_PEA_{—}1_T17 (SEQ ID NO:67), D11853_PEA_{—}1_T19 (SEQ ID NO:68), D11853_PEA_{—}1_T23 (SEQ ID NO:70), D11853_PEA_{—}1_T24 (SEQ ID NO:71), D11853_PEA_{—}1_T25 (SEQ ID NO:72), D11853_PEA_{—}1_T26 (SEQ ID NO:73) and D11853_PEA_{—}1_T27 (SEQ ID NO:74). Table 58 below describes the starting and ending position of this segment on each transcript.

TABLE 58
Segment location on transcripts

| | | Segment |
|---|---|---|
| | Segment | ending |
| Transcript name | starting position | position |
| D11853_PEA_1_T1 (SEQ ID NO: 57) | 496 | 511 |
| D11853_PEA_1_T3 (SEQ ID NO: 58) | 496 | 511 |
| D11853_PEA_1_T7 (SEQ ID NO: 59) | 1213 | 1228 |
| D11853_PEA_1_T8 (SEQ ID NO: 60) | 987 | 1002 |
| D11853_PEA_1_T9 (SEQ ID NO: 61) | 613 | 628 |
| D11853_PEA_1_T10 (SEQ ID NO: 62) | 496 | 511 |
| D11853_PEA_1_T13 (SEQ ID NO: 63) | 496 | 511 |
| D11853_PEA_1_T14 (SEQ ID NO: 64) | 496 | 511 |
| D11853_PEA_1_T15 (SEQ ID NO: 65) | 496 | 511 |
| D11853_PEA_1_T16 (SEQ ID NO: 66) | 496 | 511 |
| D11853_PEA_1_T17 (SEQ ID NO: 67) | 1213 | 1228 |
| D11853_PEA_1_T19 (SEQ ID NO: 68) | 496 | 511 |
| D11853_PEA_1_T23 (SEQ ID NO: 70) | 496 | 511 |
| D11853_PEA_1_T24 (SEQ ID NO: 71) | 496 | 511 |
| D11853_PEA_1_T25 (SEQ ID NO: 72) | 1345 | 1360 |
| D11853_PEA_1_T26 (SEQ ID NO: 73) | 496 | 511 |
| D11853_PEA_1_T27 (SEQ ID NO: 74) | 496 | 511 |

[2282] Segment cluster D11853_PEA_{—}1_node_{—}15 (SEQ ID NO:442) according to the present invention can be found in the following transcript(s): D11853_PEA_{—}1_T1 (SEQ ID NO:57), D11853_PEA_{—}1_T3 (SEQ ID NO:58), D11853_PEA_{—}1_T7 (SEQ ID NO:59), D11853_PEA_{—}1_T8 (SEQ ID NO:60), D11853_PEA_{—}1_T9 (SEQ ID NO:61), D11853_PEA_{—}1_T10 (SEQ ID NO:62), D11853_PEA_{—}1_T13 (SEQ ID NO:63), D11853_PEA_{—}1_T14 (SEQ ID NO:64), D11853_PEA_{—}1_T15 (SEQ ID NO:65), D11853_PEA_{—}1_T16 (SEQ ID NO:66), D11853_PEA_{—}1_T17 (SEQ ID NO:67), D11853_PEA_{—}1_T19 (SEQ ID NO:68), D11853_PEA_{—}1_T23 (SEQ ID NO:70), D11853_PEA_{—}1_T24 (SEQ ID NO:71), D11853_PEA_{—}1_T25 (SEQ ID NO:72), D11853_PEA_{—}1_T26 (SEQ ID NO:73) and D11853_PEA_{—}1_T27 (SEQ ID NO:74). Table 59 below describes the starting and ending position of this segment on each transcript.

TABLE 59
Segment location on transcripts

| | | Segment |
|---|---|---|
| | Segment | ending |
| Transcript name | starting position | position |
| D11853_PEA_1_T1 (SEQ ID NO: 57) | 512 | 533 |
| D11853_PEA_1_T3 (SEQ ID NO: 58) | 512 | 533 |
| D11853_PEA_1_T7 (SEQ ID NO: 59) | 1229 | 1250 |
| D11853_PEA_1_T8 (SEQ ID NO: 60) | 1003 | 1024 |
| D11853_PEA_1_T9 (SEQ ID NO: 61) | 629 | 650 |
| D11853_PEA_1_T10 (SEQ ID NO: 62) | 512 | 533 |
| D11853_PEA_1_T13 (SEQ ID NO: 63) | 512 | 533 |
| D11853_PEA_1_T14 (SEQ ID NO: 64) | 512 | 533 |
| D11853_PEA_1_T15 (SEQ ID NO: 65) | 512 | 533 |
| D11853_PEA_1_T16 (SEQ ID NO: 66) | 512 | 533 |
| D11853_PEA_1_T17 (SEQ ID NO: 67) | 1229 | 1250 |
| D11853_PEA_1_T19 (SEQ ID NO: 68) | 512 | 533 |
| D11853_PEA_1_T23 (SEQ ID NO: 70) | 512 | 533 |
| D11853_PEA_1_T24 (SEQ ID NO: 71) | 512 | 533 |
| D11853_PEA_1_T25 (SEQ ID NO: 72) | 1361 | 1382 |
| D11853_PEA_1_T26 (SEQ ID NO: 73) | 512 | 533 |
| D11853_PEA_1_T27 (SEQ ID NO: 74) | 512 | 533 |

[2283] Segment cluster D11853_PEA_{—}1_node_{—}16 (SEQ ID NO:443) according to the present invention can be found in the following transcript(s): D11853_PEA_{—}1_T1 (SEQ ID NO:57), D11853_PEA_{—}1_T3 (SEQ ID NO:58), D11853_PEA_{—}1_T7 (SEQ ID NO:59), D11853_PEA_{—}1_T8 (SEQ ID NO:60), D11853_PEA_{—}1_T9 (SEQ ID NO:61), D11853_PEA_{—}1_T10 (SEQ ID NO:62), D11853_PEA_{—}1_T13 (SEQ ID NO:63), D11853_PEA_{—}1_T14 (SEQ ID NO:64), D11853_PEA_{—}1_T15 (SEQ ID NO:65), D11853_PEA_{—}1_T16 (SEQ ID NO:66), D11853_PEA_{—}1_T17 (SEQ ID NO:67), D11853_PEA_{—}1_T19 (SEQ ID NO:68), D11853_PEA_{—}1_T23 (SEQ ID NO:70), D11853_PEA_{—}1_T24 (SEQ ID NO:71), D11853_PEA_{—}1_T25 (SEQ ID NO:72) and D11853_PEA_{—}1_T26 (SEQ ID NO:73). Table 60 below describes the starting and ending position of this segment on each transcript.

TABLE 60
Segment location on transcripts

| | | Segment |
|---|---|---|
| | Segment | ending |
| Transcript name | starting position | position |
| D11853_PEA_1_T1 (SEQ ID NO: 57) | 534 | 551 |
| D11853_PEA_1_T3 (SEQ ID NO: 58) | 534 | 551 |
| D11853_PEA_1_T7 (SEQ ID NO: 59) | 1251 | 1268 |
| D11853_PEA_1_T8 (SEQ ID NO: 60) | 1025 | 1042 |
| D11853_PEA_1_T9 (SEQ ID NO: 61) | 651 | 668 |
| D11853_PEA_1_T10 (SEQ ID NO: 62) | 534 | 551 |
| D11853_PEA_1_T13 (SEQ ID NO: 63) | 534 | 551 |
| D11853_PEA_1_T14 (SEQ ID NO: 64) | 534 | 551 |
| D11853_PEA_1_T15 (SEQ ID NO: 65) | 534 | 551 |
| D11853_PEA_1_T16 (SEQ ID NO: 66) | 534 | 551 |
| D11853_PEA_1_T17 (SEQ ID NO: 67) | 1251 | 1268 |
| D11853_PEA_1_T19 (SEQ ID NO: 68) | 534 | 551 |
| D11853_PEA_1_T23 (SEQ ID NO: 70) | 534 | 551 |
| D11853_PEA_1_T24 (SEQ ID NO: 71) | 534 | 551 |
| D11853_PEA_1_T25 (SEQ ID NO: 72) | 1383 | 1400 |
| D11853_PEA_1_T26 (SEQ ID NO: 73) | 534 | 551 |

[2284] Segment cluster D11853_PEA_{—}1_node_{—}18 (SEQ ID NO:444) according to the present invention is supported by 230 libraries. The number of libraries was determined as previously described. This segment can be found in the following transcript(s): D11853_PEA_{—}1_T1 (SEQ ID NO:57), D11853_PEA_{—}1_T3 (SEQ ID NO:58), D11853_PEA_{—}1_T7 (SEQ ID NO:59), D11853_PEA_{—}1_T8 (SEQ ID NO:60), D11853_PEA_{—}1_T9 (SEQ ID NO:61), D11853_PEA_{—}1_T10 (SEQ ID NO:62), D11853_PEA_{—}1_T13 (SEQ ID NO:63), D11853_PEA_{—}1_T14 (SEQ ID NO:64), D11853_PEA_{—}1_T15 (SEQ ID NO:65), D11853_PEA_{—}1_T16 (SEQ ID NO:66), D11853_PEA_{—}1_T17 (SEQ ID NO:67), D11853_PEA_{—}1_T19 (SEQ ID NO:68), D11853_PEA_{—}1_T21 (SEQ ID NO:69), D11853_PEA_{—}1_T23 (SEQ ID NO:70), D11853_PEA_{—}1_T25 (SEQ ID NO:72) and D11853_PEA_{—}1_T26 (SEQ ID NO:73). Table 61 below describes the starting and ending position of this segment on each transcript.

TABLE 61
Segment location on transcripts

| | | Segment |
|---|---|---|
| | Segment | ending |
| Transcript name | starting position | position |
| D11853_PEA_1_T1 (SEQ ID NO: 57) | 552 | 582 |
| D11853_PEA_1_T3 (SEQ ID NO: 58) | 552 | 582 |
| D11853_PEA_1_T7 (SEQ ID NO: 59) | 1269 | 1299 |
| D11853_PEA_1_T8 (SEQ ID NO: 60) | 1043 | 1073 |
| D11853_PEA_1_T9 (SEQ ID NO: 61) | 669 | 699 |
| D11853_PEA_1_T10 (SEQ ID NO: 62) | 552 | 582 |
| D11853_PEA_1_T13 (SEQ ID NO: 63) | 552 | 582 |
| D11853_PEA_1_T14 (SEQ ID NO: 64) | 552 | 582 |
| D11853_PEA_1_T15 (SEQ ID NO: 65) | 552 | 582 |
| D11853_PEA_1_T16 (SEQ ID NO: 66) | 701 | 731 |
| D11853_PEA_1_T17 (SEQ ID NO: 67) | 1269 | 1299 |
| D11853_PEA_1_T19 (SEQ ID NO: 68) | 552 | 582 |
| D11853_PEA_1_T21 (SEQ ID NO: 69) | 391 | 421 |
| D11853_PEA_1_T23 (SEQ ID NO: 70) | 701 | 731 |
| D11853_PEA_1_T25 (SEQ ID NO: 72) | 1401 | 1431 |
| D11853_PEA_1_T26 (SEQ ID NO: 73) | 552 | 582 |

[2285] Segment cluster D11853_PEA_{—}1_node_{—}19 (SEQ ID NO:445) according to the present invention can be found in the following transcript(s): D11853_PEA_{—}1_T1 (SEQ ID NO:57), D11853_PEA_{—}1_T3 (SEQ ID NO:58), D11853_PEA_{—}1_T7 (SEQ ID NO:59), D11853_PEA_{—}1_T8 (SEQ ID NO:60), D11853_PEA_{—}1_T9 (SEQ ID NO:61), D11853_PEA_{—}1_T10 (SEQ ID NO:62), D11853_PEA_{—}1_T13 (SEQ ID NO:63), D11853_PEA_{—}1_T14 (SEQ ID NO:64), D11853_PEA_{—}1_T15 (SEQ ID NO:65), D11853_PEA_{—}1_T16 (SEQ ID NO:66), D11853_PEA_{—}1_T17 (SEQ ID NO:67), D11853_PEA_{—}1_T19 (SEQ ID NO:68), D11853_PEA_{—}1_T21 (SEQ ID NO:69), D11853_PEA_{—}1_T23 (SEQ ID NO:70) and D11853_PEA_{—}1_T25 (SEQ ID NO:72). Table 62 below describes the starting and ending position of this segment on each transcript.

TABLE 62
Segment location on transcripts

| | | Segment |
|---|---|---|
| | Segment | ending |
| Transcript name | starting position | position |
| D11853_PEA_1_T1 (SEQ ID NO: 57) | 583 | 587 |
| D11853_PEA_1_T3 (SEQ ID NO: 58) | 583 | 587 |
| D11853_PEA_1_T7 (SEQ ID NO: 59) | 1300 | 1304 |
| D11853_PEA_1_T8 (SEQ ID NO: 60) | 1074 | 1078 |
| D11853_PEA_1_T9 (SEQ ID NO: 61) | 700 | 704 |
| D11853_PEA_1_T10 (SEQ ID NO: 62) | 583 | 587 |
| D11853_PEA_1_T13 (SEQ ID NO: 63) | 583 | 587 |
| D11853_PEA_1_T14 (SEQ ID NO: 64) | 583 | 587 |
| D11853_PEA_1_T15 (SEQ ID NO: 65) | 583 | 587 |
| D11853_PEA_1_T16 (SEQ ID NO: 66) | 732 | 736 |
| D11853_PEA_1_T17 (SEQ ID NO: 67) | 1300 | 1304 |
| D11853_PEA_1_T19 (SEQ ID NO: 68) | 583 | 587 |
| D11853_PEA_1_T21 (SEQ ID NO: 69) | 422 | 426 |
| D11853_PEA_1_T23 (SEQ ID NO: 70) | 732 | 736 |
| D11853_PEA_1_T25 (SEQ ID NO: 72) | 1432 | 1436 |

[2286] Segment cluster D11853_PEA_{—}1_node_{—}20 (SEQ ID NO:446) according to the present invention is supported by 257 libraries. The number of libraries was determined as previously described. This segment can be found in the following transcript(s): D11853_PEA_{—}1_T1 (SEQ ID NO:57), D11853_PEA_{—}1_T3 (SEQ ID NO:58), D11853_PEA_{—}1_T7 (SEQ ID NO:59), D11853_PEA_{—}1_T8 (SEQ ID NO:60), D11853_PEA_{—}1_T9 (SEQ ID NO:61), D11853_PEA_{—}1_T10 (SEQ ID NO:62), D11853_PEA_{—}1_T13 (SEQ ID NO:63), D11853_PEA_{—}1_T14 (SEQ ID NO:64), D11853_PEA_{—}1_T15 (SEQ ID NO:65), D11853_PEA_{—}1_T16 (SEQ ID NO:66), D11853_PEA_{—}1_T17 (SEQ ID NO:67), D11853_PEA_{—}1_T19 (SEQ ID NO:68), D11853_PEA_{—}1_T21 (SEQ ID NO:69), D11853_PEA_{—}1_T23 (SEQ ID NO:70) and D11853_PEA_{—}1_T25 (SEQ ID NO:72). Table 63 below describes the starting and ending position of this segment on each transcript.

TABLE 63
Segment location on transcripts

| | | Segment |
|---|---|---|
| | Segment | ending |
| Transcript name | starting position | position |
| D11853_PEA_1_T1 (SEQ ID NO: 57) | 588 | 686 |
| D11853_PEA_1_T3 (SEQ ID NO: 58) | 588 | 686 |
| D11853_PEA_1_T7 (SEQ ID NO: 59) | 1305 | 1403 |
| D11853_PEA_1_T8 (SEQ ID NO: 60) | 1079 | 1177 |
| D11853_PEA_1_T9 (SEQ ID NO: 61) | 705 | 803 |
| D11853_PEA_1_T10 (SEQ ID NO: 62) | 588 | 686 |
| D11853_PEA_1_T13 (SEQ ID NO: 63) | 588 | 686 |
| D11853_PEA_1_T14 (SEQ ID NO: 64) | 588 | 686 |
| D11853_PEA_1_T15 (SEQ ID NO: 65) | 588 | 686 |
| D11853_PEA_1_T16 (SEQ ID NO: 66) | 737 | 835 |
| D11853_PEA_1_T17 (SEQ ID NO: 67) | 1305 | 1403 |
| D11853_PEA_1_T19 (SEQ ID NO: 68) | 588 | 686 |
| D11853_PEA_1_T21 (SEQ ID NO: 69) | 427 | 525 |
| D11853_PEA_1_T23 (SEQ ID NO: 70) | 737 | 835 |
| D11853_PEA_1_T25 (SEQ ID NO: 72) | 1437 | 1535 |

[2287] Segment cluster D11853_PEA_{—}1_node_{—}24 (SEQ ID NO:447) according to the present invention is supported by 254 libraries. The number of libraries was determined as previously described. This segment can be found in the following transcript(s): D11853_PEA_{—}1_T1 (SEQ ID NO:57), D11853_PEA_{—}1_T3 (SEQ ID NO:58), D11853_PEA_{—}1_T7 (SEQ ID NO:59), D11853_PEA_{—}1_T8 (SEQ ID NO:60), D11853_PEA_{—}1_T9 (SEQ ID NO:61), D11853_PEA_{—}1_T10 (SEQ ID NO:62), D11853_PEA_{—}1_T13 (SEQ ID NO:63), D11853_PEA_{—}1_T14 (SEQ ID NO:64), D11853_PEA_{—}1_T15 (SEQ ID NO:65), D11853_PEA_{—}1_T16 (SEQ ID NO:66), D11853_PEA_{—}1_T17 (SEQ ID NO:67), D11853_PEA_{—}1_T19 (SEQ ID NO:68), D11853_PEA_{—}1_T21 (SEQ ID NO:69), D11853_PEA_{—}1_T23 (SEQ ID NO:70), D11853_PEA_{—}1_T24 (SEQ ID NO:71) and D11853_PEA_{—}1_T25 (SEQ ID NO:72). Table 64 below describes the starting and ending position of this segment on each transcript.

TABLE 64
Segment location on transcripts

| | | Segment |
|---|---|---|
| | Segment | ending |
| Transcript name | starting position | position |
| D11853_PEA_1_T1 (SEQ ID NO: 57) | 832 | 911 |
| D11853_PEA_1_T3 (SEQ ID NO: 58) | 832 | 911 |
| D11853_PEA_1_T7 (SEQ ID NO: 59) | 1549 | 1628 |
| D11853_PEA_1_T8 (SEQ ID NO: 60) | 1323 | 1402 |
| D11853_PEA_1_T9 (SEQ ID NO: 61) | 949 | 1028 |
| D11853_PEA_1_T10 (SEQ ID NO: 62) | 832 | 911 |
| D11853_PEA_1_T13 (SEQ ID NO: 63) | 955 | 1034 |
| D11853_PEA_1_T14 (SEQ ID NO: 64) | 832 | 911 |
| D11853_PEA_1_T15 (SEQ ID NO: 65) | 955 | 1034 |
| D11853_PEA_1_T16 (SEQ ID NO: 66) | 981 | 1060 |
| D11853_PEA_1_T17 (SEQ ID NO: 67) | 1549 | 1628 |
| D11853_PEA_1_T19 (SEQ ID NO: 68) | 976 | 1055 |
| D11853_PEA_1_T21 (SEQ ID NO: 69) | 671 | 750 |
| D11853_PEA_1_T23 (SEQ ID NO: 70) | 1125 | 1204 |
| D11853_PEA_1_T24 (SEQ ID NO: 71) | 697 | 776 |
| D11853_PEA_1_T25 (SEQ ID NO: 72) | 1681 | 1760 |

[2288] Segment cluster D11853_PEA_{—}1_node_{—}28 (SEQ ID NO:448) according to the present invention can be found in the following transcript(s): D11853_PEA_{—}1_T3 (SEQ ID NO:58), D11853_PEA_{—}1_T25 (SEQ ID NO:72) and D11853_PEA_{—}1_T26 (SEQ ID NO:73). Table 65 below describes the starting and ending position of this segment on each transcript.

TABLE 65
Segment location on transcripts

| | | Segment |
|---|---|---|
| | Segment | ending |
| Transcript name | starting position | position |
| D11853_PEA_1_T3 (SEQ ID NO: 58) | 1461 | 1465 |
| D11853_PEA_1_T25 (SEQ ID NO: 72) | 2515 | 2519 |
| D11853_PEA_1_T26 (SEQ ID NO: 73) | 583 | 587 |

[2289] Segment cluster D11853_PEA_{—}1_node_{—}29 (SEQ ID NO:449) according to the present invention is supported by 248 libraries. The number of libraries was determined as previously described. This segment can be found in the following transcript(s): D11853_PEA_{—}1_T1 (SEQ ID NO:57), D11853_PEA_{—}1_T3 (SEQ ID NO:58), D11853_PEA_{—}1_T7 (SEQ ID NO:59), D11853_PEA_{—}1_T8 (SEQ ID NO:60), D11853_PEA_{—}1_T9 (SEQ ID NO:61), D11853_PEA_{—}1_T10 (SEQ ID NO:62), D11853_PEA_{—}1_T13 (SEQ ID NO:63), D11853_PEA_{—}1_T14 (SEQ ID NO:64), D11853_PEA_{—}1_T15 (SEQ ID NO:65), D11853_PEA_{—}1_T16 (SEQ ID NO:66), D11853_PEA_{—}1_T17 (SEQ ID NO:67), D11853_PEA_{—}1_T19 (SEQ ID NO:68), D11853_PEA_{—}1_T21 (SEQ ID NO:69), D11853_PEA_{—}1_T23 (SEQ ID NO:70), D11853_PEA_{—}1_T24 (SEQ ID NO:71), D11853_PEA_{—}1_T25 (SEQ ID NO:72) and D11853_PEA_{—}1_T26 (SEQ ID NO:73). Table 66 below describes the starting and ending position of this segment on each transcript.

TABLE 66
Segment location on transcripts

| | | Segment |
|---|---|---|
| | Segment | ending |
| Transcript name | starting position | position |
| D11853_PEA_1_T1 (SEQ ID NO: 57) | 1041 | 1087 |
| D11853_PEA_1_T3 (SEQ ID NO: 58) | 1466 | 1512 |
| D11853_PEA_1_T7 (SEQ ID NO: 59) | 1758 | 1804 |
| D11853_PEA_1_T8 (SEQ ID NO: 60) | 1532 | 1578 |
| D11853_PEA_1_T9 (SEQ ID NO: 61) | 1158 | 1204 |
| D11853_PEA_1_T10 (SEQ ID NO: 62) | 1246 | 1292 |
| D11853_PEA_1_T13 (SEQ ID NO: 63) | 1164 | 1210 |
| D11853_PEA_1_T14 (SEQ ID NO: 64) | 912 | 958 |
| D11853_PEA_1_T15 (SEQ ID NO: 65) | 1369 | 1415 |
| D11853_PEA_1_T16 (SEQ ID NO: 66) | 1190 | 1236 |
| D11853_PEA_1_T17 (SEQ ID NO: 67) | 1758 | 1804 |
| D11853_PEA_1_T19 (SEQ ID NO: 68) | 1185 | 1231 |
| D11853_PEA_1_T21 (SEQ ID NO: 69) | 880 | 926 |
| D11853_PEA_1_T23 (SEQ ID NO: 70) | 1334 | 1380 |
| D11853_PEA_1_T24 (SEQ ID NO: 71) | 906 | 952 |
| D11853_PEA_1_T25 (SEQ ID NO: 72) | 2520 | 2566 |
| D11853_PEA_1_T26 (SEQ ID NO: 73) | 588 | 634 |

### Variant Protein Alignment to the Previously Known Protein:

Sequence name: Q9P042 (SEQ ID NO: 639)
Sequence documentation:
Alignment of:
D11853_PEA_1_P1 (SEQ ID NO: 588) × Q9P042 (SEQ ID NO: 639) . .
Alignment segment 1/1:

| | | | |
|---|---|---|---|
| Quality: | 3115.00 | Escore: | 0 |
| Matching length: | 330 | Total length: | 330 |
| Matching Percent Similarity: | 99.70 | Matching Percent Identity: | 99.70 |
| Total Percent Similarity: | 99.70 | Total Percent Identity: | 99.70 |
| Gaps: | 0 | | |

Alignment:

[chemical structure]

[chemical structure]

[chemical structure]

[chemical structure]

[chemical structure]

[chemical structure]

[chemical structure]

Sequence name: BAC85377 (SEQ ID NO: 640)
Sequence documentation:
Alignment of:
D11853_PEA_1_P1 (SEQ ID NO: 588) × BAC85377 (SEQ ID NO: 640)
Alignment segment 1/1:

| | | | |
|---|---|---|---|
| Quality: | 1512.00 | Escore: | 0 |
| Matching length: | 159 | Total length: | 159 |
| Matching Percent Similarity: | 100.00 | Matching Percent Identity: | 100.00 |
| Total Percent Similarity: | 100.00 | Total Percent Identity: | 100.00 |
| Gaps: | 0 | | |

Alignment:

[chemical structure]

[chemical structure]

[chemical structure]

[chemical structure]

Sequence name: Q96FY2 (SEQ ID NO: 638)
Sequence documentation:
Alignment of:
D11853_PEA_1_P1 (SEQ ID NO: 588) × Q96FY2 (SEQ ID NO: 638) . .
Alignment segment 1/1:

| | | | |
|---|---|---|---|
| Quality: | 3343.00 | Escore: | 0 |
| Matching length: | 356 | Total length: | 356 |
| Matching Percent Similarity: | 99.72 | Matching Percent Identity: | 99.72 |
| Total Percent Similarity: | 99.72 | Total Percent Identity: | 99.72 |
| Gaps: | 0 | | |

Alignment:

[chemical structure]

[chemical structure]

[chemical structure]

[chemical structure]

[chemical structure]

[chemical structure]

[chemical structure]

[chemical structure]

Sequence name: Q9P042 (SEQ ID NO: 639)
Sequence documentation:
Alignment of:
D11853_PEA_1_P2 (SEQ ID NO: 589) × Q9P042 (SEQ ID NO: 639) . .
Alignment segment 1/1:

| | | | |
|---|---|---|---|
| Quality: | 2691.00 | Escore: | 0 |
| Matching length: | 285 | Total length: | 285 |
| Matching Percent Similarity: | 99.65 | Matching Percent Identity: | 99.65 |
| Total Percent Similarity: | 99.65 | Total Percent Identity: | 99.65 |
| Gaps: | 0 | | |

Alignment:

[chemical structure]

[chemical structure]

[chemical structure]

[chemical structure]

[chemical structure]

[chemical structure]

Sequence name: BAC85377 (SEQ ID NO: 640)
Sequence documentation:
Alignment of:
D11853_PEA_1_P2 (SEQ ID NO: 589) × BAC85377 (SEQ ID NO: 640)
Alignment segment 1/1:

| | | | |
|---|---|---|---|
| Quality: | 1512.00 | Escore: | 0 |
| Matching length: | 159 | Total length: | 159 |
| Matching Percent Similarity: | 100.00 | Matching Percent Identity: | 100.00 |
| Total Percent Similarity: | 100.00 | Total Percent Identity: | 100.00 |
| Gaps: | 0 | | |

Alignment:

[chemical structure]

[chemical structure]

[chemical structure]

[chemical structure]

Sequence name: Q96FY2 (SEQ ID NO: 638)
Sequence documentation:
Alignment of:
D11853_PEA_1_P2 (SEQ ID NO: 589) × Q96FY2 (SEQ ID NO: 638) . .
Alignment segment 1/1:

| | | | |
|---|---|---|---|
| Quality: | 2919.00 | Escore: | 0 |
| Matching length: | 311 | Total length: | 311 |
| Matching Percent Similarity: | 99.68 | Matching Percent Identity: | 99.68 |
| Total Percent Similarity: | 99.68 | Total Percent Identity: | 99.68 |
| Gaps: | 0 | | |

Alignment:

[chemical structure]

[chemical structure]

[chemical structure]

[chemical structure]

[chemical structure]

[chemical structure]

[chemical structure]

Sequence name: Q9UJZ1 (SEQ ID NO: 637)
Sequence documentation:
Alignment of:
D11853_PEA_1_P2 (SEQ ID NO: 589) × Q9UJZ1 (SEQ ID NO: 637) . .
Alignment segment 1/1:

| | | | |
|---|---|---|---|
| Quality: | 2934.00 | Escore: | 0 |
| Matching length: | 311 | Total length: | 311 |
| Matching Percent Similarity: | 100.00 | Matching Percent Identity: | 100.00 |
| Total Percent Similarity: | 100.00 | Total Percent Identity: | 100.00 |
| Gaps: | 0 | | |

Alignment:

[chemical structure]

[chemical structure]

[chemical structure]

[chemical structure]

[chemical structure]

[chemical structure]

[chemical structure]

Sequence name: Q9P042 (SEQ ID NO: 639)
Sequence documentation:
Alignment of:
D11853_PEA_1_P7 (SEQ ID NO: 590) × Q9P042 (SEQ ID NO: 639) . .
Alignment segment 1/1:

| | | | |
|---|---|---|---|
| Quality: | 2290.00 | Escore: | 0 |
| Matching length: | 242 | Total length: | 242 |
| Matching Percent Similarity: | 99.59 | Matching Percent Identity: | 99.59 |
| Total Percent Similarity: | 99.59 | Total Percent Identity: | 99.59 |
| Gaps: | 0 | | |

Alignment:

[chemical structure]

[chemical structure]

[chemical structure]

[chemical structure]

[chemical structure]

Sequence name: BAC85377 (SEQ ID NO: 640)
Sequence documentation:
Alignment of:
D11853_PEA_1_P7 (SEQ ID NO: 590) × BAC85377 (SEQ ID NO: 640)
Alignment segment 1/1:

| | | | |
|---|---|---|---|
| Quality: | 1724.00 | Escore: | 0 |
| Matching length: | 181 | Total length: | 181 |
| Matching Percent Similarity: | 100.00 | Matching Percent Identity: | 100.00 |
| Total Percent Similarity: | 100.00 | Total Percent Identity: | 100.00 |
| Gaps: | 0 | | |

Alignment:

[chemical structure]

[chemical structure]

[chemical structure]

[chemical structure]

Sequence name: Q96FY2 (SEQ ID NO: 638)
Sequence documentation:
Alignment of:
D11853_PEA_1_P7 (SEQ ID NO: 590) × Q96FY2 (SEQ ID NO: 638) . .
Alignment segment 1/1:

| | | | |
|---|---|---|---|
| Quality: | 2518.00 | Escore: | 0 |
| Matching length: | 268 | Total length: | 268 |
| Matching Percent Similarity: | 99.63 | Matching Percent Identity: | 99.63 |
| Total Percent Similarity: | 99.63 | Total Percent Identity: | 99.63 |
| Gaps: | 0 | | |

Alignment:

[chemical structure]

[chemical structure]

[chemical structure]

[chemical structure]

[chemical structure]

[chemical structure]

Sequence name: Q9UJZ1 (SEQ ID NO: 637)
Sequence documentation:
Alignment of:
D11853_PEA_1_P7 (SEQ ID NO: 590) × Q9UJZ1 (SEQ ID NO: 637) . .
Alignment segment 1/1:

| | | | |
|---|---|---|---|
| Quality: | 2533.00 | Escore: | 0 |
| Matching length: | 268 | Total length: | 268 |
| Matching Percent Similarity: | 100.00 | Matching Percent Identity: | 100.00 |
| Total Percent Similarity: | 100.00 | Total Percent Identity: | 100.00 |
| Gaps: | 0 | | |

Alignment:

[chemical structure]

[chemical structure]

[chemical structure]

[chemical structure]

[chemical structure]

[chemical structure]

Sequence name: Q9P042 (SEQ ID NO: 639)
Sequence documentation:
Alignment of:
D11853_PEA_1_P9 (SEQ ID NO: 591) × Q9P042 (SEQ ID NO: 639) . .
Alignment segment 1/1:

| | | | |
|---|---|---|---|
| Quality: | 3015.00 | Escore: | 0 |
| Matching length: | 330 | Total length: | 371 |
| Matching Percent Similarity: | 99.70 | Matching Percent Identity: | 99.70 |
| Total Percent Similarity: | 88.68 | Total Percent Identity: | 88.68 |
| Gaps: | 1 | | |

Alignment:

[chemical structure]

[chemical structure]

[chemical structure]

[chemical structure]

[chemical structure]

[chemical structure]

[chemical structure]

[chemical structure]

Sequence name: BAC85377 (SEQ ID NO: 640)
Sequence documentation:
Alignment of:
D11853_PEA_1_P9 (SEQ ID NO: 591) × BAC85377 (SEQ ID NO: 640)
Alignment segment 1/1:

| | | | |
|---|---|---|---|
| Quality: | 1412.00 | Escore: | 0 |
| Matching length: | 159 | Total length: | 200 |
| Matching Percent Similarity: | 100.00 | Matching Percent Identity: | 100.00 |
| Total Percent Similarity: | 79.50 | Total Percent Identity: | 79.50 |
| Gaps: | 1 | | |

Alignment:

[chemical structure]

[chemical structure]

[chemical structure]

[chemical structure]

Sequence name: Q96FY2 (SEQ ID NO: 638)
Sequence documentation:
Alignment of:
D11853_PEA_1_P9 (SEQ ID NO: 591) × Q96FY2 (SEQ ID NO: 638) . .
Alignment segment 1/1:

| | | | |
|---|---|---|---|
| Quality: | 3243.00 | Escore: | 0 |
| Matching length: | 356 | Total length: | 397 |
| Matching Percent Similarity: | 99.72 | Matching Percent Identity: | 99.72 |
| Total Percent Similarity: | 89.42 | Total Percent Identity: | 89.42 |
| Gaps: | 1 | | |

Alignment:

[chemical structure]

[chemical structure]

[chemical structure]

[chemical structure]

[chemical structure]

[chemical structure]

[chemical structure]

[chemical structure]

Sequence name: Q9UJZ1 (SEQ ID NO: 637)
Sequence documentation:
Alignment of:
D11853_PEA_1_P9 (SEQ ID NO: 591) × Q9UJZ1 (SEQ ID NO: 637) . .
Alignment segment 1/1:

| | | | |
|---|---|---|---|
| Quality: | 3258.00 | Escore: | 0 |
| Matching length: | 356 | Total length: | 397 |
| Matching Percent Similarity: | 100.00 | Matching Percent Identity: | 100.00 |
| Total Percent Similarity: | 89.67 | Total Percent Identity: | 89.67 |
| Gaps: | 1 | | |

Alignment:

[chemical structure]

[chemical structure]

[chemical structure]

[chemical structure]

[chemical structure]

[chemical structure]

[chemical structure]

[chemical structure]

Sequence name: Q9P042 (SEQ ID NO: 639)
Sequence documentation:
Alignment of:
D11853_PEA_1_P10 (SEQ ID NO: 592) × Q9P042 (SEQ ID NO: 639)
Alignment segment 1/1:

| | | | |
|---|---|---|---|
| Quality: | 2614.00 | Escore: | 0 |
| Matching length: | 287 | Total length: | 330 |
| Matching Percent Similarity: | 99.65 | Matching Percent Identity: | 99.65 |
| Total Percent Similarity: | 86.67 | Total Percent Identity: | 86.67 |
| Gaps: | 1 | | |

Alignment:

[chemical structure]

[chemical structure]

[chemical structure]

[chemical structure]

[chemical structure]

[chemical structure]

[chemical structure]

Sequence name: BAC85377 (SEQ ID NO: 640)
Sequence documentation:
Alignment of:
D11853_PEA_1_P10 (SEQ ID NO: 592) × BAC85377 (SEQ ID NO: 640)
Alignment segment 1/1:

| | | | |
|---|---|---|---|
| Quality: | 1515.00 | Escore: | 0 |
| Matching length: | 162 | Total length: | 162 |
| Matching Percent Similarity: | 98.77 | Matching Percent Identity: | 98.77 |
| Total Percent Similarity: | 98.77 | Total Percent Identity: | 98.77 |
| Gaps: | 0 | | |

Alignment:

[chemical structure]

[chemical structure]

[chemical structure]

[chemical structure]

Sequence name: Q96FY2 (SEQ ID NO: 638)
Sequence documentation:
Alignment of:
D11853_PEA_1_P10 (SEQ ID NO: 592) × Q96FY2 (SEQ ID NO: 638)
Alignment segment 1/1:

| | | | |
|---|---|---|---|
| Quality: | 2842.00 | Escore: | 0 |
| Matching length: | 313 | Total length: | 356 |
| Matching Percent Similarity: | 99.68 | Matching Percent Identity: | 99.68 |
| Total Percent Similarity: | 87.64 | Total Percent Identity: | 87.64 |
| Gaps: | 1 | | |

Alignment:

[chemical structure]

[chemical structure]

[chemical structure]

[chemical structure]

[chemical structure]

[chemical structure]

[chemical structure]

[chemical structure]

Sequence name: Q9UJZ1 (SEQ ID NO: 637)
Sequence documentation:
Alignment of:
D11853_PEA_1_P10 (SEQ ID NO: 592) × Q9UJZ1 (SEQ ID NO: 637)
Alignment segment 1/1:

| | | | |
|---|---|---|---|
| Quality: | 2857.00 | Escore: | 0 |
| Matching length: | 313 | Total length: | 356 |
| Matching Percent Similarity: | 100.00 | Matching Percent Identity: | 100.00 |
| Total Percent Similarity: | 87.92 | Total Percent Identity: | 87.92 |
| Gaps: | 1 | | |

Alignment:

[chemical structure]

[chemical structure]

[chemical structure]

[chemical structure]

[chemical structure]

[chemical structure]

[chemical structure]

[chemical structure]

Sequence name: Q9P042 (SEQ ID NO: 639)
Sequence documentation:
Alignment of:
D11853_PEA_1_P11 (SEQ ID NO: 593) × Q9P042 (SEQ ID NO: 639)
Alignment segment 1/1:

| | | | |
|---|---|---|---|
| Quality: | 2190.00 | Escore: | 0 |
| Matching length: | 242 | Total length: | 283 |
| Matching Percent Similarity: | 99.59 | Matching Percent Identity: | 99.59 |
| Total Percent Similarity: | 85.16 | Total Percent Identity: | 85.16 |
| Gaps: | 1 | | |

Alignment:

[chemical structure]

[chemical structure]

[chemical structure]

[chemical structure]

[chemical structure]

[chemical structure]

Sequence name: BAC85377 (SEQ ID NO: 640)
Sequence documentation:
Alignment of:
D11853_PEA_1_P11 (SEQ ID NO: 593) × BAC85377 (SEQ ID NO: 640)
Alignment segment 1/1:

| | | | |
|---|---|---|---|
| Quality: | 1624.00 | Escore: | 0 |
| Matching length: | 181 | Total length: | 222 |
| Matching Percent Similarity: | 100.00 | Matching Percent Identity: | 100.00 |
| Total Percent Similarity: | 81.53 | Total Percent Identity: | 81.53 |
| Gaps: | 1 | | |

Alignment:

[chemical structure]

[chemical structure]

[chemical structure]

[chemical structure]

[chemical structure]

Sequence name: Q96FY2 (SEQ ID NO: 638)
Sequence documentation:
Alignment of:
D11853_PEA_1_P11 (SEQ ID NO: 593) × Q96FY2 (SEQ ID NO: 638)
Alignment segment 1/1:

| | | | |
|---|---|---|---|
| Quality: | 2418.00 | Escore: | 0 |
| Matching length: | 268 | Total length: | 309 |
| Matching Percent Similarity: | 99.63 | Matching Percent Identity: | 99.63 |
| Total Percent Similarity: | 86.41 | Total Percent Identity: | 86.41 |
| Gaps: | 1 | | |

Alignment:

[chemical structure]

[chemical structure]

[chemical structure]

[chemical structure]

[chemical structure]

[chemical structure]

[chemical structure]

Sequence name: Q9UJZ1 (SEQ ID NO: 637)
Sequence documentation:
Alignment of:
D11853_PEA_1_P11 (SEQ ID NO: 593) × Q9UJZ1 (SEQ ID NO: 637)
Alignment segment 1/1:

| | | | |
|---|---|---|---|
| Quality: | 2433.00 | Escore: | 0 |
| Matching length: | 268 | Total length: | 309 |
| Matching Percent Similarity: | 100.00 | Matching Percent Identity: | 100.00 |
| Total Percent Similarity: | 86.73 | Total Percent Identity: | 86.73 |
| Gaps: | 1 | | |

Alignment:

[chemical structure]

[chemical structure]

[chemical structure]

[chemical structure]

[chemical structure]

[chemical structure]

[chemical structure]

Sequence name: Q9P042 (SEQ ID NO: 639)
Sequence documentation:
Alignment of:
D11853_PEA_1_P12 (SEQ ID NO: 594) × Q9P042 (SEQ ID NO: 639)
Alignment segment 1/1:

| | | | |
|---|---|---|---|
| Quality: | 1167.00 | Escore: | 0 |
| Matching length: | 122 | Total length: | 122 |
| Matching Percent Similarity: | 100.00 | Matching Percent Identity: | 100.00 |
| Total Percent Similarity: | 100.00 | Total Percent Identity: | 100.00 |
| Gaps: | 0 | | |

Alignment:

[chemical structure]

[chemical structure]

[chemical structure]

Sequence name: Q96FY2 (SEQ ID NO: 638)
Sequence documentation:
Alignment of:
D11853_PEA_1_P12 (SEQ ID NO: 594) × Q96FY2 (SEQ ID NO: 638)
Alignment segment 1/1:

| | | | |
|---|---|---|---|
| Quality: | 1385.00 | Escore: | 0 |
| Matching length: | 148 | Total length: | 148 |
| Matching Percent Similarity: | 99.32 | Matching Percent Identity: | 99.32 |
| Total Percent Similarity: | 99.32 | Total Percent Identity: | 99.32 |
| Gaps: | 0 | | |

Alignment:

[chemical structure]

[chemical structure]

[chemical structure]

Sequence name: Q9UJZ1 (SEQ ID NO: 637)
Sequence documentation:
Alignment of:
D11853_PEA_1_P12 (SEQ ID NO: 594) × Q9UJZ1 (SEQ ID NO: 637)
Alignment segment 1/1:

| | | | |
|---|---|---|---|
| Quality: | 1400.00 | Escore: | 0 |
| Matching length: | 148 | Total length: | 148 |
| Matching Percent Similarity: | 100.00 | Matching Percent Identity: | 100.00 |
| Total Percent Similarity: | 100.00 | Total Percent Identity: | 100.00 |
| Gaps: | 0 | | |

Alignment:

[chemical structure]

[chemical structure]

[chemical structure]

Sequence name: Q9P042 (SEQ ID NO: 639)
Sequence documentation:
Alignment of:
D11853_PEA_1_P14 (SEQ ID NO: 595) × Q9P042 (SEQ ID NO: 639)
Alignment segment 1/1:

| | | | |
|---|---|---|---|
| Quality: | 1628.00 | Escore: | 0 |
| Matching length: | 170 | Total length: | 170 |
| Matching Percent Similarity: | 99.41 | Matching Percent Identity: | 99.41 |
| Total Percent Similarity: | 99.41 | Total Percent Identity: | 99.41 |
| Gaps: | 0 | | |

Alignment:

[chemical structure]

[chemical structure]

[chemical structure]

[chemical structure]

Sequence name: Q96FY2 (SEQ ID NO: 638)
Sequence documentation:
Alignment of:
D11853_PEA_1_P14 (SEQ ID NO: 595) × Q96FY2 (SEQ ID NO: 638)
Alignment segment 1/1:

| | | | |
|---|---|---|---|
| Quality: | 1846.00 | Escore: | 0 |
| Matching length: | 196 | Total length: | 196 |
| Matching Percent Similarity: | 98.98 | Matching Percent Identity: | 98.98 |
| Total Percent Similarity: | 98.98 | Total Percent Identity: | 98.98 |
| Gaps: | 0 | | |

Alignment:

[chemical structure]

[chemical structure]

[chemical structure]

[chemical structure]

Sequence name: Q9UJZ1 (SEQ ID NO: 637)
Sequence documentation:
Alignment of:
D11853_PEA_1_P14 (SEQ ID NO: 595) × Q9UJZ1 (SEQ ID NO: 637)
Alignment segment 1/1:

| | | | |
|---|---|---|---|
| Quality: | 1861.00 | Escore: | 0 |
| Matching length: | 196 | Total length: | 196 |
| Matching Percent Similarity: | 99.49 | Matching Percent Identity: | 99.49 |
| Total Percent Similarity: | 99.49 | Total Percent Identity: | 99.49 |
| Gaps: | 0 | | |

Alignment:

[chemical structure]

[chemical structure]

[chemical structure]

[chemical structure]

Sequence name: Q9P042 (SEQ ID NO: 639)
Sequence documentation:
Alignment of:
D11853_PEA_1_P16 (SEQ ID NO: 596) × Q9P042 (SEQ ID NO: 639)
Alignment segment 1/1:

| | | | |
|---|---|---|---|
| Quality: | 2564.00 | Escore: | 0 |
| Matching length: | 285 | Total length: | 330 |
| Matching Percent Similarity: | 99.65 | Matching Percent Identity: | 99.65 |
| Total Percent Similarity: | 86.06 | Total Percent Identity: | 86.06 |
| Gaps: | 1 | | |

Alignment:

[chemical structure]

[chemical structure]

[chemical structure]

[chemical structure]

[chemical structure]

[chemical structure]

[chemical structure]

Sequence name: BAC85377 (SEQ ID NO: 640)
Sequence documentation:
Alignment of:
D11853_PEA_1_P16 (SEQ ID NO: 596) × BAC85377 (SEQ ID NO: 640)
Alignment segment 1/1:

| | | | |
|---|---|---|---|
| Quality: | 961.00 | Escore: | 0 |
| Matching length: | 114 | Total length: | 159 |
| Matching Percent Similarity: | 100.00 | Matching Percent Identity: | 100.00 |
| Total Percent Similarity: | 71.70 | Total Percent Identity: | 71.70 |
| Gaps: | 1 | | |

Alignment:

[chemical structure]

[chemical structure]

[chemical structure]

[chemical structure]

Sequence name: Q96FY2 (SEQ ID NO: 638)
Sequence documentation:
Alignment of:
D11853_PEA_1_P16 (SEQ ID NO: 596) × Q96FY2 (SEQ ID NO: 638)
Alignment segment 1/1:

| | | | |
|---|---|---|---|
| Quality: | 2792.00 | Escore: | 0 |
| Matching length: | 311 | Total length: | 356 |
| Matching Percent Similarity: | 99.68 | Matching Percent Identity: | 99.68 |
| Total Percent Similarity: | 87.08 | Total Percent Identity: | 87.08 |
| Gaps: | 1 | | |

Alignment:

[chemical structure]

[chemical structure]

[chemical structure]

[chemical structure]

[chemical structure]

[chemical structure]

[chemical structure]

[chemical structure]

Sequence name: Q9UJZ1 (SEQ ID NO: 637)
Sequence documentation:
Alignment of:
D11853_PEA_1_P16 (SEQ ID NO: 596) × Q9UJZ1 (SEQ ID NO: 637)
Alignment segment 1/1:

| | | | |
|---|---|---|---|
| Quality: | 2807.00 | Escore: | 0 |
| Matching length: | 311 | Total length: | 356 |
| Matching Percent Similarity: | 100.00 | Matching Percent Identity: | 100.00 |
| Total Percent Similarity: | 87.36 | Total Percent Identity: | 87.36 |
| Gaps: | 1 | | |

Alignment:

[chemical structure]

[chemical structure]

[chemical structure]

[chemical structure]

[chemical structure]

[chemical structure]

[chemical structure]

[chemical structure]

Sequence name: Q9P042 (SEQ ID NO: 639)
Sequence documentation:
Alignment of:
D11853_PEA_1_P18 (SEQ ID NO: 597) × Q9P042 (SEQ ID NO: 639)
Alignment segment 1/1:

| | | | |
|---|---|---|---|
| Quality: | 1601.00 | Escore: | 0 |
| Matching length: | 179 | Total length: | 330 |
| Matching Percent Similarity: | 100.00 | Matching Percent Identity: | 100.00 |
| Total Percent Similarity: | 54.24 | Total Percent Identity: | 54.24 |
| Gaps: | 1 | | |

Alignment:

[chemical structure]

[chemical structure]

[chemical structure]

[chemical structure]

[chemical structure]

[chemical structure]

[chemical structure]

Sequence name: Q96FY2 (SEQ ID NO: 638)
Sequence documentation:
Alignment of:
D11853_PEA_1_P18 (SEQ ID NO: 597) × Q96FY2 (SEQ ID NO: 638)
Alignment segment 1/1:

| | | | |
|---|---|---|---|
| Quality: | 1819.00 | Escore: | 0 |
| Matching length: | 205 | Total length: | 356 |
| Matching Percent Similarity: | 99.51 | Matching Percent Identity: | 99.51 |
| Total Percent Similarity: | 57.30 | Total Percent Identity: | 57.30 |
| Gaps: | 1 | | |

Alignment:

[chemical structure]

[chemical structure]

[chemical structure]

[chemical structure]

[chemical structure]

[chemical structure]

[chemical structure]

[chemical structure]

Sequence name: Q9UJZ1 (SEQ ID NO: 637)
Sequence documentation:
Alignment of:
D11853_PEA_1_P18 (SEQ ID NO: 597) × Q9UJZ1 (SEQ ID NO: 637)
Alignment segment 1/1:

| | | | |
|---|---|---|---|
| Quality: | 1834.00 | Escore: | 0 |
| Matching length: | 205 | Total length: | 356 |
| Matching Percent Similarity: | 100.00 | Matching Percent Identity: | 100.00 |
| Total Percent Similarity: | 57.58 | Total Percent Identity: | 57.58 |
| Gaps: | 1 | | |

Alignment:

[chemical structure]

[chemical structure]

[chemical structure]

[chemical structure]

[chemical structure]

[chemical structure]

[chemical structure]

[chemical structure]

Sequence name: Q9P042 (SEQ ID NO: 639)
Sequence documentation:
Alignment of:
D11853_PEA_1_P19 (SEQ ID NO: 598) × Q9P042 (SEQ ID NO: 639)
Alignment segment 1/1:

| | | | |
|---|---|---|---|
| Quality: | 1110.00 | Escore: | 0 |
| Matching length: | 116 | Total length: | 116 |
| Matching Percent Similarity: | 100.00 | Matching Percent Identity: | 100.00 |
| Total Percent Similarity: | 100.00 | Total Percent Identity: | 100.00 |
| Gaps: | 0 | | |

Alignment:

[chemical structure]

[chemical structure]

[chemical structure]

Sequence name: Q96FY2 (SEQ ID NO: 638)
Sequence documentation:
Alignment of:
D11853_PEA_1_P19 (SEQ ID NO: 598) × Q96FY2 (SEQ ID NO: 638)
Alignment segment 1/1:

| | | | |
|---|---|---|---|
| Quality: | 1328.00 | Escore: | 0 |
| Matching length: | 142 | Total length: | 142 |
| Matching Percent Similarity: | 99.30 | Matching Percent Identity: | 99.30 |
| Total Percent Similarity: | 99.30 | Total Percent Identity: | 99.30 |
| Gaps: | 0 | | |

Alignment:

[chemical structure]

[chemical structure]

[chemical structure]

Sequence name: Q9UJZ1 (SEQ ID NO: 637)
Sequence documentation:
Alignment of:
D11853_PEA_1_P19 (SEQ ID NO: 598) × Q9UJZ1 (SEQ ID NO: 637)
Alignment segment 1/1:

| | | | |
|---|---|---|---|
| Quality: | 1343.00 | Escore: | 0 |
| Matching length: | 142 | Total length: | 142 |
| Matching Percent Similarity: | 100.00 | Matching Percent Identity: | 100.00 |
| Total Percent Similarity: | 100.00 | Total Percent Identity: | 100.00 |
| Gaps: | 0 | | |

Alignment:

[chemical structure]

[chemical structure]

[chemical structure]

Sequence name: Q96FY2 (SEQ ID NO: 638)
Sequence documentation:
Alignment of:
D11853_PEA_1 P21 (SEQ ID NO: 600) × Q96FY2 (SEQ ID NO: 638)
Alignment segment 1/1:

| | | | |
|---|---|---|---|
| Quality: | 587.00 | Escore: | 0 |
| Matching length: | 68 | Total length: | 68 |
| Matching Percent Similarity: | 95.59 | Matching Percent Identity: | 92.65 |
| Total Percent Similarity: | 95.59 | Total Percent Identity: | 92.65 |
| Gaps: | 0 | | |

Alignment:

[chemical structure]

[chemical structure]

Sequence name: Q9UJZ1 (SEQ ID NO: 637)
Sequence documentation:
Alignment of:
D11853_PEA_1_P21 (SEQ ID NO: 600) × Q9UJZ1 (SEQ ID NO: 637)
Alignment segment 1/1:

| | | | |
|---|---|---|---|
| Quality: | 587.00 | Escore: | 0 |
| Matching length: | 68 | Total length: | 68 |
| Matching Percent Similarity: | 95.59 | Matching Percent Identity: | 92.65 |
| Total Percent Similarity: | 95.59 | Total Percent Identity: | 92.65 |
| Gaps: | 0 | | |

Alignment:

[chemical structure]

[chemical structure]

Sequence name: Q9P042 (SEQ ID NO: 639)
Sequence documentation:
Alignment of:
D11853_PEA_1_P22 (SEQ ID NO: 601) × Q9P042 (SEQ ID NO: 639)
Alignment segment 1/1:

| | | | |
|---|---|---|---|
| Quality: | 348.00 | Escore: | 0 |
| Matching length: | 37 | Total length: | 37 |
| Matching Percent Similarity: | 97.30 | Matching Percent Identity: | 97.30 |
| Total Percent Similarity: | 97.30 | Total Percent Identity: | 97.30 |
| Gaps: | 0 | | |

Alignment:

[chemical structure]

Sequence name: Q96FY2 (SEQ ID NO: 638)
Sequence documentation:
Alignment of:
D11853_PEA_1_P22 (SEQ ID NO: 601) × Q96FY2 (SEQ ID NO: 638)
Alignment segment 1/1:

| | | | |
|---|---|---|---|
| Quality: | 581.00 | Escore: | 0 |
| Matching length: | 63 | Total length: | 63 |
| Matching Percent Similarity: | 98.41 | Matching Percent Identity: | 98.41 |
| Total Percent Similarity: | 98.41 | Total Percent Identity: | 98.41 |
| Gaps: | 0 | | |

Alignment:

[chemical structure]

[chemical structure]

Sequence name: Q9UJZ1 (SEQ ID NO: 637)
Sequence documentation:
Alignment of:
D11853_PEA_1_P22 (SEQ ID NO: 601) × Q9UJZ1 (SEQ ID NO: 637)
Alignment segment 1/1:

| | | | |
|---|---|---|---|
| Quality: | 581.00 | Escore: | 0 |
| Matching length: | 63 | Total length: | 63 |
| Matching Percent Similarity: | 98.41 | Matching Percent Identity: | 98.41 |
| Total Percent Similarity: | 98.41 | Total Percent Identity: | 98.41 |
| Gaps: | 0 | | |

Alignment:

[chemical structure]

[chemical structure]

Sequence name: Q9P042 (SEQ ID NO: 639)
Sequence documentation:
Alignment of:
D11853_PEA_1_P24 (SEQ ID NO: 602) × Q9P042 (SEQ ID NO: 639)
Alignment segment 1/1:

| | | | |
|---|---|---|---|
| Quality: | 650.00 | Escore: | 0 |
| Matching length: | 68 | Total length: | 68 |
| Matching Percent Similarity: | 100.00 | Matching Percent Identity: | 100.00 |
| Total Percent Similarity: | 100.00 | Total Percent Identity: | 100.00 |
| Gaps: | 0 | | |

Alignment:

[chemical structure]

[chemical structure]

Sequence name: Q96FY2 (SEQ ID NO: 638)
Sequence documentation:
Alignment of:
D11853_PEA_1_P24 (SEQ ID NO: 602) × Q96FY2 (SEQ ID NO: 638)
Alignment segment 1/1:

| | | | |
|---|---|---|---|
| Quality: | 883.00 | Escore: | 0 |
| Matching length: | 94 | Total length: | 94 |
| Matching Percent Similarity: | 100.00 | Matching Percent Identity: | 100.00 |
| Total Percent Similarity: | 100.00 | Total Percent Identity: | 100.00 |
| Gaps: | 0 | | |

Alignment:

[chemical structure]

[chemical structure]

Sequence name: Q9UJZ1 (SEQ ID NO: 637)
Sequence documentation:
Alignment of:
D11853_PEA_1_P24 (SEQ ID NO: 602) × Q9UJZ1 (SEQ ID NO: 637)
Alignment segment 1/1:

| | | | |
|---|---|---|---|
| Quality: | 883.00 | Escore: | 0 |
| Matching length: | 94 | Total length: | 94 |
| Matching Percent Similarity: | 100.00 | Matching Percent Identity: | 100.00 |
| Total Percent Similarity: | 100.00 | Total Percent Identity: | 100.00 |
| Gaps: | 0 | | |

Alignment:

[chemical structure]

[chemical structure]

### Description for Cluster R11723

[2291] Cluster R11723 features 6 transcript(s) and 26 segment(s) of interest, the names for which are given in Tables 1 and 2, respectively, the sequences themselves are given at the end of the application. The selected protein variants are given in table 3.

TABLE 1
Transcripts of interest

| Transcript Name | SEQ ID NO: |
|---|---|
| R11723_PEA_1_T15 | 75 |
| R11723_PEA_1_T17 | 76 |
| R11723_PEA_1_T19 | 77 |
| R11723_PEA_1_T20 | 78 |
| R11723_PEA_1_T5 | 79 |
| R11723_PEA_1_T6 | 80 |

TABLE 2
Segments of interest

| Segment Name | SEQ ID NO: |
|---|---|
| R11723_PEA_1_node_13 | 450 |
| R11723_PEA_1_node_16 | 451 |
| R11723_PEA_1_node_19 | 452 |
| R11723_PEA_1_node_2 | 453 |
| R11723_PEA_1_node_22 | 454 |
| R11723_PEA_1_node_31 | 455 |
| R11723_PEA_1_node_10 | 456 |
| R11723_PEA_1_node_11 | 457 |
| R11723_PEA_1_node_15 | 458 |
| R11723_PEA_1_node_18 | 459 |
| R11723_PEA_1_node_20 | 460 |
| R11723_PEA_1_node_21 | 461 |
| R11723_PEA_1_node_23 | 462 |
| R11723_PEA_1_node_24 | 463 |
| R11723_PEA_1_node_25 | 464 |
| R11723_PEA_1_node_26 | 465 |
| R11723_PEA_1_node_27 | 466 |
| R11723_PEA_1_node_28 | 467 |
| R11723_PEA_1_node_29 | 468 |
| R11723_PEA_1_node_3 | 469 |
| R11723_PEA_1_node_30 | 470 |
| R11723_PEA_1_node_4 | 471 |
| R11723_PEA_1_node_5 | 472 |
| R11723_PEA_1_node_6 | 473 |
| R11723_PEA_1_node_7 | 474 |
| R11723_PEA_1_node_8 | 475 |

TABLE 3
Proteins of interest

| Protein Name | SEQ ID NO: |
|---|---|
| R11723_PEA_1_P2 | 603 |
| R11723_PEA_1_P6 | 604 |
| R11723_PEA_1_P7 | 605 |
| R11723_PEA_1_P13 | 606 |
| R11723_PEA_1_P10 | 607 |

[2292] Cluster R11723 can be used as a diagnostic marker according to overexpression of transcripts of this cluster in cancer. Expression of such transcripts in normal tissues is also given according to the previously described methods. The term “number” in the right hand column of the table and the numbers on the y-axis of the figure below refer to weighted expression of ESTs in each category, as “parts per million” (ratio of the expression of ESTs for a particular cluster to the expression of all ESTs in that category, according to parts per million).

[2293] Overall, the following results were obtained as shown with regard to the histograms in FIG. 27 and Table 4. This cluster is overexpressed (at least at a minimum level) in the following pathological conditions: epithelial malignant tumors, a mixture of malignant tumors from different tissues and kidney malignant tumors.

TABLE 4
Normal tissue distribution

| Name of Tissue | Number |
|---|---|
| adrenal | 0 |
| brain | 30 |
| epithelial | 3 |
| general | 17 |
| Head and neck | 0 |
| kidney | 0 |
| Lung | 0 |
| breast | 0 |
| ovary | 0 |
| pancreas | 10 |
| skin | 0 |
| uterus | 0 |

TABLE 5
P values and ratios for expression in cancerous tissue

| Name of Tissue | P1 | P2 | SP1 | R3 | SP2 | R4 |
|---|---|---|---|---|---|---|
| adrenal | 4.2e−01 | 4.6e−01 | 4.6e−01 | 2.2 | 5.3e−01 | 1.9 |
| brain | 2.2e−01 | 2.0e−01 | 1.2e−02 | 2.8 | 5.0e−02 | 2.0 |
| epithelial | 3.0e−05 | 6.3e−05 | 1.8e−05 | 6.3 | 3.4e−06 | 6.4 |
| general | 7.2e−03 | 4.0e−02 | 1.3e−04 | 2.1 | 1.1e−03 | 1.7 |
| head and neck | 1 | 5.0e−01 | 1 | 1.0 | 7.5e−01 | 1.3 |
| kidney | 1.5e−01 | 2.4e−01 | 4.4e−03 | 5.4 | 2.8e−02 | 3.6 |
| lung | 1.2e−01 | 1.6e−01 | 1 | 1.6 | 1 | 1.3 |
| breast | 5.9e−01 | 4.4e−01 | 1 | 1.1 | 6.8e−01 | 1.5 |
| ovary | 1.6e−02 | 1.3e−02 | 1.0e−01 | 3.8 | 7.0e−02 | 3.5 |
| pancreas | 5.5e−01 | 2.0e−01 | 3.9e−01 | 1.9 | 1.4e−01 | 2.7 |
| skin | 1 | 4.4e−01 | 1 | 1.0 | 1.9e−02 | 2.1 |
| uterus | 1.5e−02 | 5.4e−02 | 1.9e−01 | 3.1 | 1.4e−01 | 2.5 |

[2294] As noted above, cluster R11723 features 6 transcript(s), which were listed in Table 1 above. A description of each variant protein according to the present invention is now provided.

[2295] Variant protein R11723_PEA_{—}1_P2 (SEQ ID NO:603) according to the present invention has an amino acid sequence as given at the end of the application; it is encoded by transcript(s) R11723_PEA_{—}1_T6 (SEQ ID NO:80). The location of the variant protein was determined according to results from a number of different software programs and analyses, including analyses from SignalP and other specialized programs. The variant protein is believed to be located as follows with regard to the cell: secreted. The protein localization is believed to be secreted because both signal-peptide prediction programs predict that this protein has a signal peptide, and neither trans-membrane region prediction program predicts that this protein has a trans-membrane region.

[2296] Variant protein R11723_PEA_{—}1_P2 (SEQ ID NO:603) also has the following non-silent SNPs (Single Nucleotide Polymorphisms) as listed in Table 6, (given according to their position(s) on the amino acid sequence, with the alternative amino acid(s) listed; the last column indicates whether the SNP is known or not; the presence of known SNPs in variant protein R11723_PEA_{—}1_P2 (SEQ ID NO:603) sequence provides support for the deduced sequence of this variant protein according to the present invention).

TABLE 6
Amino acid mutations

| SNP position(s) on amino acid | Alternative | |
|---|---|---|
| sequence | amino acid(s) | Previously known SNP? |
| 107 | H -> P | Yes |
| 70 | G -> | No |
| 70 | G -> C | No |

[2297] Variant protein R11723_PEA_{—}1_P2 (SEQ ID NO:603) is encoded by the following transcript(s): R11723_PEA_{—}1_T6 (SEQ ID NO:80), for which the sequence(s) is/are given at the end of the application. The coding portion of transcript R11723_PEA_{—}1_T6 (SEQ ID NO:80) is shown in bold; this coding portion starts at position 1716 and ends at position 2051. The transcript also has the following SNPs as listed in Table 7 (given according to their position on the nucleotide sequence, with the alternative nucleic acid listed; the last column indicates whether the SNP is known or not; the presence of known SNPs in variant protein R11723_PEA_{—}1_P2 (SEQ ID NO:603) sequence provides support for the deduced sequence of this variant protein according to the present invention).

TABLE 7
Nucleic acid SNPs

| SNP position on necleotide | Alternative | |
|---|---|---|
| sequence | nucleic acid | Previously known SNP? |
| 1231 | C -> T | Yes |
| 1278 | G -> C | Yes |
| 1923 | G -> | No |
| 1923 | G -> T | No |
| 2035 | A -> C | Yes |
| 2048 | A -> C | No |
| 2057 | A -> G | Yes |

[2298] Variant protein R11723_PEA_{—}1_P6 (SEQ ID NO:604) according to the present invention has an amino acid sequence as given at the end of the application; it is encoded by transcript(s) R11723_PEA_{—}1_T15 (SEQ ID NO:75). One or more alignments to one or more previously published protein sequences are given at the end of the application. A brief description of the relationship of the variant protein according to the present invention to each such aligned protein is as follows:

[2299] Comparison Report Between R11723_PEA_{—}1_P6 (SEQ ID NO:604) and Q8IXM0 (SEQ ID NO:1393):

[2300] 1. An isolated chimeric polypeptide encoding for R11723_PEA_{—}1_P6 (SEQ ID NO:604), comprising a first amino acid sequence being at least 70%, optionally at least 80%, preferably at least 85%, more preferably at least 90% and most preferably at least 95% homologous to a polypeptide having the sequence MWVLGIAATFCGLFLLPGFALQIQCYQCEEFQLNNDCSSPEFIVNCTVNVQDMCQKEVMEQSAGIMYRKS CASSAACLIASAGSPCRGLAPGREEQRALHKAGAVGGGVR (SEQ ID NO:1558) corresponding to amino acids 1-110 of R11723_PEA_{—}1_P6 (SEQ ID NO:604), and a second amino acid sequence being at least 90% homologous to MYAQALLVVGVLQRQAAAQHLHEHPPKLLRGHRVQERVDDRAEVEKRLREGEEDHVRPEVGPRPVVLG FGRSHDPPNLVGHPAYGQCHNNQPWADTSRRERQRKEKHSMRTQ corresponding to amino acids 1-112 of Q8IXM0, which also corresponds to amino acids 111-222 of R11723_PEA_{—}1_P6 (SEQ ID NO:604), wherein said first and second amino acid sequences are contiguous and in a sequential order.

[2301] 2. An isolated polypeptide encoding for a head of R11723_PEA_{—}1_P6 (SEQ ID NO:604), comprising a polypeptide being at least 70%, optionally at least about 80%, preferably at least about 85%, more preferably at least about 90% and most preferably at least about 95% homologous to the sequence MWVLGIAATFCGLFLLPGFALQIQCYQCEEFQLNNDCSSPEFIVNCTVNVQDMCQKEVMEQSAGIMYRKS CASSAACLIASAGSPCRGLAPGREEQRALHKAGAVGGGVR (SEQ ID NO:1558) of R11723_PEA_{—}1_P6 (SEQ ID NO:604).

### Comparison Report Between R11723_PEA_{—}1_P6 (SEQ ID NO:604) and Q96AC2 (SEQ ID NO:1394):

[2302] 1. An isolated chimeric polypeptide encoding for R11723_PEA_{—}1_P6 (SEQ ID NO:604), comprising a first amino acid sequence being at least 90% homologous to MWVLGIAATFCGLFLLPGFALQIQCYQCEEFQLNNDCSSPEFIVNCTVNVQDMCQKEVMEQSAGIMYRKS CASSAACLIASAG corresponding to amino acids 1-83 of Q96AC2, which also corresponds to amino acids 1-83 of R11723_PEA_{—}1_P6 (SEQ ID NO:604), and a second amino acid sequence being at least 70%, optionally at least 80%, preferably at least 85%, more preferably at least 90% and most preferably at least 95% homologous to a polypeptide having the sequence SPCRGLAPGREEQRALHKAGAVGGGVRMYAQALLVVGVLQRQAAAQHLHEHPPKLLRGHRVQERVDD RAEVEKRLREGEEDHVRPEVGPRPVVLGFGRSHDPPNLVGHPAYGQCHNNQPWADTSRRERQRKEKHSM RTQ (SEQ ID NO:1559) corresponding to amino acids 84-222 of R11723_PEA_{—}1_P6 (SEQ ID NO:604) wherein said first and second amino acid sequences are contiguous and in a sequential order.

[2303] 2. An isolated polypeptide encoding for a tail of R11723_PEA_{—}1_P6 (SEQ ID NO:604), comprising a polypeptide being at least 70%, optionally at least about 80%, preferably at least about 85%, more preferably at least about 90% and most preferably at least about 95% homologous to the sequence SPCRGLAPGREEQRALHKAGAVGGGVRMYAQALLVVGVLQRQAAAQHLHEHPPKLLRGHRVQERVDD RAEVEKRLREGEEDHVRPEVGPRPVVLGFGRSHDPPNLVGHPAYGQCHNNQPWADTSRRERQRKEKHSM RTQ SEQ ID NO:1559) in R11723_PEA_{—}1_P6 (SEQ ID NO:604).

[2304] Comparison Report Between R11723_PEA_{—}1_P6 (SEQ ID NO:604) and Q8N2G4 (SEQ ID NO:1395):

[2305] 1. An isolated chimeric polypeptide encoding for R11723_PEA_{—}1_P6 (SEQ ID NO:604), comprising a first amino acid sequence being at least 90% homologous to MWVLGIAATFCGLFLLPGFALQIQCYQCEEFQLNNDCSSPEFIVNCTVNVQDMCQKEVMEQSAGIMYRKS CASSAACLIASAG corresponding to amino acids 1-83 of Q8N2G4, which also corresponds to amino acids 1-83 of R11723_PEA_{—}1_P6 (SEQ ID NO:604), and a second amino acid sequence being at least 70%, optionally at least 80%, preferably at least 85%, more preferably at least 90% and most preferably at least 95% homologous to a polypeptide having the sequence SPCRGLAPGREEQRALHKAGAVGGGVRMYAQALLVVGVLQRQAAAQHLHEHPPKLLRGHRVQERVDD RAEVEKRLREGEEDHVRPEVGPRPVVLGFGRSHDPPNLVGHPAYGQCHNNQPWADTSRRERQRKEKHSM RTQ SEQ ID NO:1559) corresponding to amino acids 84-222 of R11723_PEA_{—}1_P6 (SEQ ID NO:604), wherein said first and second amino acid sequences are contiguous and in a sequential order.

[2306] 2. An isolated polypeptide encoding for a tail of R11723_PEA_{—}1_P6 (SEQ ID NO:604), comprising a polypeptide being at least 70%, optionally at least about 80%, preferably at least about 85%, more preferably at least about 90% and most preferably at least about 95% homologous to the sequence SPCRGLAPGREEQRALHKAGAVGGGVRMYAQALLVVGVLQRQAAAQHLHEHPPKLLRGHRVQERVDD RAEVEKRLREGEEDHVRPEVGPRPVVLGFGRSHDPPNLVGHPAYGQCHNNQPWADTSRRERQRKEKHSM RTQ SEQ ID NO:1559) in R11723_PEA_{—}1_P6 (SEQ ID NO:604).

### Comparison Report Between R11723_PEA_{—}1_P6 (SEQ ID NO:604) and BAC85518 (SEQ ID NO:1396):

[2307] 1. An isolated chimeric polypeptide encoding for R11723_PEA_{—}1_P6 (SEQ ID NO:604), comprising a first amino acid sequence being at least 90% homologous to MWVLGIAATFCGLFLLPGFALQIQCYQCEEFQLNNDCSSPEFIVNCTVNVQDMCQKEVMEQSAGIMYRKS CASSAACLIASAG corresponding to amino acids 24-106 of BAC85518 (SEQ ID NO:1396), which also corresponds to amino acids 1-83 of R11723_PEA_{—}1_P6 (SEQ ID NO:604), and a second amino acid sequence being at least 70%, optionally at least 80%, preferably at least 85%, more preferably at least 90% and most preferably at least 95% homologous to a polypeptide having the sequence SPCRGLAPGREEQRALHKAGAVGGGVRMYAQALLVVGVLQRQAAAQHLHEHPPKLLRGHRVQERVDD RAEVEKRLREGEEDHVRPEVGPRPVVLGFGRSHDPPNLVGHPAYGQCHNNQPWADTSRRERQRKEKHSM RTQ SEQ ID NO:1559) corresponding to amino acids 84-222 of R11723_PEA_{—}1_P6 (SEQ ID NO:604), wherein said first and second amino acid sequences are contiguous and in a sequential order.

[2308] 2. An isolated polypeptide encoding for a tail of R11723_PEA_{—}1_P6 (SEQ ID NO:604), comprising a polypeptide being at least 70%, optionally at least about 80%, preferably at least about 85%, more preferably at least about 90% and most preferably at least about 95% homologous to the sequence SPCRGLAPGREEQRALHKAGAVGGGVRMYAQALLVVGVLQRQAAAQHLHEHPPKLLRGHRVQERVDD RAEVEKRLREGEEDHVRPEVGPRPVVLGFGRSHDPPNLVGHPAYGQCHNNQPWADTSRRERQRKEKHSM RTQ SEQ ID NO:1559) in R11723_PEA_{—}1_P6 (SEQ ID NO:604).

[2309] The location of the variant protein was determined according to results from a number of different software programs and analyses, including analyses from SignalP and other specialized programs. The variant protein is believed to be located as follows with regard to the cell: secreted. The protein localization is believed to be secreted because both signal-peptide prediction programs predict that this protein has a signal peptide, and neither trans-membrane region prediction program predicts that this protein has a trans-membrane region.

[2310] Variant protein R11723_PEA_{—}1_P6 (SEQ ID NO:604) also has the following non-silent SNPs (Single Nucleotide Polymorphisms) as listed in Table 8, (given according to their position(s) on the amino acid sequence, with the alternative amino acid(s) listed; the last column indicates whether the SNP is known or not; the presence of known SNPs in variant protein R11723_PEA_{—}1_P6 (SEQ ID NO:604) sequence provides support for the deduced sequence of this variant protein according to the present invention).

TABLE 8
Amino acid mutations

| SNP position(s) on amino acid | Alternative | |
|---|---|---|
| sequence | amino acid(s) | Previously known SNP? |
| 180 | G -> | No |
| 180 | G -> C | No |
| 217 | H -> P | Yes |

[2311] Variant protein R11723_PEA_{—}1_P6 (SEQ ID NO:604) is encoded by the following transcript(s): R11723_PEA_{—}1_T15 (SEQ ID NO:75), for which the sequence(s) is/are given at the end of the application. The coding portion of transcript R11723_PEA_{—}1_T15 (SEQ ID NO:75) is shown in bold; this coding portion starts at position 434 and ends at position 1099. The transcript also has the following SNPs as listed in Table 9 (given according to their position on the nucleotide sequence, with the alternative nucleic acid listed; the last column indicates whether the SNP is known or not; the presence of known SNPs in variant protein R11723_PEA_{—}1_P6 (SEQ ID NO:604) sequence provides support for the deduced sequence of this variant protein according to the present invention).

TABLE 9
Nucleic acid SNPs

| SNP position on nucleotide | Alternative | |
|---|---|---|
| sequence | nucleic acid | Previously known SNP? |
| 971 | G -> | No |
| 971 | G -> T | No |
| 1083 | A -> C | Yes |
| 1096 | A -> C | No |
| 1105 | A -> G | Yes |

[2312] Variant protein R11723_PEA_{—}1_P7 (SEQ ID NO:605) according to the present invention has an amino acid sequence as given at the end of the application; it is encoded by transcript(s) R11723_PEA_{—}1_T17 (SEQ ID NO:76). One or more alignments to one or more previously published protein sequences are given at the end of the application. A brief description of the relationship of the variant protein according to the present invention to each such aligned protein is as follows:

[2313] Comparison Report Between R11723_PEA_{—}1_P7 (SEQ ID NO:605) and Q96AC2 (SEQ ID NO: 1394):

[2314] 1. An isolated chimeric polypeptide encoding for R11723_PEA_{—}1_P7 (SEQ ID NO:605), comprising a first amino acid sequence being at least 90% homologous to MWVLGIAATFCGLFLLPGFALQIQCYQCEEFQLNNDCSSPEFIVNCTVNVQDMCQKEVMEQSAG corresponding to amino acids 1-64 of Q96AC2 (SEQ ID NO: 1394), which also corresponds to amino acids 1-64 of R11723_PEA_{—}1_P7 (SEQ ID NO:605), and a second amino acid sequence being at least 70%, optionally at least 80%, preferably at least 85%, more preferably at least 90% and most preferably at least 95% homologous to a polypeptide having the sequence SHCVTRLECSGTISAHCNLCLPGSNDHPT (SEQ ID NO:1560) corresponding to amino acids 65-93 of R11723_PEA_{—}1_P7 (SEQ ID NO:605), wherein said first and second amino acid sequences are contiguous and in a sequential order.

[2315] 2. An isolated polypeptide encoding for a tail of R11723_PEA_{—}1_P7 (SEQ ID NO:605), comprising a polypeptide being at least 70%, optionally at least about 80%, preferably at least about 85%, more preferably at least about 90% and most preferably at least about 95% homologous to the sequence SHCVTRLECSGTISAHCNLCLPGSNDHPT (SEQ ID NO:1560) in R11723_PEA_{—}1_P7 (SEQ ID NO:605).

[2316] Comparison Report Between R11723_PEA_{—}1_P7 (SEQ ID NO:605) and Q8N2G4 (SEQ ID NO: 1395):

[2317] 1. An isolated chimeric polypeptide encoding for R11723_PEA_{—}1_P7 (SEQ ID NO:605), comprising a first amino acid sequence being at least 90% homologous to MWVLGIAATFCGLFLLPGFALQIQCYQCEEFQLNNDCSSPEFIVNCTVNVQDMCQKEVMEQSAG corresponding to amino acids 1-64 of Q8N2G4 (SEQ ID NO: 1395), which also corresponds to amino acids 1-64 of R11723_PEA_{—}1_P7 (SEQ ID NO:605), and a second amino acid sequence being at least 70%, optionally at least 80%, preferably at least 85%, more preferably at least 90% and most preferably at least 95% homologous to a polypeptide having the sequence SHCVTRLECSGTISAHCNLCLPGSNDHPT (SEQ ID NO:1560) corresponding to amino acids 65-93 of R11723_PEA_{—}1_P7 (SEQ ID NO:605), wherein said first and second amino acid sequences are contiguous and in a sequential order.

[2318] 2. An isolated polypeptide encoding for a tail of R11723_PEA_{—}1_P7 (SEQ ID NO:605), comprising a polypeptide being at least 70%, optionally at least about 80%, preferably at least about 85%, more preferably at least about 90% and most preferably at least about 95% homologous to the sequence SHCVTRLECSGTISAHCNLCLPGSNDHPT (SEQ ID NO:1560) in R11723_PEA_{—}1_P7 (SEQ ID NO:605).

[2319] Comparison Report Between R11723_PEA_{—}1_P7 (SEQ ID NO:605) and BAC85273 (SEQ ID NO:1397):

[2320] 1. An isolated chimeric polypeptide encoding for R11723_PEA_{—}1_P7 (SEQ ID NO:605), comprising a first amino acid sequence being at least 70%, optionally at least 80%, preferably at least 85%, more preferably at least 90% and most preferably at least 95% homologous to a polypeptide having the sequence MWVLG (SEQ ID NO:1561) corresponding to amino acids 1-5 of R11723_PEA_{—}1_P7 (SEQ ID NO:605), second amino acid sequence being at least 90% homologous to IAATFCGLFLLPGFALQIQCYQCEEFQLNNDCSSPEFIVNCTVNVQDMCQKEVMEQSAG corresponding to amino acids 22-80 of BAC85273 (SEQ ID NO:1397), which also corresponds to amino acids 6-64 of R11723_PEA_{—}1_P7 (SEQ ID NO:605), and a third amino acid sequence being at least 70%, optionally at least 80%, preferably at least 85%, more preferably at least 90% and most preferably at least 95% homologous to a polypeptide having the sequence SHCVTRLECSGTISAHCNLCLPGSNDHPT (SEQ ID NO:1560) corresponding to amino acids 65-93 of R11723_PEA_{—}1_P7 (SEQ ID NO:605), wherein said first, second and third amino acid sequences are contiguous and in a sequential order.

[2321] 2. An isolated polypeptide encoding for a head of R11723_PEA_{—}1_P7 (SEQ ID NO:605), comprising a polypeptide being at least 70%, optionally at least about 80%, preferably at least about 85%, more preferably at least about 90% and most preferably at least about 95% homologous to the sequence MWVLG (SEQ ID NO:1561) of R11723_PEA_{—}1_P7 (SEQ ID NO:605).

[2322] 3. An isolated polypeptide encoding for a tail of R11723_PEA_{—}1_P7 (SEQ ID NO:605), comprising a polypeptide being at least 70%, optionally at least about 80%, preferably at least about 85%, more preferably at least about 90% and most preferably at least about 95% homologous to the sequence SHCVTRLECSGTISAHCNLCLPGSNDHPT (SEQ ID NO:1560) in R11723_PEA_{—}1_P7 (SEQ ID NO:605).

[2323] Comparison Report Between R11723_PEA_{—}1_P7 (SEQ ID NO:605) and BAC85518 (SEQ ID NO:1396):

[2324] 1. An isolated chimeric polypeptide encoding for R11723_PEA_{—}1_P7 (SEQ ID NO:605), comprising a first amino acid sequence being at least 90% homologous to MWVLGIAATFCGLFLLPGFALQIQCYQCEEFQLNNDCSSPEFIVNCTVNVQDMCQKEVMEQSAG corresponding to amino acids 24-87 of BAC85518 (SEQ ID NO:1396), which also corresponds to amino acids 1-64 of R11723_PEA_{—}1_P7 (SEQ ID NO:605), and a second amino acid sequence being at least 70%, optionally at least 80%, preferably at least 85%, more preferably at least 90% and most preferably at least 95% homologous to a polypeptide having the sequence SHCVTRLECSGTISAHCNLCLPGSNDHPT (SEQ ID NO:1560) corresponding to amino acids 65-93 of R11723_PEA_{—}1_P7 (SEQ ID NO:605), wherein said first and second amino acid sequences are contiguous and in a sequential order.

[2325] 2. An isolated polypeptide encoding for a tail of R11723_PEA_{—}1_P7 (SEQ ID NO:605), comprising a polypeptide being at least 70%, optionally at least about 80%, preferably at least about 85%, more preferably at least about 90% and most preferably at least about 95% homologous to the sequence SHCVTRLECSGTISAHCNLCLPGSNDHPT (SEQ ID NO:1560) in R11723_PEA_{—}1_P7 (SEQ ID NO:605).

[2326] The location of the variant protein was determined according to results from a number of different software programs and analyses, including analyses from SignalP and other specialized programs. The variant protein is believed to be located as follows with regard to the cell: secreted. The protein localization is believed to be secreted because both signal-peptide prediction programs predict that this protein has a signal peptide, and neither trans-membrane region prediction program predicts that this protein has a trans-membrane region.

[2327] Variant protein R11723_PEA_{—}1_P7 (SEQ ID NO:605) also has the following non-silent SNPs (Single Nucleotide Polymorphisms) as listed in Table 10, (given according to their position(s) on the amino acid sequence, with the alternative amino acid(s) listed; the last column indicates whether the SNP is known or not; the presence of known SNPs in variant protein R11723_PEA_{—}1_P7 (SEQ ID NO:605) sequence provides support for the deduced sequence of this variant protein according to the present invention).

TABLE 10
Amino acid mutations

| SNP position(s) on amino acid | Alternative | |
|---|---|---|
| sequence | amino acid(s) | Previously known SNP? |
| 67 | C -> S | Yes |

[2328] Variant protein R11723_PEA_{—}1_P7 (SEQ ID NO:605) is encoded by the following transcript(s): R11723_PEA_{—}1_T17 (SEQ ID NO:76), for which the sequence(s) is/are given at the end of the application. The coding portion of transcript R11723_PEA_{—}1_T17 (SEQ ID NO:76) is shown in bold; this coding portion starts at position 434 and ends at position 712. The transcript also has the following SNPs as listed in Table 11 (given according to their position on the nucleotide sequence, with the alternative nucleic acid listed; the last column indicates whether the SNP is known or not; the presence of known SNPs in variant protein R11723_PEA_{—}1_P7 (SEQ ID NO:605) sequence provides support for the deduced sequence of this variant protein according to the present invention).

TABLE 11
Nucleic acid SNPs

| SNP position on nucleotide | Alternative | |
|---|---|---|
| sequence | nucleic acid | Previously known SNP? |
| 625 | G -> T | Yes |
| 633 | G -> C | Yes |
| 1303 | C -> T | Yes |

[2329] Variant protein R11723_PEA_{—}1_P13 (SEQ ID NO:606) according to the present invention has an amino acid sequence as given at the end of the application; it is encoded by transcript(s) R11723_PEA_{—}1_T19 (SEQ ID NO:77) and R11723_PEA_{—}1_T5 (SEQ ID NO:79). One or more alignments to one or more previously published protein sequences are given at the end of the application. A brief description of the relationship of the variant protein according to the present invention to each such aligned protein is as follows:

[2330] Comparison Report Between R11723_PEA_{—}1_P13 (SEQ ID NO:606) and Q96AC2 (SEQ ID NO: 1394):

[2331] 1. An isolated chimeric polypeptide encoding for R11723_PEA_{—}1_P13 (SEQ ID NO:606), comprising a first amino acid sequence being at least 90% homologous to MWVLGIAATFCGLFLLPGFALQIQCYQCEEFQLNNDCSSPEFIVNCTVNVQDMCQKEVMEQSA corresponding to amino acids 1-63 of Q96AC2 (SEQ ID NO: 1394), which also corresponds to amino acids 1-63 of R11723_PEA_{—}1_P13 (SEQ ID NO:606), and a second amino acid sequence being at least 70%, optionally at least 80%, preferably at least 85%, more preferably at least 90% and most preferably at least 95% homologous to a polypeptide having the sequence DTKRTNTLLFEMRHFAKQLTT (SEQ ID NO:1562) corresponding to amino acids 64-84 of R11723_PEA_{—}1_P13 (SEQ ID NO:606), wherein said first and second amino acid sequences are contiguous and in a sequential order.

[2332] 2. An isolated polypeptide encoding for a tail of R11723_PEA_{—}1_P13 (SEQ ID NO:606), comprising a polypeptide being at least 70%, optionally at least about 80%, preferably at least about 85%, more preferably at least about 90% and most preferably at least about 95% homologous to the sequence DTKRTNTLLFEMRHFAKQLTT (SEQ ID NO:1562) in R11723_PEA_{—}1_P13 (SEQ ID NO:606).

[2333] The location of the variant protein was determined according to results from a number of different software programs and analyses, including analyses from SignalP and other specialized programs. The variant protein is believed to be located as follows with regard to the cell: secreted. The protein localization is believed to be secreted because both signal-peptide prediction programs predict that this protein has a signal peptide, and neither trans-membrane region prediction program predicts that this protein has a trans-membrane region.

[2334] Variant protein R11723_PEA_{—}1_P13 (SEQ ID NO:606) is encoded by the following transcript(s): R11723_PEA_{—}1_T19 (SEQ ID NO:77), for which the sequence(s) is/are given at the end of the application. The coding portion of transcript R11723_PEA_{—}1_T19 (SEQ ID NO:77) is shown in bold; this coding portion starts at position 434 and ends at position 685. The transcript also has the following SNPs as listed in Table 12 (given according to their position on the nucleotide sequence, with the alternative nucleic acid listed; the last column indicates whether the SNP is known or not; the presence of known SNPs in variant protein R11723_PEA_{—}1_P13 (SEQ ID NO:606) sequence provides support for the deduced sequence of this variant protein according to the present invention).

TABLE 12
Nucleic acid SNPs

| SNP position on nucleotide | Alternative | |
|---|---|---|
| sequence | nucleic acid | Previously known SNP? |
| 778 | G -> T | Yes |
| 786 | G -> C | Yes |
| 1456 | C -> T | Yes |

[2335] Variant protein R11723_PEA_{—}1_P10 (SEQ ID NO:607) according to the present invention has an amino acid sequence as given at the end of the application; it is encoded by transcript(s) R11723_PEA_{—}1_T20 (SEQ ID NO:78). One or more alignments to one or more previously published protein sequences are given at the end of the application. A brief description of the relationship of the variant protein according to the present invention to each such aligned protein is as follows:

[2336] Comparison Report Between R11723_PEA_{—}1_P10 (SEQ ID NO:607) and Q96AC2 (SEQ ID NO: 1394):

[2337] 1. An isolated chimeric polypeptide encoding for R11723_PEA_{—}1_P10 (SEQ ID NO:607), comprising a first amino acid sequence being at least 90% homologous to MWVLGIAATFCGLFLLPGFALQIQCYQCEEFQLNNDCSSPEFIVNCTVNVQDMCQKEVMEQSA corresponding to amino acids 1-63 of Q96AC2 (SEQ ID NO: 1394), which also corresponds to amino acids 1-63 of R11723_PEA_{—}1_P10 (SEQ ID NO:607), and a second amino acid sequence being at least 70%, optionally at least 80%, preferably at least 85%, more preferably at least 90% and most preferably at least 95% homologous to a polypeptide having the sequence DRVSLCHEAGVQWNNFSTLQPLPPRLK (SEQ ID NO:1563) corresponding to amino acids 64-90 of R11723_PEA_{—}1_P10 (SEQ ID NO:607), wherein said first and second amino acid sequences are contiguous and in a sequential order.

[2338] 2. An isolated polypeptide encoding for a tail of R11723_PEA_{—}1_P10 (SEQ ID NO:607), comprising a polypeptide being at least 70%, optionally at least about 80%, preferably at least about 85%, more preferably at least about 90% and most preferably at least about 95% homologous to the sequence DRVSLCHEAGVQWNNFSTLQPLPPRLK (SEQ ID NO:1563) in R11723_PEA_{—}1_P10 (SEQ ID NO:607).

[2339] Comparison Report Between R11723_PEA_{—}1_P10 (SEQ ID NO:607) and Q8N2G4 (SEQ ID NO: 1395):

[2340] 1. An isolated chimeric polypeptide encoding for R11723_PEA_{—}1_P10 (SEQ ID NO:607), comprising a first amino acid sequence being at least 90% homologous to MWVLGIAATFCGLFLLPGFALQIQCYQCEEFQLNNDCSSPEFIVNCTVNVQDMCQKEVMEQSA corresponding to amino acids 1-63 of Q8N2G4 (SEQ ID NO: 1395), which also corresponds to amino acids 1-63 of R11723_PEA_{—}1_P10 (SEQ ID NO:607), and a second amino acid sequence being at least 70%, optionally at least 80%, preferably at least 85%, more preferably at least 90% and most preferably at least 95% homologous to a polypeptide having the sequence DRVSLCHEAGVQWNNFSTLQPLPPRLK (SEQ ID NO:1563) corresponding to amino acids 64-90 of R11723_PEA_{—}1_P10 (SEQ ID NO:607), wherein said first and second amino acid sequences are contiguous and in a sequential order.

[2341] 2. An isolated polypeptide encoding for a tail of R11723_PEA_{—}1_P10 (SEQ ID NO:607), comprising a polypeptide being at least 70%, optionally at least about 80%, preferably at least about 85%, more preferably at least about 90% and most preferably at least about 95% homologous to the sequence DRVSLCHEAGVQWNNFSTLQPLPPRLK (SEQ ID NO:1563) in R11723_PEA_{—}1_P10 (SEQ ID NO:607).

### Comparison Report Between R11723_PEA_{—}1_P10 (SEQ ID NO:607) and BAC85273 (SEQ ID NO:1397) (SEQ ID NO:1397):

[2342] 1. An isolated chimeric polypeptide encoding for R11723_PEA_{—}1_P10 (SEQ ID NO:607), comprising a first amino acid sequence being at least 70%, optionally at least 80%, preferably at least 85%, more preferably at least 90% and most preferably at least 95% homologous to a polypeptide having the sequence MWVLG (SEQ ID NO:1561) corresponding to amino acids 1-5 of R11723_PEA_{—}1_P10 (SEQ ID NO:607), second amino acid sequence being at least 90% homologous to IAATFCGLFLLPGFALQIQCYQCEEFQLNNDCSSPEFIVNCTVNVQDMCQKEVMEQSA corresponding to amino acids 22-79 of BAC85273 (SEQ ID NO:1397), which also corresponds to amino acids 6-63 of R11723_PEA_{—}1_P10 (SEQ ID NO:607), and a third amino acid sequence being at least 70%, optionally at least 80%, preferably at least 85%, more preferably at least 90% and most preferably at least 95% homologous to a polypeptide having the sequence DRVSLCHEAGVQWNNFSTLQPLPPRLK (SEQ ID NO:1563) corresponding to amino acids 64-90 of R11723_PEA_{—}1_P10 (SEQ ID NO:607), wherein said first, second and third amino acid sequences are contiguous and in a sequential order.

[2343] 2. An isolated polypeptide encoding for a head of R11723_PEA_{—}1_P10 (SEQ ID NO:607), comprising a polypeptide being at least 70%, optionally at least about 80%, preferably at least about 85%, more preferably at least about 90% and most preferably at least about 95% homologous to the sequence MWVLG (SEQ ID NO:1561) of R11723_PEA_{—}1_P10 (SEQ ID NO:607).

[2344] 3. An isolated polypeptide encoding for a tail of R11723_PEA_{—}1_P10 (SEQ ID NO:607), comprising a polypeptide being at least 70%, optionally at least about 80%, preferably at least about 85%, more preferably at least about 90% and most preferably at least about 95% homologous to the sequence DRVSLCHEAGVQWNNFSTLQPLPPRLK (SEQ ID NO:1563) in R11723_PEA_{—}1_P10 (SEQ ID NO:607).

[2345] Comparison Report Between R11723_PEA_{—}1_P10 (SEQ ID NO:607) and BAC85518 (SEQ ID NO:1396):

[2346] 1. An isolated chimeric polypeptide encoding for R11723_PEA_{—}1_P10 (SEQ ID NO:607), comprising a first amino acid sequence being at least 90% homologous to MWVLGIAATFCGLFLLPGFALQIQCYQCEEFQLNNDCSSPEFIVNCTVNVQDMCQKEVMEQSA corresponding to amino acids 24-86 of BAC85518 (SEQ ID NO:1396), which also corresponds to amino acids 1-63 of R11723_PEA_{—}1_P10 (SEQ ID NO:607), and a second amino acid sequence being at least 70%, optionally at least 80%, preferably at least 85%, more preferably at least 90% and most preferably at least 95% homologous to a polypeptide having the sequence DRVSLCHEAGVQWNNFSTLQPLPPRLK (SEQ ID NO:1563) corresponding to amino acids 64-90 of R11723_PEA_{—}1_P10 (SEQ ID NO:607), wherein said first and second amino acid sequences are contiguous and in a sequential order.

[2347] 2. An isolated polypeptide encoding for a tail of R11723_PEA_{—}1_P10 (SEQ ID NO:607), comprising a polypeptide being at least 70%, optionally at least about 80%, preferably at least about 85%, more preferably at least about 90% and most preferably at least about 95% homologous to the sequence DRVSLCHEAGVQWNNFSTLQPLPPRLK (SEQ ID NO:1563) in R11723_PEA_{—}1_P10 (SEQ ID NO:607).

[2348] The location of the variant protein was determined according to results from a number of different software programs and analyses, including analyses from SignalP and other specialized programs. The variant protein is believed to be located as follows with regard to the cell: secreted. The protein localization is believed to be secreted because both signal-peptide prediction programs predict that this protein has a signal peptide, and neither trans-membrane region prediction program predicts that this protein has a trans-membrane region.

[2349] Variant protein R11723_PEA_{—}1_P10 (SEQ ID NO:607) also has the following non-silent SNPs (Single Nucleotide Polymorphisms) as listed in Table 13, (given according to their position(s) on the amino acid sequence, with the alternative amino acid(s) listed; the last column indicates whether the SNP is known or not; the presence of known SNPs in variant protein R11723_PEA_{—}1_P10 (SEQ ID NO:607) sequence provides support for the deduced sequence of this variant protein according to the present invention).

TABLE 13
Amino acid mutations

| SNP position(s) on amino acid | Alternative | |
|---|---|---|
| sequence | amino acid(s) | Previously known SNP? |
| 66 | V -> F | Yes |

[2350] Variant protein R11723_PEA_{—}1_P10 (SEQ ID NO:607) is encoded by the following transcript(s): R11723_PEA_{—}1_T20 (SEQ ID NO:78), for which the sequence(s) is/are given at the end of the application. The coding portion of transcript R11723_PEA_{—}1_T20 (SEQ ID NO:78) is shown in bold; this coding portion starts at position 434 and ends at position 703. The transcript also has the following SNPs as listed in Table 14 (given according to their position on the nucleotide sequence, with the alternative nucleic acid listed; the last column indicates whether the SNP is known or not; the presence of known SNPs in variant protein R11723_PEA_{—}1_P10 (SEQ ID NO:607) sequence provides support for the deduced sequence of this variant protein according to the present invention).

TABLE 14
Nucleic acid SNPs

| SNP position on nucleotide | Alternative | |
|---|---|---|
| sequence | nucleic acid | Previously known SNP? |
| 629 | G -> T | Yes |
| 637 | G -> C | Yes |
| 1307 | C -> T | Yes |

[2351] As noted above, cluster R11723 features 26 segment(s), which were listed in Table 2 above and for which the sequence(s) are given at the end of the application. These segment(s) are portions of nucleic acid sequence(s) which are described herein separately because they are of particular interest. A description of each segment according to the present invention is now provided.

[2352] Segment cluster R11723_PEA_{—}1_node_{—}13 (SEQ ID NO:450) according to the present invention is supported by 5 libraries. The number of libraries was determined as previously described. This segment can be found in the following transcript(s): R11723_PEA_{—}1_T19 (SEQ ID NO:77), R11723_PEA_{—}1_T5 (SEQ ID NO:79) and R11723_PEA_{—}1_T6 (SEQ ID NO:80). Table 15 below describes the starting and ending position of this segment on each transcript.

TABLE 15
Segment location on transcripts

| | | Segment |
|---|---|---|
| | Segment | ending |
| Transcript name | starting position | position |
| R11723_PEA_1_T19 (SEQ ID NO: 77) | 624 | 776 |
| R11723_PEA_1_T5 (SEQ ID NO: 79) | 624 | 776 |
| R11723_PEA_1_T6 (SEQ ID NO: 80) | 658 | 810 |

[2353] Segment cluster R11723_PEA_{—}1_node_{—}16 (SEQ ID NO:451) according to the present invention is supported by 3 libraries. The number of libraries was determined as previously described. This segment can be found in the following transcript(s): R11723_PEA_{—}1_T17 (SEQ ID NO:76), R11723_PEA_{—}1_T19 (SEQ ID NO:77) and R11723_PEA_{—}1_T20 (SEQ ID NO:78). Table 16 below describes the starting and ending position of this segment on each transcript.

TABLE 16
Segment location on transcripts

| | | Segment |
|---|---|---|
| | Segment | ending |
| Transcript name | starting position | position |
| R11723_PEA_1_T17 (SEQ ID NO: 76) | 624 | 1367 |
| R11723_PEA_1_T19 (SEQ ID NO: 77) | 777 | 1520 |
| R11723_PEA_1_T20 (SEQ ID NO: 78) | 628 | 1371 |

[2354] Segment cluster R11723_PEA_{—}1_node_{—}19 (SEQ ID NO:452) according to the present invention is supported by 45 libraries. The number of libraries was determined as previously described. This segment can be found in the following transcript(s): R11723_PEA_{—}1_T5 (SEQ ID NO:79) and R11723_PEA_{—}1_T6 (SEQ ID NO:80). Table 17 below describes the starting and ending position of this segment on each transcript.

TABLE 17
Segment location on transcripts

| | | Segment |
|---|---|---|
| | Segment | ending |
| Transcript name | starting position | position |
| R11723_PEA_1_T5 (SEQ ID NO: 79) | 835 | 1008 |
| R11723_PEA_1_T6 (SEQ ID NO: 80) | 869 | 1042 |

[2355] Segment cluster R11723_PEA_{—}1_node_{—}2 (SEQ ID NO:453) according to the present invention is supported by 29 libraries. The number of libraries was determined as previously described. This segment can be found in the following transcript(s): R11723_PEA_{—}1_T15 (SEQ ID NO:75), R11723_PEA_{—}1_T17 (SEQ ID NO:76), R11723_PEA_{—}1_T19 (SEQ ID NO:77), R11723_PEA_{—}1_T20 (SEQ ID NO:78), R11723_PEA_{—}1_T5 (SEQ ID NO:79) and R11723_PEA_{—}1_T6 (SEQ ID NO:80). Table 18 below describes the starting and ending position of this segment on each transcript.

TABLE 18
Segment location on transcripts

| | | Segment |
|---|---|---|
| | Segment | ending |
| Transcript name | starting position | position |
| R11723_PEA_1_T15 (SEQ ID NO: 75) | 1 | 309 |
| R11723_PEA_1_T17 (SEQ ID NO: 76) | 1 | 309 |
| R11723_PEA_1_T19 (SEQ ID NO: 77) | 1 | 309 |
| R11723_PEA_1_T20 (SEQ ID NO: 78) | 1 | 309 |
| R11723_PEA_1_T5 (SEQ ID NO: 79) | 1 | 309 |
| R11723_PEA_1_T6 (SEQ ID NO: 80) | 1 | 309 |

[2356] Segment cluster R11723_PEA_{—}1_node_{—}22 (SEQ ID NO:454) according to the present invention is supported by 65 libraries. The number of libraries was determined as previously described. This segment can be found in the following transcript(s): R11723_PEA_{—}1_T5 (SEQ ID NO:79) and R11723_PEA_{—}1_T6 (SEQ ID NO:80). Table 19 below describes the starting and ending position of this segment on each transcript.

TABLE 19
Segment location on transcripts

| | | Segment |
|---|---|---|
| | Segment | ending |
| Transcript name | starting position | position |
| R11723_PEA_1_T5 (SEQ ID NO: 79) | 1083 | 1569 |
| R11723_PEA_1_T6 (SEQ ID NO: 80) | 1117 | 1603 |

[2357] Segment cluster R11723_PEA_{—}1_node_{—}31 (SEQ ID NO:455) according to the present invention is supported by 70 libraries. The number of libraries was determined as previously described. This segment can be found in the following transcript(s): R11723_PEA_{—}1_T15 (SEQ ID NO:75), R11723_PEA_{—}1_T5 (SEQ ID NO:79) and R11723_PEA_{—}1_T6 (SEQ ID NO:80). Table 20 below describes the starting and ending position of this segment on each transcript (it should be noted that these transcripts show alternative polyadenylation).

TABLE 20
Segment location on transcripts

| | | Segment |
|---|---|---|
| | Segment | ending |
| Transcript name | starting position | position |
| R11723_PEA_1_T15 (SEQ ID NO: 75) | 1060 | 1295 |
| R11723_PEA_1_T5 (SEQ ID NO: 79) | 1978 | 2213 |
| R11723_PEA_1_T6 (SEQ ID NO: 80) | 2012 | 2247 |

[2358] According to an optional embodiment of the present invention, short segments related to the above cluster are also provided. These segments are up to about 120 bp in length, and so are included in a separate description.

[2359] Segment cluster R11723_PEA_{—}1_node_{—}10 (SEQ ID NO:456) according to the present invention is supported by 38 libraries. The number of libraries was determined as previously described. This segment can be found in the following transcript(s): R11723_PEA_{—}1_T15 (SEQ ID NO:75), R11723_PEA_{—}1_T17 (SEQ ID NO:76), R11723_PEA_{—}1_T19 (SEQ ID NO:77), R11723_PEA_{—}1_T20 (SEQ ID NO:78), R11723_PEA_{—}1_T5 (SEQ ID NO:79) and R11723_PEA_{—}1_T6 (SEQ ID NO:80). Table 21 below describes the starting and ending position of this segment on each transcript.

TABLE 21
Segment location on transcripts

| | | Segment |
|---|---|---|
| | Segment | ending |
| Transcript name | starting position | position |
| R11723_PEA_1_T15 (SEQ ID NO: 75) | 486 | 529 |
| R11723_PEA_1_T17 (SEQ ID NO: 76) | 486 | 529 |
| R11723_PEA_1_T19 (SEQ ID NO: 77) | 486 | 529 |
| R11723_PEA_1_T20 (SEQ ID NO: 78) | 486 | 529 |
| R11723_PEA_1_T5 (SEQ ID NO: 79) | 486 | 529 |
| R11723_PEA_1_T6 (SEQ ID NO: 80) | 520 | 563 |

[2360] Segment cluster R11723_PEA_{—}1_node_{—}11 (SEQ ID NO:457) according to the present invention is supported by 42 libraries. The number of libraries was determined as previously described. This segment can be found in the following transcript(s): R11723_PEA_{—}1_T15 (SEQ ID NO:75), R11723_PEA_{—}1_T17 (SEQ ID NO:76), R11723_PEA_{—}1_T19 (SEQ ID NO:77), R11723_PEA_{—}1_T20 (SEQ ID NO:78), R11723_PEA_{—}1_T5 (SEQ ID NO:79) and R11723_PEA_{—}1_T6 (SEQ ID NO:80). Table 22 below describes the starting and ending position of this segment on each transcript.

TABLE 22
Segment location on transcripts

| | | Segment |
|---|---|---|
| | Segment | ending |
| Transcript name | starting position | position |
| R11723_PEA_1_T15 (SEQ ID NO: 75) | 530 | 623 |
| R11723_PEA_1_T17 (SEQ ID NO: 76) | 530 | 623 |
| R11723_PEA_1_T19 (SEQ ID NO: 77) | 530 | 623 |
| R11723_PEA_1_T20 (SEQ ID NO: 78) | 530 | 623 |
| R11723_PEA_1_T5 (SEQ ID NO: 79) | 530 | 623 |
| R11723_PEA_1_T6 (SEQ ID NO: 80) | 564 | 657 |

[2361] Segment cluster R11723_PEA_{—}1_node_{—}15 (SEQ ID NO:458) according to the present invention can be found in the following transcript(s): R11723_PEA_{—}1_T20 (SEQ ID NO:78). Table 23 below describes the starting and ending position of this segment on each transcript.

TABLE 23
Segment location on transcripts

| | | Segment |
|---|---|---|
| | Segment | ending |
| Transcript name | starting position | position |
| R11723_PEA_1_T20 (SEQ ID NO: 78) | 624 | 627 |

[2362] Segment cluster R11723_PEA_{—}1_node_{—}18 (SEQ ID NO:459) according to the present invention is supported by 40 libraries. The number of libraries was determined as previously described. This segment can be found in the following transcript(s): R11723_PEA_{—}1_T15 (SEQ ID NO:75), R11723_PEA_{—}1_T5 (SEQ ID NO:79) and R11723_PEA_{—}1_T6 (SEQ ID NO:80). Table 24 below describes the starting and ending position of this segment on each transcript.

TABLE 24
Segment location on transcripts

| | | Segment |
|---|---|---|
| | Segment | ending |
| Transcript name | starting position | position |
| R11723_PEA_1_T15 (SEQ ID NO: 75) | 624 | 681 |
| R11723_PEA_1_T5 (SEQ ID NO: 79) | 777 | 834 |
| R11723_PEA_1_T6 (SEQ ID NO: 80) | 811 | 868 |

[2363] Segment cluster R11723_PEA_{—}1_node_{—}20 (SEQ ID NO:460) according to the present invention can be found in the following transcript(s): R11723_PEA_{—}1_T5 (SEQ ID NO:79) and R11723_PEA_{—}1_T6 (SEQ ID NO:80). Table 25 below describes the starting and ending position of this segment on each transcript.

TABLE 25
Segment location on transcripts

| | | Segment |
|---|---|---|
| | Segment | ending |
| Transcript name | starting position | position |
| R11723_PEA_1_T5 (SEQ ID NO: 79) | 1009 | 1019 |
| R11723_PEA_1_T6 (SEQ ID NO: 80) | 1043 | 1053 |

[2364] Segment cluster R11723_PEA_{—}1_node_{—}21 (SEQ ID NO:461) according to the present invention is supported by 36 libraries. The number of libraries was determined as previously described. This segment can be found in the following transcript(s): R11723_PEA_{—}1_T5 (SEQ ID NO:79) and R11723_PEA_{—}1_T6 (SEQ ID NO:80). Table 26 below describes the starting and ending position of this segment on each transcript.

TABLE 26
Segment location on transcripts

| | | Segment |
|---|---|---|
| | Segment | ending |
| Transcript name | starting position | position |
| R11723_PEA_1_T5 (SEQ ID NO: 79) | 1020 | 1082 |
| R11723_PEA_1_T6 (SEQ ID NO: 80) | 1054 | 1116 |

[2365] Segment cluster R11723_PEA_{—}1_node_{—}23 (SEQ ID NO:462) according to the present invention is supported by 39 libraries. The number of libraries was determined as previously described. This segment can be found in the following transcript(s): R11723_PEA_{—}1_T5 (SEQ ID NO:79) and R11723_PEA_{—}1_T6 (SEQ ID NO:80). Table 27 below describes the starting and ending position of this segment on each transcript.

TABLE 27
Segment location on transcripts

| | | Segment |
|---|---|---|
| | Segment | ending |
| Transcript name | starting position | position |
| R11723_PEA_1_T5 (SEQ ID NO: 79) | 1570 | 1599 |
| R11723_PEA_1_T6 (SEQ ID NO: 80) | 1604 | 1633 |

[2366] Segment cluster R11723_PEA_{—}1_node_{—}24 (SEQ ID NO:463) according to the present invention is supported by 51 libraries. The number of libraries was determined as previously described. This segment can be found in the following transcript(s): R11723_PEA_{—}1_T15 (SEQ ID NO:75), R11723_PEA_{—}1_T5 (SEQ ID NO:79) and R11723_PEA_{—}1_T6 (SEQ ID NO:80). Table 28 below describes the starting and ending position of this segment on each transcript.

TABLE 28
Segment location on transcripts

| | | Segment |
|---|---|---|
| | Segment | ending |
| Transcript name | starting position | position |
| R11723_PEA_1_T15 (SEQ ID NO: 75) | 682 | 765 |
| R11723_PEA_1_T5 (SEQ ID NO: 79) | 1600 | 1683 |
| R11723_PEA_1_T6 (SEQ ID NO: 80) | 1634 | 1717 |

[2367] Segment cluster R11723_PEA_{—}1_node_{—}25 (SEQ ID NO:464) according to the present invention is supported by 54 libraries. The number of libraries was determined as previously described. This segment can be found in the following transcript(s): R11723_PEA_{—}1_T15 (SEQ ID NO:75), R11723_PEA_{—}1_T5 (SEQ ID NO:79) and R11723_PEA_{—}1_T6 (SEQ ID NO:80). Table 29 below describes the starting and ending position of this segment on each transcript.

TABLE 29
Segment location on transcripts

| | | Segment |
|---|---|---|
| | Segment | ending |
| Transcript name | starting position | position |
| R11723_PEA_1_T15 (SEQ ID NO: 75) | 766 | 791 |
| R11723_PEA_1_T5 (SEQ ID NO: 79) | 1684 | 1709 |
| R11723_PEA_1_T6 (SEQ ID NO: 80) | 1718 | 1743 |

[2368] Segment cluster R11723_PEA_{—}1_node_{—}26 (SEQ ID NO:465) according to the present invention is supported by 62 libraries. The number of libraries was determined as previously described. This segment can be found in the following transcript(s): R11723_PEA_{—}1_T15 (SEQ ID NO:75), R11723_PEA_{—}1_T5 (SEQ ID NO:79) and R11723_PEA_{—}1_T6 (SEQ ID NO:80). Table 30 below describes the starting and ending position of this segment on each transcript.

TABLE 30
Segment location on transcripts

| | | Segment |
|---|---|---|
| | Segment | ending |
| Transcript name | starting position | position |
| R11723_PEA_1_T15 (SEQ ID NO: 75) | 792 | 904 |
| R11723_PEA_1_T5 (SEQ ID NO: 79) | 1710 | 1822 |
| R11723_PEA_1_T6 (SEQ ID NO: 80) | 1744 | 1856 |

[2369] Segment cluster R11723_PEA_{—}1_node_{—}27 (SEQ ID NO:466) according to the present invention is supported by 67 libraries. The number of libraries was determined as previously described. This segment can be found in the following transcript(s): R11723=PEA_{—}1_T15 (SEQ ID NO:75), R11723_PEA_{—}1_T5 (SEQ ID NO:79) and R11723_PEA_{—}1_T6 (SEQ ID NO:80). Table 31 below describes the starting and ending position of this segment on each transcript.

TABLE 31
Segment location on transcripts

| | | Segment |
|---|---|---|
| | Segment | ending |
| Transcript name | starting position | position |
| R11723_PEA_1_T15 (SEQ ID NO: 75) | 905 | 986 |
| R11723_PEA_1_T5 (SEQ ID NO: 79) | 1823 | 1904 |
| R11723_PEA_1_T6 (SEQ ID NO: 80) | 1857 | 1938 |

[2370] Segment cluster R11723_PEA_{—}1_node_{—}28 (SEQ ID NO:467) according to the present invention can be found in the following transcript(s): R11723_PEA_{—}1_T15 (SEQ ID NO:75), R11723_PEA_{—}1_T5 (SEQ ID NO:79) and R11723_PEA_{—}1_T6 (SEQ ID NO:80). Table 32 below describes the starting and ending position of this segment on each transcript.

TABLE 32
Segment location on transcripts

| | | Segment |
|---|---|---|
| | Segment | ending |
| Transcript name | starting position | position |
| R11723_PEA_1_T15 (SEQ ID NO: 75) | 987 | 1010 |
| R11723_PEA_1_T5 (SEQ ID NO: 79) | 1905 | 1928 |
| R11723_PEA_1_T6 (SEQ ID NO: 80) | 1939 | 1962 |

[2371] Segment cluster R11723_PEA_{—}1_node_{—}29 (SEQ ID NO:468) according to the present invention is supported by 69 libraries. The number of libraries was determined as previously described. This segment can be found in the following transcript(s): R11723_PEA_{—}1_T15 (SEQ ID NO:75), R11723_PEA_{—}1_T5 (SEQ ID NO:79) and R11723_PEA_{—}1_T6 (SEQ ID NO:80). Table 33 below describes the starting and ending position of this segment on each transcript.

TABLE 33
Segment location on transcripts

| | | Segment |
|---|---|---|
| | Segment | ending |
| Transcript name | starting position | position |
| R11723_PEA_1_T15 (SEQ ID NO: 75) | 1011 | 1038 |
| R11723_PEA_1_T5 (SEQ ID NO: 79) | 1929 | 1956 |
| R11723_PEA_1_T6 (SEQ ID NO: 80) | 1963 | 1990 |

[2372] Segment cluster R11723_PEA_{—}1_node_{—}3 (SEQ ID NO:469) according to the present invention can be found in the following transcript(s): R11723_PEA_{—}1_T15 (SEQ ID NO:75), R11723_PEA_{—}1_T17 (SEQ ID NO:76), R11723_PEA_{—}1_T19 (SEQ ID NO:77), R11723_PEA_{—}1_T20 (SEQ ID NO:78), R11723_PEA_{—}1_T5 (SEQ ID NO:79) and R11723_PEA_{—}1_T6 (SEQ ID NO:80). Table 34 below describes the starting and ending position of this segment on each transcript.

TABLE 34
Segment location on transcripts

| | | Segment |
|---|---|---|
| | Segment | ending |
| Transcript name | starting position | position |
| R11723_PEA_1_T15 (SEQ ID NO: 75) | 310 | 319 |
| R11723_PEA_1_T17 (SEQ ID NO: 76) | 310 | 319 |
| R11723_PEA_1_T19 (SEQ ID NO: 77) | 310 | 319 |
| R11723_PEA_1_T20 (SEQ ID NO: 78) | 310 | 319 |
| R11723_PEA_1_T5 (SEQ ID NO: 79) | 310 | 319 |
| R11723_PEA_1_T6 (SEQ ID NO: 80) | 310 | 319 |

[2373] Segment cluster R11723_PEA_{—}1_node_{—}30 (SEQ ID NO:470) according to the present invention can be found in the following transcript(s): R11723_PEA_{—}1_T15 (SEQ ID NO:75), R11723_PEA_{—}1_T5 (SEQ ID NO:79) and R11723_PEA_{—}1_T6 (SEQ ID NO:80). Table 35 below describes the starting and ending position of this segment on each transcript.

TABLE 35
Segment location on transcripts

| | Segment | |
|---|---|---|
| | starting | Segment ending |
| Transcript name | position | position |
| R11723_PEA_1_T15 (SEQ ID NO: 75) | 1039 | 1059 |
| R11723_PEA_1_T5 (SEQ ID NO: 79) | 1957 | 1977 |
| R11723_PEA_1_T6 (SEQ ID NO: 80) | 1991 | 2011 |

[2374] Segment cluster R11723_PEA_{—}1_node_{—}4 (SEQ ID NO:471) according to the present invention is supported by 25 libraries. The number of libraries was determined as previously described. This segment can be found in the following transcript(s): R11723_PEA_{—}1_T15 (SEQ ID NO:75), R11723_PEA_{—}1_T17 (SEQ ID NO:76), R11723_PEA_{—}1_T19 (SEQ ID NO:77), R11723_PEA_{—}1_T20 (SEQ ID NO:78), R11723_PEA_{—}1_T5 (SEQ ID NO:79) and R11723_PEA_{—}1_T6 (SEQ ID NO:80). Table 36 below describes the starting and ending position of this segment on each transcript.

TABLE 36
Segment location on transcripts

| | Segment | |
|---|---|---|
| | starting | Segment ending |
| Transcript name | position | position |
| R11723_PEA_1_T15 (SEQ ID NO: 75) | 320 | 371 |
| R11723_PEA_1_T17 (SEQ ID NO: 76) | 320 | 371 |
| R11723_PEA_1_T19 (SEQ ID NO: 77) | 320 | 371 |
| R11723_PEA_1_T20 (SEQ ID NO: 78) | 320 | 371 |
| R11723_PEA_1_T5 (SEQ ID NO: 79) | 320 | 371 |
| R11723_PEA_1_T6 (SEQ ID NO: 80) | 320 | 371 |

[2375] Segment cluster R11723_PEA_{—}1_node_{—}5 (SEQ ID NO:472) according to the present invention is supported by 26 libraries. The number of libraries was determined as previously described. This segment can be found in the following transcript(s): R11723_PEA_{—}1_T15 (SEQ ID NO:75), R11723_PEA_{—}1_T17 (SEQ ID NO:76), R11723_PEA_{—}1_T19 (SEQ ID NO:77), R11723_PEA_{—}1_T20 (SEQ ID NO:78), R11723_PEA_{—}1_T5 (SEQ ID NO:79) and R11723_PEA_{—}1_T6 (SEQ ID NO:80). Table 37 below describes the starting and ending position of this segment on each transcript.

TABLE 37
Segment location on transcripts

| | Segment | |
|---|---|---|
| | starting | Segment ending |
| Transcript name | position | position |
| R11723_PEA_1_T15 (SEQ ID NO: 75) | 372 | 414 |
| R11723_PEA_1_T17 (SEQ ID NO: 76) | 372 | 414 |
| R11723_PEA_1_T19 (SEQ ID NO: 77) | 372 | 414 |
| R11723_PEA_1_T20 (SEQ ID NO: 78) | 372 | 414 |
| R11723_PEA_1_T5 (SEQ ID NO: 79) | 372 | 414 |
| R11723_PEA_1_T6 (SEQ ID NO: 80) | 372 | 414 |

[2376] Segment cluster R11723_PEA_{—}1_node_{—}6 (SEQ ID NO:473) according to the present invention is supported by 27 libraries. The number of libraries was determined as previously described. This segment can be found in the following transcript(s): R11723_PEA_{—}1_T15 (SEQ ID NO:75), R11723_PEA_{—}1_T17 (SEQ ID NO:76), R11723_PEA_{—}1_T19 (SEQ ID NO:77), R11723_PEA_{—}1_T20 (SEQ ID NO:78), R11723_PEA_{—}1_T5 (SEQ ID NO:79) and R11723_PEA_{—}1_T6 (SEQ ID NO:80). Table 38 below describes the starting and ending position of this segment on each transcript.

TABLE 38
Segment location on transcripts

| | Segment | |
|---|---|---|
| | starting | Segment ending |
| Transcript name | position | position |
| R11723_PEA_1_T15 (SEQ ID NO: 75) | 415 | 446 |
| R11723_PEA_1_T17 (SEQ ID NO: 76) | 415 | 446 |
| R11723_PEA_1_T19 (SEQ ID NO: 77) | 415 | 446 |
| R11723_PEA_1_T20 (SEQ ID NO: 78) | 415 | 446 |
| R11723_PEA_1_T5 (SEQ ID NO: 79) | 415 | 446 |
| R11723_PEA_1_T6 (SEQ ID NO: 80) | 415 | 446 |

[2377] Segment cluster R11723_PEA_{—}1_node_{—}7 (SEQ ID NO:474) according to the present invention is supported by 29 libraries. The number of libraries was determined as previously described. This segment can be found in the following transcript(s): R11723_PEA_{—}1_T15 (SEQ ID NO:75), R11723_PEA_{—}1_T17 (SEQ ID NO:76), R11723_PEA_{—}1_T19 (SEQ ID NO:77), R11723_PEA_{—}1_T20 (SEQ ID NO:78), R11723_PEA_{—}1_T5 (SEQ ID NO:79) and R11723_PEA_{—}1_T6 (SEQ ID NO:80). Table 39 below describes the starting and ending position of this segment on each transcript.

TABLE 39
Segment location on transcripts

| | Segment | |
|---|---|---|
| | starting | Segment ending |
| Transcript name | position | position |
| R11723_PEA_1_T15 (SEQ ID NO: 75) | 447 | 485 |
| R11723_PEA_1_T17 (SEQ ID NO: 76) | 447 | 485 |
| R11723_PEA_1_T19 (SEQ ID NO: 77) | 447 | 485 |
| R11723_PEA_1_T20 (SEQ ID NO: 78) | 447 | 485 |
| R11723_PEA_1_T5 (SEQ ID NO: 79) | 447 | 485 |
| R11723_PEA_1_T6 (SEQ ID NO: 80) | 447 | 485 |

[2378] Segment cluster R11723_PEA_{—}1_node_{—}8 (SEQ ID NO:475) according to the present invention is supported by 2 libraries. The number of libraries was determined as previously described. This segment can be found in the following transcript(s): R11723_PEA_{—}1_T6 (SEQ ID NO:80). Table 40 below describes the starting and ending position of this segment on each transcript.

TABLE 40
Segment location on transcripts

| | Segment | |
|---|---|---|
| | starting | Segment ending |
| Transcript name | position | position |
| R11723_PEA_1_T6 (SEQ ID NO: 80) | 486 | 519 |

[2379] It should be noted that the variants of this cluster are variants of the hypothetical protein PSEC0181 (SEQ ID NO:1395) (referred to herein as “PSEC”). Furthermore, use of the known protein (WT protein) for detection of ovarian cancer, alone or in combination with one or more variants of this cluster and/or of any other cluster and/or of any known marker, also comprises an embodiment of the present invention.

[2380] It should be noted that the nucleotide transcript sequence of known protein (PSEC, also referred to herein as the “wild type” or WT protein) feature at least one SNP that appears to affect the coding region, in addition to certain silent SNPs. This SNP does not have an effect on the R11723_PEA_{—}1_T5 (SEQ ID NO:79) splice variant sequence): “G->” resulting in a missing nucleotide (affects amino acids from position 91 onwards). The missing nucleotide creates a frame shift, resulting in a new protein. This SNP was not previously identified and is supported by 5 ESTs out of ˜70 ESTs in this exon.

Expression of R1723 Transcripts, which are Detectable by Amplicon as Depicted in Sequence Name R11723 Seg13 (SEQ ID NO:1297) in Normal and Cancerous Colon Tissues.

[2381] Expression of transcripts detectable by or according to seg13, R11723 seg13 amplicon (SEQ ID NO: 1297) and R11723 seg13F (SEQ ID NO: 1295) and R11723 seg13R (SEQ ID NO: 1296) primers was measured by real time PCR. In parallel the expression of four housekeeping genes —PBGD (GenBank Accession No. BC019323 (SEQ ID NO:1576); amplicon—PBGD-amplicon, SEQ ID NO:531), HPRT1 (GenBank Accession No. NM_{—}000194 (SEQ ID NO:1577); amplicon—HPRT1-amplicon, SEQ ID NO:612), G6PD (GenBank Accession No. NM_{—}000402 (SEQ ID NO:1578); HPRT1-amplicon, SEQ ID NO:615), and RPS27A (GenBank Accession No. NM_{—}002954 (SEQ ID NO:1579); RPS27A amplicon, SEQ ID NO:1261), was measured similarly. For each RT sample, the expression of the above amplicon was normalized to the geometric mean of the quantities of the housekeeping genes. The normalized quantity of each RT sample was then divided by the median of the quantities of the normal post-mortem (PM) samples (Sample Nos. 41, 52, 62-67, 69-71, Table 3, above: “Tissue samples in colon cancer testing panel”), to obtain a value of fold differential expression for each sample relative to median of the normal PM samples.

[2382] FIG. 28 is a histogram showing differential expression of the above-indicated transcripts in cancerous colon samples relative to the normal samples. Values represent the average of duplicate experiments. Error bars indicate the minimal and maximal values obtained.

[2383] As is evident from FIG. 28, the expression of transcripts detectable by the above amplicon in a few cancer samples was higher by more than 5 fold than in the non-cancerous samples (Sample Nos. 41, 52, 62-67, 69-71 Table 3: “Tissue samples in colon cancer testing panel”). However, the expression of transcripts detectable by the above amplicon in a several other cancer samples was lower than in the non-cancerous samples.

[2384] Primer pairs are also optionally and preferably encompassed within the present invention; for example, for the above experiment, the following primer pair was used as a non-limiting illustrative example only of a suitable primer pair: R11723 seg13F forward primer (SEQ ID NO: 1295); and R11723 seg13R reverse primer (SEQ ID NO: 1296).

[2385] The present invention also preferably encompasses any amplicon obtained through the use of any suitable primer pair; for example, for the above experiment, the following amplicon was obtained as a non-limiting illustrative example only of a suitable amplicon: R11723 seg13 (SEQ ID NO: 1297).

(SEQ ID NO: 1295)

R11723seg13F-ACACTAAAAGAACAAACACCTTGCTC

(SEQ ID NO: 1296)

R11723seg13R-TCCTCAGAAGGCACATGAAAGA
R11723seg13-amplicon (SEQ ID NO: 1297):
ACACTAAAAGAACAAACACCTTGCTCTTCGAGATGAGACATTTTGCCAAG
CAGTTGACCACTTAGTTCTCAAGAAGCAAGTATCTCTTTCATGTGCCTTC
TGAGGA

Expression of R11723 Transcripts, which are Detectable by Amplicon as Depicted in Sequence Name R11723 junc11-18 (SEQ ID NO: 1300) in Normal and Cancerous Colon Tissues.

[2386] Expression of transcripts detectable by or according to junc11-18, R11723 junc11-18 amplicon (SEQ ID NO: 1300) and R11723 junc11-18F (SEQ ID NO: 1298) and R11723 junc11-18R (SEQ ID NO: 1299) primers was measured by real time PCR. In parallel the expression of four housekeeping genes —PBGD (GenBank Accession No. BC019323 (SEQ ID NO:1576); amplicon—PBGD-amplicon, SEQ ID NO:531), HPRT1 (GenBank Accession No. NM_{—}000194 (SEQ ID NO:1577); amplicon—HPRT1-amplicon, SEQ ID NO:612), G6PD (GenBank Accession No. NM_{—}000402 (SEQ ID NO:1578); HPRT1-amplicon, SEQ ID NO:615), and RPS27A (GenBank Accession No. NM_{—}002954 (SEQ ID NO:1579); RPS27A amplicon, SEQ ID NO:1261), was measured similarly. For each RT sample, the expression of the above amplicon was normalized to the geometric mean of the quantities of the housekeeping genes. The normalized quantity of each RT sample was then divided by the median of the quantities of the normal post-mortem (PM) samples (Sample Nos. 41, 52, 62-67, 69-71, Table 3, above: “Tissue samples in colon cancer testing panel”), to obtain a value of fold differential expression for each sample relative to median of the normal PM samples.

[2387] FIG. 29 is a histogram showing differential expression of the above-indicated transcripts in a few cancerous colon samples relative to the normal samples (Sample Nos. 41, 52, 62-67, 69-71 Table 3: “Tissue samples in colon cancer testing panel”).

[2388] As is evident from FIG. 29, the expression of transcripts detectable by the above amplicon in a few cancer samples was higher by more than 5 fold than in the non-cancerous samples (Sample Nos. 41, 52, 62-67, 69-71 Table 1: “Tissue samples in colon cancer testing panel”). However, the expression of transcripts detectable by the above amplicon in a several other cancer samples was lower than in the non-cancerous samples Primer pairs are also optionally and preferably encompassed within the present invention; for example, for the above experiment, the following primer pair was used as a non-limiting illustrative example only of a suitable primer pair: R11723 junc11-18F forward primer (SEQ ID NO: 1298); and R11723 junc11-18R reverse primer (SEQ ID NO: 1299).

[2389] The present invention also preferably encompasses any amplicon obtained through the use of any suitable primer pair; for example, for the above experiment, the following amplicon was obtained as a non-limiting illustrative example only of a suitable amplicon: R11723 junc11-18 (SEQ ID NO: 1300).

(SEQ ID NO: 1298)

R11723junc11-18F-AGTGATGGAGCAAAGTGCCG

(SEQ ID NO: 1299)

R11723 junc11-18R-CAGCAGCTGATGCAAACTGAG

(SEQ ID NO: 1300)

R11723 junc11-18 amplicon
AGTGATGGAGCAAAGTGCCGGGATCATGTACCGCAAGTCCTGTGCATCAT
CAGCGGCCTGTCTCATCGCCTCTGCCGGGTACCAGTCCTTCTGCTCCCCA
GGGAAACTGAACTCAGTTTGCATCAGCTGCTG

Expression of R11723 Transcripts, which are Detectable by Amplicon as Depicted in Sequence Name R11723Seg13 (SEQ ID NO: 1297) in different normal tissues.

[2390] Expression of R11723 transcripts detectable by or according to R11723seg13 amplicon (SEQ ID NO: 1297) and R11723seg13F (SEQ ID NO: 1295), R11723seg13R (SEQ ID NO: 1296) was measured by real time PCR. In parallel the expression of four housekeeping genes—RPL19 (GenBank Accession No. NM_{—}000981 (SEQ ID NO:1580); RPL19 amplicon, SEQ ID NO:1264), TATA box (GenBank Accession No. NM_{—}003194 (SEQ ID NO:1581); TATA amplicon, SEQ ID NO:1267), UBC (GenBank Accession No. BC000449 (SEQ ID NO:1582); amplicon—Ubiquitin-amplicon, SEQ ID NO:1270) and SDHA (GenBank Accession No. NM_{—}004168 (SEQ ID NO:1583); amplicon—SDHA-amplicon, SEQ ID NO:1273) was measured similarly. For each RT sample, the expression of the above amplicon was normalized to the geometric mean of the quantities of the housekeeping genes. The normalized quantity of each RT sample was then divided by the median of the quantities of the ovary samples to obtain a value of relative expression of each sample relative to median of the ovary samples.

[2391] The results are described in FIG. 30, presenting the histogram showing the expression of R11723 transcripts, detectable by amplicon depicted in sequence name R11723seg13 (SEQ ID NO: 1297) in different normal tissues.

(SEQ ID NO: 1295)

R11723seg13F-ACACTAAAAGAACAAACACCTTGCTC

(SEQ ID NO: 1296)

R11723seg13R-TCCTCAGAAGGCACATGAAAGA
R11723seg13-amplicon (SEQ ID NO: 1297):
ACACTAAAAGAACAAACACCTTGCTCTTCGAGATGAGACATTTTGCCAAG
CAGTTGACCACTTAGTTCTCAAGAAGCAACTATCTCTTTCATGTGCCTTC
TGAGGA

Expression of R11723 Transcripts, which are Detectable by Amplicon as Depicted in Sequence Name R11723 junc11-18 (SEQ ID NO: 1300) in Different Normal Tissues.

[2392] Expression of R11723 transcripts detectable by or according to R11723seg13 amplicon (SEQ ID NO: 1300) and R11723 junc11-18F (SEQ ID NO:1298), R11723 junc11-18R (SEQ ID NO:1299) was measured by real time PCR. In parallel the expression of four housekeeping genes—RPL19 (GenBank Accession No. NM_{—}000981 (SEQ ID NO:1580); RPL19 amplicon, SEQ ID NO:1264), TATA box (GenBank Accession No. NM_{—}003194 (SEQ ID NO:1581); TATA amplicon, SEQ ID NO:1267), UBC (GenBank Accession No. BC000449 (SEQ ID NO:1582); amplicon—Ubiquitin-amplicon, SEQ ID NO:1270) and SDHA (GenBank Accession No. NM_{—}004168 (SEQ ID NO:1583); amplicon—SDHA-amplicon, SEQ ID NO:1273) was measured similarly. For each RT sample, the expression of the above amplicon was normalized to the geometric mean of the quantities of the housekeeping genes. The normalized quantity of each RT sample was then divided by the median of the quantities of the ovary samples to obtain a value of relative expression of each sample relative to median of the ovary samples.

[2393] The results are described in FIG. 31, presenting the histogram showing the expression of R11723 transcripts, detectable by amplicon depicted in sequence name R11723 junc11-18 (SEQ ID NO: 1300) in different normal tissues.

(SEQ ID NO: 1298)

R11723junc11-18F-AGTGATGGAGCAAAGTGCCG

(SEQ ID NO: 1299)

R11723junc11-18R-CAGCAGCTGATGCAAACTGAG

(SEQ ID NO: 1300)

R11723junc11-18 amplicon-AGTGATGGAGCAAAGTGCCGGGATC
ATGTACCGCAAGTCCTGTGCATCATCAGCGGCCTGTCTCATCGCCTCTGC
CGGGTACCAGTCCTTCTGCTCCCCAGGGAAACTGAACTCAGTTTGCATCA
GCTGCTG

[2394] It was found that the known protein (wild type) transcript expression pattern for the above cluster (PSEC) is similar to the variant expression pattern, except that in some cases (such as ovarian cancer) the variant overexpression in cancer was found to be higher.

### Variant Protein Alignment to the Previously Known Protein:

Sequence name: /tmp/gp6eQTLWqk/mFtjUpUzhb:Q8IXMO
Sequence documentation:
Alignment of: R11723_PEA_1_P6 (SEQ ID NO:604) × Q8IXMO (SEQ ID NO:1393) ..
Alignment segment 1/1:

| | | | |
|---|---|---|---|
| Quality: | 1128.00 | Escore: | 0 |
| Matching length: | 112 | Total length: | 112 |
| Matching Percent Similarity: | 100.00 | Matching Percent Identity: | 100.00 |
| Total Percent Similarity: | 100.00 | Total Percent Identity: | 100.00 |
| Gaps: | 0 | | |
| Alignment: | | | |

[chemical structure]

[chemical structure]

[chemical structure]

Sequence name: /tmp/gp6eQTLWqk/mFtjUpUzhb:Q9GAC2
Sequence documentation:
Alignment of: R11723_PEA_1_P6 (SEQ ID NO:604) × Q96AC2 (SEQ ID NO:1394) ..
Alignment segment 1/1:

| | | | |
|---|---|---|---|
| Quality: | 835.00 | Escore: | 0 |
| Matching length: | 83 | Total length: | 83 |
| Matching Percent Similarity: | 100.00 | Matching Percent Identity: | 100.00 |
| Total Percent Similarity: | 100.00 | Total Percent Identity: | 100.00 |
| Gaps: | 0 | | |
| Alignment: | | | |

[chemical structure]

[chemical structure]

Sequence name: /tmp/gp6eQTLWqk/mFtjUpUzhb:Q8N2G4
Sequence documentation:
Alignment of: R11723_PEA_1_PG (SEQ ID NO:604) × Q8N2G4 (SEQ ID NO:1395)
Alignment segment 1/1:

| | | | |
|---|---|---|---|
| Quality: | 835.00 | Escore: | 0 |
| Matching length: | 83 | Total length: | 83 |
| Matching Percent Similarity: | 100.00 | Matching Percent Identity: | 100.00 |
| Total Percent Similarity: | 100.00 | Total Percent Identity: | 100.00 |
| Gaps: | 0 | | |
| Alignment: | | | |

[chemical structure]

[chemical structure]

Sequence name: /tmp/gp6eQTLWqk/mFtjUpUzhb:BAC85518 (SEQ ID NO: 1396)
Sequence documentation:
Alignment of: R11723_PEA_1_P6 (SEQ ID NO:604) × BAC85518 (SEQ ID NO:1396)
Alignment segment 1/1:

| | | | |
|---|---|---|---|
| Quality: | 835.00 | Escore: | 0 |
| Matching length: | 83 | Total length: | 83 |
| Matching Percent Similarity: | 100.00 | Matching Percent Identity: | 100.00 |
| Total Percent Similarity: | 100.00 | Total Percent Identity: | 100.00 |
| Gaps: | 0 | | |
| Alignment: | | | |

[chemical structure]

[chemical structure]

Sequence name: /tmp/VXjdFlzdBX/bexTxTh0Th:Q96AC2 (SEQ ID NO:1394)
Sequence documentation:
Alignment of: R11723_PEA_1_P7 (SEQ ID NO:605) × Q96AC2 (SEQ ID NO:1394)
Alignment segment 1/1:

| | | | |
|---|---|---|---|
| Quality: | 654.00 | Escore: | 0 |
| Matching length: | 64 | Total length: | 64 |
| Matching Percent Similarity: | 100.00 | Matching Percent Identity: | 100.00 |
| Total Percent Similarity: | 100.00 | Total Percent Identity: | 100.00 |
| Gaps: | 0 | | |
| Alignment: | | | |

[chemical structure]

[chemical structure]

Sequence name: /tmp/VXjdFlzdBX/bexTxTh0Th:Q8N2G4 (SEQ ID NO:1395)
Sequence documentation:
Alignment of: R11723_PEA_1_P7 (SEQ ID NO:605) × Q8N2G4 (SEQ ID NO:1395) ..
Alignment segment 1/1:

| | | | |
|---|---|---|---|
| Quality: | 654.00 | Escore: | 0 |
| Matching length: | 64 | Total length: | 64 |
| Matching Percent Similarity: | 100.00 | Matching Percent Identity: | 100.00 |
| Total Percent Similarity: | 100.00 | Total Percent Identity: | 100.00 |
| Gaps: | 0 | | |
| Alignment: | | | |

[chemical structure]

[chemical structure]

Sequence name: /tmp/VXjdFlzdBX/bexTxTh0Th:BAC85273 (SEQ ID NO:1397)
Sequence documentation:
Alignment of: R11723_PEA_1_P7 (SEQ ID NO:605) × BAC85273 (SEQ ID MO:1397)
Alignment segment 1/1:

| | | | |
|---|---|---|---|
| Quality: | 600.00 | Escore: | 0 |
| Matching length: | 59 | Total length: | 59 |
| Matching Percent Similarity: | 100.00 | Matching Percent Identity: | 100.00 |
| Total Percent Similarity: | 100.00 | Total Percent Identity: | 100.00 |
| Gaps: | 0 | | |
| Alignment: | | | |

[chemical structure]

[chemical structure]

Sequence name: /tmp/VXjdF1zdBX/bexTxTh0Th:BAC85518 (SEQ ID NO: 1396)
Sequence documentation:
Alignment of: R11723_PEA_1_P7 (SEQ ID NO:605) × BAC85518 (SEQ ID NO:1396)
Alignment segment 1/1:

| | | | |
|---|---|---|---|
| Quality: | 654.00 | Escore: | 0 |
| Matching length: | 64 | Total length: | 64 |
| Matching Percent Similarity: | 100.00 | Matching Percent Identity: | 100.00 |
| Total Percent Similarity: | 100.00 | Total Percent Identity: | 100.00 |
| Gaps: | 0 | | |
| Alignment: | | | |

[chemical structure]

[chemical structure]

Sequence name: /tmp/OLMSexEmIh/pc7Z7Xm1YR:Q96AC2 (SEQ ID NO: 1394)
Sequence documentation:
Alignment of: R11723_PEA_1_P10 (SEQ ID NO:607) × Q96AC2 (SEQ ID NO:1394) ..
Alignment segment 1/1:

| | | | |
|---|---|---|---|
| Quality: | 645.00 | Escore: | 0 |
| Matching length: | 63 | Total length: | 63 |
| Matching Percent Similarity: | 100.00 | Matching Percent Identity: | 100.00 |
| Total Percent Similarity: | 100.00 | Total Percent Identity: | 100.00 |
| Gaps: | 0 | | |
| Alignment: | | | |

[chemical structure]

[chemical structure]

Sequence name: /tmp/OLMSexEmIh/pc7Z7Xm1YR:Q8N2G4 (SEQ ID NO:1395)
Sequence documentation:
Alignment of: R11723_PEA_1_P10 (SEQ ID NO:607) × Q8N2G4 (SEQ ID NO:1395) ..
Alignment segment 1/1:

| | | | |
|---|---|---|---|
| Quality: | 645.00 | Escore: | 0 |
| Matching length: | 63 | Total length: | 63 |
| Matching Percent Similarity: | 100.00 | Matching Percent Identity: | 100.00 |
| Total Percent Similarity: | 100.00 | Total Percent Identity: | 100.00 |
| Gaps: | 0 | | |
| Alignment: | | | |

[chemical structure]

[chemical structure]

Sequence name: /tmp/OLMSexEmIh/pc7Z7Xm1YR:BAC85273 (SEQ ID NO:1397)
Sequence documentation:
Alignment of: R11723_PEA_1_P10 (SEQ ID NO:607) × BAC85273 (SEQ ID NO:1397) ..
Alignment segment 1/1:

| | | | |
|---|---|---|---|
| Quality: | 591.00 | Escore: | 0 |
| Matching length: | 58 | Total length: | 58 |
| Matching Percent Similarity: | 100.00 | Matching Percent Identity: | 100.00 |
| Total Percent Similarity: | 100.00 | Total Percent Identity: | 100.00 |
| Gaps: | 0 | | |
| Alignment: | | | |

[chemical structure]

[chemical structure]

Sequence name: /tmp/OLMSexEmIh/pc7Z7Xm1YR:BAC85518 (SEQ ID NO:1396)
Sequence documentation:
Alignment of: R11723_PEA_1_P10 (SEQ ID NO:607) × BAC85518 (SEQ ID NO:1396) ..
Alignment segment 1/1:

| | | | |
|---|---|---|---|
| Quality: | 645.00 | Escore: | 0 |
| Matching length: | 63 | Total length: | 63 |
| Matching Percent Similarity: | 100.00 | Matching Percent Identity: | 100.00 |
| Total Percent Similarity: | 100.00 | Total Percent Identity: | 100.00 |
| Gaps: | 0 | | |
| Alignment: | | | |

[chemical structure]

[chemical structure]

Alignment of: R11723_PEA_1_P13 (SEQ ID NO:606) × Q96AC2 (SEQ ID NO:1394) ..
Alignment segment 1/1:

| | | | |
|---|---|---|---|
| Quality: | 645.00 | Escore: | 0 |
| Matching length: | 63 | Total length: | 63 |
| Matching Percent Similarity: | 100.00 | Matching Percent Identity: | 100.00 |
| Total Percent Similarity: | 100.00 | Total Percent Identity: | 100.00 |
| Gaps: | 0 | | |
| Alignment: | | | |

[chemical structure]

[chemical structure]

### Description for Cluster M77903

[2396] Cluster M77903 features 4 transcript(s) and 29 segment(s) of interest, the names for which are given in Tables 1 and 2, respectively, the sequences themselves are given at the end of the application. The selected protein variants are given in table 3.

TABLE 1
Transcripts of interest

| Transcript Name | SEQ ID NO: |
|---|---|
| M77903_T11 | 81 |
| M77903_T12 | 82 |
| M77903_T34 | 83 |
| M77903_T36 | 84 |

TABLE 2
Segments of interest

| Segment Name | SEQ ID NO: |
|---|---|
| M77903_node_2 | 476 |
| M77903_node_13 | 477 |
| M77903_node_16 | 478 |
| M77903_node_18 | 479 |
| M77903_node_35 | 480 |
| M77903_node_36 | 481 |
| M77903_node_37 | 482 |
| M77903_node_38 | 483 |
| M77903_node_40 | 484 |
| M77903_node_44 | 485 |
| M77903_node_46 | 486 |
| M77903_node_47 | 487 |
| M77903_node_48 | 488 |
| M77903_node_49 | 489 |
| M77903_node_51 | 490 |
| M77903_node_52 | 491 |
| M77903_node_1 | 492 |
| M77903_node_5 | 493 |
| M77903_node_9 | 494 |
| M77903_node_10 | 495 |
| M77903_node_11 | 496 |
| M77903_node_12 | 497 |
| M77903_node_15 | 498 |
| M77903_node_17 | 499 |
| M77903_node_20 | 500 |
| M77903_node_28 | 501 |
| M77903_node_34 | 502 |
| M77903_node_41 | 503 |
| M77903_node_42 | 504 |

TABLE 3
Proteins of interest

| | SEQ ID | |
|---|---|---|
| Protein Name | NO: | Corresponding Transcript(s) |
| M77903_P4 | 608 | M77903_T11 (SEQ ID NO: 81) |
| M77903_P5 | 609 | M77903_T12 (SEQ ID NO: 82) |
| M77903_P15 | 610 | M77903_T34 (SEQ ID NO: 83) |
| M77903_P16 | 611 | M77903_T36 (SEQ ID NO: 84) |

[2397] These sequences are variants of the known protein Translocon-associated protein, alpha subunit precursor (SwissProt accession identifier SSRA_HUMAN; known also according to the synonyms TRAP-alpha; Signal sequence receptor alpha subunit; SSR-alpha), SEQ ID NO: 641, referred to herein as the previously known protein.

[2398] Protein Translocon-associated protein (SEQ ID NO:641), alpha subunit precursor is known or believed to have the following function(s): TRAP proteins are part of a complex whose function is to bind calcium to the ER membrane and thereby regulate the retention of ER resident proteins. May be involved in the recycling of the translocation apparatus after completion of the translocation process or may function as a membrane-bound chaperone facilitating folding of translocated proteins. The sequence for protein Translocon-associated protein, alpha subunit precursor is given at the end of the application, as “Translocon-associated protein, alpha subunit precursor amino acid sequence”. Known polymorphisms for this sequence are as shown in Table 4.

TABLE 4
Amino acid mutations for Known Protein

| SNP position(s) on | |
|---|---|
| amino acid sequence | Comment |
| 28 | L -> S |
| 130 | Y -> H |

[2399] Protein Translocon-associated protein (SEQ ID NO:641), alpha subunit precursor localization is believed to be Type I membrane protein. Endoplasmic reticulum.

[2400] The following GO Annotation(s) apply to the previously known protein. The following annotation(s) were found: co-translational membrane targeting; positive control of cell proliferation, which are annotation(s) related to Biological Process; signal sequence receptor; calcium binding, which are annotation(s) related to Molecular Function; and endoplasmic reticulum; integral membrane protein, which are annotation(s) related to Cellular Component.

[2401] The GO assignment relies on information from one or more of the SwissProt/TremB1 Protein knowledgebase, available from <http://www.expasy.ch/sprot/>; or Locuslink, available from <http://www.ncbi.nlm.nih.gov/projects/LocusLink/>.

[2402] Cluster M77903 can be used as a diagnostic marker according to overexpression of transcripts of this cluster in cancer. Expression of such transcripts in normal tissues is also given according to the previously described methods. The term “number” in the left hand column of the table and the numbers on the y-axis of the figure below refer to weighted expression of ESTs in each category, as “parts per million” (ratio of the expression of ESTs for a particular cluster to the expression of all ESTs in that category, according to parts per million).

[2403] Overall, the following results were obtained as shown with regard to the histograms in FIG. 33 and Table 5. This cluster is overexpressed (at least at a minimum level) in the following pathological conditions: ovarian carcinoma and uterine malignancies.

TABLE 5
Normal tissue distribution

| Name of Tissue | Number |
|---|---|
| Adrenal | 120 |
| Bladder | 123 |
| Bone | 129 |
| Colon | 31 |
| Epithelial | 124 |
| General | 129 |
| head and neck | 263 |
| Kidney | 118 |
| Liver | 107 |
| Lung | 147 |
| Lymph nodes | 126 |
| Breast | 211 |
| bone marrow | 251 |
| Muscle | 109 |
| Ovary | 3 |
| Pancreas | 144 |
| Prostate | 142 |
| Skin | 163 |
| Stomach | 183 |
| T cells | 278 |
| Thyroid | 128 |
| Uterus | 81 |

TABLE 6
P values and ratios for expression in cancerous tissue

| Name of Tissue | P1 | P2 | SP1 | R3 | SP2 | R4 |
|---|---|---|---|---|---|---|
| adrenal | 3.8e−01 | 2.8e−01 | 4.1e−01 | 1.4 | 2.4e−01 | 1.6 |
| bladder | 3.7e−01 | 4.1e−01 | 1.6e−01 | 1.8 | 3.0e−01 | 1.4 |
| Bone | 2.0e−01 | 2.4e−01 | 7.7e−01 | 1.0 | 6.6e−01 | 0.9 |
| Brain | 5.9e−01 | 5.5e−01 | 8.4e−01 | 0.7 | 7.9e−01 | 0.8 |
| Colon | 7.0e−02 | 1.1e−02 | 6.1e−02 | 2.9 | 2.5e−02 | 3.2 |
| epithelial | 4.2e−02 | 5.8e−02 | 1.3e−01 | 1.2 | 4.7e−01 | 1.0 |
| general | 4.0e−02 | 2.0e−02 | 6.1e−01 | 1.0 | 8.9e−01 | 0.9 |
| head and neck | 4.5e−01 | 4.6e−01 | 1 | 0.4 | 9.0e−01 | 0.5 |
| kidney | 6.5e−01 | 7.6e−01 | 2.8e−01 | 1.2 | 5.3e−01 | 0.9 |
| Liver | 5.3e−01 | 5.8e−01 | 1 | 0.4 | 9.1e−01 | 0.6 |
| Lung | 6.1e−01 | 7.3e−01 | 3.7e−01 | 1.2 | 7.0e−01 | 0.9 |
| Lymph nodes | 2.4e−01 | 5.8e−01 | 7.1e−01 | 0.9 | 8.7e−01 | 0.6 |
| breast | 8.0e−01 | 8.3e−01 | 9.9e−01 | 0.4 | 9.1e−01 | 0.5 |
| bone marrow | 7.5e−01 | 6.8e−01 | 1 | 0.1 | 9.5e−01 | 0.5 |
| muscle | 4.0e−01 | 2.6e−01 | 6.2e−01 | 1.5 | 8.3e−01 | 0.7 |
| Ovary | 7.8e−03 | 8.7e−03 | 1.0e−02 | 5.8 | 3.1e−02 | 4.4 |
| pancreas | 5.6e−01 | 6.6e−01 | 7.8e−01 | 0.6 | 8.6e−01 | 0.6 |
| prostate | 4.5e−01 | 4.3e−01 | 6.2e−01 | 0.9 | 4.3e−01 | 0.8 |
| Skin | 4.9e−01 | 5.3e−01 | 3.6e−01 | 1.4 | 9.3e−01 | 0.4 |
| stomach | 2.9e−01 | 5.5e−01 | 7.5e−01 | 0.6 | 9.4e−01 | 0.5 |
| T cells | 6.7e−01 | 5.0e−01 | 5.5e−01 | 1.5 | 5.7e−01 | 1.1 |
| Thyroid | 5.7e−01 | 5.7e−01 | 7.4e−01 | 1.1 | 7.4e−01 | 1.1 |
| uterus | 7.4e−03 | 2.5e−02 | 4.6e−01 | 1.1 | 6.0e−01 | 0.9 |

[2404] As noted above, cluster M77903 features 4 transcript(s), which were listed in Table 1 above. These transcript(s) encode for protein(s) which are variant(s) of protein Translocon-associated protein (SEQ ID NO:641), alpha subunit precursor. A description of each variant protein according to the present invention is now provided.

[2405] Variant protein M77903_P4 (SEQ ID NO:608) according to the present invention has an amino acid sequence as given at the end of the application; it is encoded by transcript(s) M77903_T11 (SEQ ID NO:81). An alignment is given to the known protein (Translocon-associated protein (SEQ ID NO:641), alpha subunit precursor) at the end of the application. One or more alignments to one or more previously published protein sequences are given at the end of the application. A brief description of the relationship of the variant protein according to the present invention to each such aligned protein is as follows:

[2406] Comparison Report Between M77903_P4 (SEQ ID NO:608) and SSRA_HUMAN (SEQ ID NO:641):

[2407] 1. An isolated chimeric polypeptide encoding for M77903_P4 (SEQ ID NO:608), comprising a first amino acid sequence being at least 90% homologous to MRLLPRLLLLLLLVFPATVLFRGGPRGLLAVAQDLTEDEETVEDSIIEDEDDEAEVEEDEPTDLVEDKEEED VSGEPEASPSADTTILFVKGEDFPANNIVKFLVGFTNKGTEDFIVESLDASFRYPQDYQFYIQNFTALPLNTV VPPQRQATFEYSFIPAEPMGGRPFGLVINLNYKDLNGNVFQDAVFNQTVTVIEREDGLDGET corresponding to amino acids 1-207 of SSRA_HUMAN (SEQ ID NO:641), which also corresponds to amino acids 1-207 of M77903_P4 (SEQ ID NO:608), and a second amino acid sequence being at least 70%, optionally at least 80%, preferably at least 85%, more preferably at least 90% and most preferably at least 95% homologous to a polypeptide having the sequence VRDPYRK (SEQ ID NO:1565) corresponding to amino acids 208-214 of M77903_P4 (SEQ ID NO:608), wherein said first amino acid sequence and second amino acid sequence are contiguous and in a sequential order.

[2408] 2. An isolated polypeptide encoding for a tail of M77903_P4 (SEQ ID NO:608), comprising a polypeptide being at least 70%, optionally at least about 80%, preferably at least about 85%, more preferably at least about 90% and most preferably at least about 95% homologous to the sequence VRDPYRK (SEQ ID NO:1565) in M77903_P4 (SEQ ID NO:608).

[2409] The location of the variant protein was determined according to results from a number of different software programs and analyses, including analyses from SignalP and other specialized programs. The variant protein is believed to be located as follows with regard to the cell: secreted. The protein localization is believed to be secreted because both signal-peptide prediction programs predict that this protein has a signal peptide, and neither trans-membrane region prediction program predicts that this protein has a trans-membrane region.

[2410] Variant protein M77903_P4 (SEQ ID NO:608) also has the following non-silent SNPs (Single Nucleotide Polymorphisms) as listed in Table 7, (given according to their position(s) on the amino acid sequence, with the alternative amino acid(s) listed; the last column indicates whether the SNP is known or not; the presence of known SNPs in variant protein M77903_P4 (SEQ ID NO:608) sequence provides support for the deduced sequence of this variant protein according to the present invention).

TABLE 7
Amino acid mutations

| SNP position(s) on amino acid | Alternative | |
|---|---|---|
| sequence | amino acid(s) | Previously known SNP? |
| 6 | R -> G | No |
| 24 | G -> | No |
| 28 | L -> S | Yes |
| 48 | E -> G | No |
| 54 | A -> T | Yes |
| 58 | E -> K | No |
| 63 | D -> | No |
| 89 | F -> | No |
| 116 | I -> M | No |
| 130 | Y -> H | No |
| 130 | Y -> N | No |
| 178 | K -> | No |

[2411] The glycosylation sites of variant protein M77903_P4 (SEQ ID NO:608), as compared to the known protein Translocon-associated protein (SEQ ID NO:641), alpha subunit precursor, are described in Table 8 (given according to their position(s) on the amino acid sequence in the first column; the second column indicates whether the glycosylation site is present in the variant protein; and the last column indicates whether the position is different on the variant protein).

TABLE 8
Glycosylation site(s)

| Position(s) on | | |
|---|---|---|
| known amino acid | Present in | Position in |
| sequence | variant protein? | variant protein? |
| 191 | Yes | 191 |
| 136 | Yes | 136 |

[2412] Variant protein M77903_P4 (SEQ ID NO:608) is encoded by the following transcript(s): M77903_T11 (SEQ ID NO:81), for which the sequence(s) is/are given at the end of the application. The coding portion of transcript M77903_T11 (SEQ ID NO:81) is shown in bold; this coding portion starts at position 200 and ends at position 841. The transcript also has the following SNPs as listed in Table 9 (given according to their position on the nucleotide sequence, with the alternative nucleic acid listed; the last column indicates whether the SNP is known or not; the presence of known SNPs in variant protein M77903_P4 (SEQ ID NO:608) sequence provides support for the deduced sequence of this variant protein according to the present invention).

TABLE 9
Nucleic acid SNPs

| SNP position on nucleotide | Alternative | Previously |
|---|---|---|
| sequence | nucleic acid | knowns SNP? |
| 72 | G -> T | Yes |
| 120 | C -> G | No |
| 147 | G -> C | Yes |
| 215 | C -> G | No |
| 271 | C -> | No |
| 282 | T -> C | Yes |
| 342 | A -> G | No |
| 359 | G -> A | Yes |
| 371 | G -> A | No |
| 388 | T -> | No |
| 464 | T -> | No |
| 547 | T -> C | No |
| 547 | T -> G | No |
| 587 | T -> A | No |
| 587 | T -> C | No |
| 731 | A -> | No |
| 927 | A -> | No |
| 1117 | T -> | No |
| 1118 | G -> | No |
| 1296 | T -> A | Yes |
| 1324 | T -> | No |
| 1326 | T -> | No |
| 1408 | T -> G | No |
| 1450 | T -> G | No |
| 1660 | C -> | No |
| 1664 | C -> T | Yes |
| 1665 | T -> | No |
| 1797 | T -> | No |
| 1802 | T -> | No |
| 1913 | G -> A | Yes |
| 1985 | T -> | No |
| 2168 | A -> G | Yes |
| 2205 | T -> C | Yes |
| 2466 | A -> C | No |
| 2466 | A -> G | Yes |
| 2535 | T -> G | Yes |
| 2597 | T -> | No |
| 2648 | T -> C | No |
| 2720 | A -> T | No |
| 2738 | G -> A | Yes |
| 2782 | C -> T | Yes |
| 2790 | C -> | No |
| 2861 | C -> T | No |
| 2931 | T -> G | No |
| 3043 | T -> G | No |
| 3103 | T -> G | No |
| 3120 | T -> G | No |
| 3125 | T -> G | No |
| 3500 | A -> C | Yes |
| 3566 | A -> G | Yes |
| 5060 | G -> A | Yes |
| 5156 | -> T | No |
| 5533 | G -> C | No |
| 5789 | G -> A | Yes |
| 5866 | T -> C | Yes |
| 6591 | C -> T | Yes |
| 6619 | G -> A | Yes |
| 6905 | A -> T | Yes |
| 6922 | G -> C | Yes |
| 7046 | C -> G | Yes |
| 7319 | A -> G | Yes |
| 7706 | C -> T | Yes |
| 7894 | G -> A | Yes |
| 8099 | C -> G | Yes |
| 8324 | T -> C | No |
| 8555 | T -> C | Yes |
| 8627 | G -> T | Yes |
| 8644 | T -> C | Yes |
| 8704 | T -> C | No |
| 8781 | C -> T | Yes |
| 8787 | C -> T | Yes |
| 8827 | C -> T | No |
| 8847 | T -> C | No |
| 8847 | T -> G | No |
| 8909 | G -> A | No |
| 8947 | G -> A | Yes |
| 8960 | T -> C | Yes |
| 9096 | T -> C | No |
| 9096 | T -> G | No |
| 9207 | A -> G | No |
| 9424 | T -> C | Yes |
| 9516 | A -> | No |
| 9596 | C -> T | Yes |

[2413] Variant protein M77903_P5 (SEQ ID NO:609) according to the present invention has an amino acid sequence as given at the end of the application; it is encoded by transcript(s) M77903_T12 (SEQ ID NO:82). An alignment is given to the known protein (Translocon-associated protein (SEQ ID NO:641), alpha subunit precursor) at the end of the application. One or more alignments to one or more previously published protein sequences are given at the end of the application. A brief description of the relationship of the variant protein according to the present invention to each such aligned protein is as follows:

[2414] Comparison Report Between M77903_P5 (SEQ ID NO:609) and SSRA_HUMAN (SEQ ID NO:641):

[2415] 1. An isolated chimeric polypeptide encoding for M77903_P5 (SEQ ID NO:609), comprising a first amino acid sequence being at least 90% homologous to MRLLPRLLLLLLLVFPATVLFRGGPRGLLAVAQDLTEDEETVEDSIIEDEDDEAEVEEDEPTDLVEDKEEED VSGEPEASPSADTTILFVKGEDFPANNIVKFLVGFTNKGTEDFIVESLDASFRYPQDYQFYIQNFTALPLNTV VPPQRQATFEYSFIPAEPMGGRPFGLVINLNYKDLNGNVFQDAVFNQTVTVIEREDGLDGET corresponding to amino acids 1-207 of SSRA_HUMAN (SEQ ID NO:641), which also corresponds to amino acids 1-207 of M77903_P5 (SEQ ID NO:609).

[2416] The location of the variant protein was determined according to results from a number of different software programs and analyses, including analyses from SignalP and other specialized programs. The variant protein is believed to be located as follows with regard to the cell: secreted. The protein localization is believed to be secreted because both signal-peptide prediction programs predict that this protein has a signal peptide, and neither trans-membrane region prediction program predicts that this protein has a trans-membrane region.

[2417] Variant protein M77903_P5 (SEQ ID NO:609) also has the following non-silent SNPs (Single Nucleotide Polymorphisms) as listed in Table 10, (given according to their position(s) on the amino acid sequence, with the alternative amino acid(s) listed; the last column indicates whether the SNP is known or not; the presence of known SNPs in variant protein M77903_P5 (SEQ ID NO:609) sequence provides support for the deduced sequence of this variant protein according to the present invention).

TABLE 10
Amino acid mutations

| SNP position(s) | | |
|---|---|---|
| on amino acid | Alternative amino | Previously |
| sequence | acid(s) | known SNP? |
| 6 | R -> G | No |
| 24 | G -> | No |
| 28 | L -> S | Yes |
| 48 | E -> G | No |
| 54 | A -> T | Yes |
| 58 | E -> K | No |
| 63 | D -> | No |
| 89 | F -> | No |
| 116 | I -> M | No |
| 130 | Y -> H | No |
| 130 | Y -> N | No |
| 178 | K -> | No |

[2418] The glycosylation sites of variant protein M77903_P5 (SEQ ID NO:609), as compared to the known protein Translocon-associated protein (SEQ ID NO:641), alpha subunit precursor, are described in Table 11 (given according to their position(s) on the amino acid sequence in the first column; the second column indicates whether the glycosylation site is present in the variant protein; and the last column indicates whether the position is different on the variant protein).

TABLE 11
Glycosylation site(s)

| Position(s) on known | Present in | Position in |
|---|---|---|
| amino acid sequence | variant protein? | variant protein? |
| 191 | Yes | 191 |
| 136 | Yes | 136 |

[2419] Variant protein M77903_P5 (SEQ ID NO:609) is encoded by the following transcript(s): M77903_T12 (SEQ ID NO:82), for which the sequence(s) is/are given at the end of the application. The coding portion of transcript M77903_T12 (SEQ ID NO:82) is shown in bold; this coding portion starts at position 200 and ends at position 820. The transcript also has the following SNPs as listed in Table 12 (given according to their position on the nucleotide sequence, with the alternative nucleic acid listed; the last column indicates whether the SNP is known or not; the presence of known SNPs in variant protein M77903_P5 (SEQ ID NO:609) sequence provides support for the deduced sequence of this variant protein according to the present invention).

TABLE 12
Nucleic acid SNPs

| SNP position on | Alternative | Previously |
|---|---|---|
| nucleotide sequence | nucleic acid | known SNP? |
| 72 | G -> T | Yes |
| 120 | C -> G | No |
| 147 | G -> C | Yes |
| 215 | C -> G | No |
| 271 | C -> | No |
| 282 | T -> C | Yes |
| 342 | A -> G | No |
| 359 | G -> A | Yes |
| 371 | G -> A | No |
| 388 | T -> | No |
| 464 | T -> | No |
| 547 | T -> C | No |
| 547 | T -> G | No |
| 587 | T -> A | No |
| 587 | T -> C | No |
| 731 | A -> | No |
| 833 | A -> | No |
| 1023 | T -> | No |
| 1024 | G -> | No |
| 1202 | T -> A | Yes |
| 1230 | T -> | No |
| 1232 | T -> | No |
| 1314 | T -> G | No |
| 1356 | T -> G | No |
| 1566 | C -> | No |
| 1570 | C -> T | Yes |
| 1571 | T -> | No |
| 1703 | T -> | No |
| 1708 | T -> | No |
| 1819 | G -> A | Yes |
| 1891 | T -> | No |
| 2074 | A -> G | Yes |
| 2111 | T -> C | Yes |
| 2372 | A -> C | No |
| 2372 | A -> G | Yes |
| 2441 | T -> G | Yes |
| 2503 | T -> | No |
| 2554 | T -> C | No |
| 2626 | A -> T | No |
| 2644 | G -> A | Yes |
| 2688 | C -> T | Yes |
| 2696 | C -> | No |
| 2767 | C -> T | No |
| 2837 | T -> G | No |
| 2949 | T -> G | No |
| 3009 | T -> G | No |
| 3026 | T -> G | No |
| 3031 | T -> G | No |
| 3406 | A -> C | Yes |
| 3472 | A -> G | Yes |
| 4966 | G -> A | Yes |
| 5062 | -> T | No |
| 5439 | G -> C | No |
| 5695 | G -> A | Yes |
| 5772 | T -> C | Yes |
| 6497 | C -> T | Yes |
| 6525 | G -> A | Yes |
| 6811 | A -> T | Yes |
| 6828 | G -> C | Yes |
| 6952 | C -> G | Yes |
| 7225 | A -> G | Yes |
| 7612 | C -> T | Yes |
| 7800 | G -> A | Yes |
| 8005 | C -> G | Yes |
| 8230 | T -> C | No |
| 8461 | T -> C | Yes |
| 8533 | G -> T | Yes |
| 8550 | T -> C | Yes |
| 8610 | T -> C | No |
| 8687 | C -> T | Yes |
| 8693 | C -> T | Yes |
| 8733 | C -> T | No |
| 8753 | T -> C | No |
| 8753 | T -> G | No |
| 8815 | G -> A | No |
| 8853 | G -> A | Yes |
| 8866 | T -> C | Yes |
| 9002 | T -> C | No |
| 9002 | T -> G | No |
| 9113 | A -> G | No |
| 9330 | T -> C | Yes |
| 9422 | A -> | No |
| 9502 | C -> T | Yes |

[2420] Variant protein M77903_P15 (SEQ ID NO:610) according to the present invention has an amino acid sequence as given at the end of the application; it is encoded by transcript(s) M77903_T34 (SEQ ID NO:83). An alignment is given to the known protein (Translocon-associated protein (SEQ ID NO:641), alpha subunit precursor) at the end of the application. One or more alignments to one or more previously published protein sequences are given at the end of the application. A brief description of the relationship of the variant protein according to the present invention to each such aligned protein is as follows:

[2421] Comparison Report Between M77903_P15 (SEQ ID NO:610) and SSRA_HUMAN (SEQ ID NO:641):

[2422] 1. An isolated chimeric polypeptide encoding for M77903_P15 (SEQ ID NO:610), comprising a first amino acid sequence being at least 90% homologous to MRLLPRLLLLLLLVFPATVLFRGGPRGLLAVAQDLTEDEETVEDSIIEDEDDEAEVEEDEPTDLVEDKEEED VSGEPEASPSADTTILFVKGEDFPANNIVKFLVGFTNKGTEDFIVESLDASFRYPQDYQFYIQNFTALPLNTV VPPQRQATFEYSFIPAEPMGGRPFGLVINLNYKDLN corresponding to amino acids 1-181 of SSRA_HUMAN (SEQ ID NO:641), which also corresponds to amino acids 1-181 of M77903_P15 (SEQ ID NO:610), and a second amino acid sequence being at least 70%, optionally at least 80%, preferably at least 85%, more preferably at least 90% and most preferably at least 95% homologous to a polypeptide having the sequence VRSSKPSFCLS (SEQ ID NO:1566) corresponding to amino acids 182-192 of M77903_P15 (SEQ ID NO:610), wherein said first amino acid sequence and second amino acid sequence are contiguous and in a sequential order.

[2423] 2. An isolated polypeptide encoding for a tail of M77903_P15 (SEQ ID NO:610), comprising a polypeptide being at least 70%, optionally at least about 80%, preferably at least about 85%, more preferably at least about 90% and most preferably at least about 95% homologous to the sequence VRSSKPSFCLS (SEQ ID NO:1566) in M77903_P15 (SEQ ID NO:610).

[2424] The location of the variant protein was determined according to results from a number of different software programs and analyses, including analyses from SignalP and other specialized programs. The variant protein is believed to be located as follows with regard to the cell: secreted. The protein localization is believed to be secreted because both signal-peptide prediction programs predict that this protein has a signal peptide, and neither trans-membrane region prediction program predicts that this protein has a trans-membrane region.

[2425] Variant protein M77903_P15 (SEQ ID NO:610) also has the following non-silent SNPs (Single Nucleotide Polymorphisms) as listed in Table 13, (given according to their position(s) on the amino acid sequence, with the alternative amino acid(s) listed; the last column indicates whether the SNP is known or not; the presence of known SNPs in variant protein M77903_P15 (SEQ ID NO:610) sequence provides support for the deduced sequence of this variant protein according to the present invention).

TABLE 13
Amino acid mutations

| SNP position(s) on | Alternative | Previously |
|---|---|---|
| amino acid sequence | amino acid(s) | known SNP? |
| 6 | R -> G | No |
| 24 | G -> | No |
| 28 | L -> S | Yes |
| 48 | E -> G | No |
| 54 | A -> T | Yes |
| 58 | E -> K | No |
| 63 | D -> | No |
| 89 | F -> | No |
| 116 | I -> M | No |
| 130 | Y -> H | No |
| 130 | Y -> N | No |
| 178 | K -> | No |

[2426] The glycosylation sites of variant protein M77903_P15 (SEQ ID NO:610), as compared to the known protein Translocon-associated protein (SEQ ID NO:641), alpha subunit precursor, are described in Table 14 (given according to their position(s) on the amino acid sequence in the first column; the second column indicates whether the glycosylation site is present in the variant protein; and the last column indicates whether the position is different on the variant protein).

TABLE 14
Glycosylation site(s)

| Position(s) on known | Present in | Position in |
|---|---|---|
| amino acid sequence | variant protein? | variant protein? |
| 191 | No | |
| 136 | Yes | 136 |

[2427] Variant protein M77903_P15 (SEQ ID NO:610) is encoded by the following transcript(s): M77903_T34 (SEQ ID NO:83), for which the sequence(s) is/are given at the end of the application. The coding portion of transcript M77903_T34 (SEQ ID NO:83) is shown in bold; this coding portion starts at position 200 and ends at position 775. The transcript also has the following SNPs as listed in Table 15 (given according to their position on the nucleotide sequence, with the alternative nucleic acid listed; the last column indicates whether the SNP is known or not; the presence of known SNPs in variant protein M77903_P15 (SEQ ID NO:610) sequence provides support for the deduced sequence of this variant protein according to the present invention).

TABLE 15
Nucleic acid SNPs

| SNP position on | Alternative | Previously |
|---|---|---|
| nucleotide sequence | nucleic acid | known SNP? |
| 72 | G -> T | Yes |
| 120 | C -> G | No |
| 147 | G -> C | Yes |
| 215 | C -> G | No |
| 271 | C -> | No |
| 282 | T -> C | Yes |
| 342 | A -> G | No |
| 359 | G -> A | Yes |
| 371 | G -> A | No |
| 388 | T -> | No |
| 464 | T -> | No |
| 547 | T -> C | No |
| 547 | T -> G | No |
| 587 | T -> A | No |
| 587 | T -> C | No |
| 731 | A -> | No |

[2428] Variant protein M77903_P16 (SEQ ID NO:611) according to the present invention has an amino acid sequence as given at the end of the application; it is encoded by transcript(s) M77903_T36 (SEQ ID NO:84). An alignment is given to the known protein (Translocon-associated protein (SEQ ID NO:641), alpha subunit precursor) at the end of the application. One or more alignments to one or more previously published protein sequences are given at the end of the application. A brief description of the relationship of the variant protein according to the present invention to each such aligned protein is as follows:

[2429] Comparison Report Between M77903_P16 (SEQ ID NO:611) and SSRA_HUMAN (SEQ ID NO:641):

[2430] 1. An isolated chimeric polypeptide encoding for M77903_P16 (SEQ ID NO:611), comprising a first amino acid sequence being at least 90% homologous to MRLLPRLLLLLLLVFPATVLFRGGPRGLLAVAQDLTEDEETVEDSIIEDEDDEAEVEEDEPTDLVEDKEEED VSGEPEASPSADTTILFVKGE corresponding to amino acids 1-93 of SSRA_HUMAN (SEQ ID NO:641) which also corresponds to amino acids 1-93 of M77903_P16 (SEQ ID NO:611), and a second amino acid sequence being at least 70%, optionally at least 80%, preferably at least 85%, more preferably at least 90% and most preferably at least 95% homologous to a polypeptide having the sequence GNTEVLVLIQM (SEQ ID NO:1567) corresponding to amino acids 94-104 of M77903_P16 (SEQ ID NO:611), wherein said first amino acid sequence and second amino acid sequence are contiguous and in a sequential order.

[2431] 2. An isolated polypeptide encoding for a tail of M77903_P16 (SEQ ID NO:611), comprising a polypeptide being at least 70%, optionally at least about 80%, preferably at least about 85%, more preferably at least about 90% and most preferably at least about 95% homologous to the sequence GNTEVLVLIQM (SEQ ID NO:1567) in M77903_P16 (SEQ ID NO:611).

[2432] The location of the variant protein was determined according to results from a number of different software programs and analyses, including analyses from SignalP and other specialized programs. The variant protein is believed to be located as follows with regard to the cell: secreted. The protein localization is believed to be secreted because both signal-peptide prediction programs predict that this protein has a signal peptide, and neither trans-membrane region prediction program predicts that this protein has a trans-membrane region.

[2433] Variant protein M77903_P16 (SEQ ID NO:611) also has the following non-silent SNPs (Single Nucleotide Polymorphisms) as listed in Table 16, (given according to their position(s) on the amino acid sequence, with the alternative amino acid(s) listed; the last column indicates whether the SNP is known or not; the presence of known SNPs in variant protein M77903_P16 (SEQ ID NO:611) sequence provides support for the deduced sequence of this variant protein according to the present invention).

TABLE 16
Amino acid mutations

| SNP position(s) on | Alternative | Previously |
|---|---|---|
| amino acid sequence | amino acid(s) | known SNP? |
| 6 | R -> G | No |
| 24 | G -> | No |
| 28 | L -> S | Yes |
| 48 | E -> G | No |
| 54 | A -> T | Yes |
| 58 | E -> K | No |
| 63 | D -> | No |
| 89 | F -> | No |

[2434] The glycosylation sites of variant protein M77903_P16 (SEQ ID NO:611), as compared to the known protein Translocon-associated protein (SEQ ID NO:641), alpha subunit precursor, are described in Table 17 (given according to their position(s) on the amino acid sequence in the first column; the second column indicates whether the glycosylation site is present in the variant protein; and the last column indicates whether the position is different on the variant protein).

TABLE 17
Glycosylation site(s)

| Position(s) on known amino acid | |
|---|---|
| sequence | Present in variant protein? |
| 191 | No |
| 136 | No |

[2435] Variant protein M77903_P16 (SEQ ID NO:611) is encoded by the following transcript(s): M77903_T36 (SEQ ID NO:84), for which the sequence(s) is/are given at the end of the application. The coding portion of transcript M77903_T36 (SEQ ID NO:84) is shown in bold; this coding portion starts at position 200 and ends at position 511. The transcript also has the following SNPs as listed in Table 18 (given according to their position on the nucleotide sequence, with the alternative nucleic acid listed; the last column indicates whether the SNP is known or not; the presence of known SNPs in variant protein M77903_P16 (SEQ ID NO:611) sequence provides support for the deduced sequence of this variant protein according to the present invention).

TABLE 18
Nucleic acid SNPs

| SNP position on | Alternative | Previously |
|---|---|---|
| nucleotide sequence | nucleic acid | known SNP? |
| 72 | G -> T | Yes |
| 120 | C -> G | No |
| 147 | G -> C | Yes |
| 215 | C -> G | No |
| 271 | C -> | No |
| 282 | T -> C | Yes |
| 342 | A -> G | No |
| 359 | G -> A | Yes |
| 371 | G -> A | No |
| 388 | T -> | No |
| 464 | T -> | No |
| 527 | G -> A | Yes |
| 597 | C -> T | Yes |

[2436] As noted above, cluster M77903 features 29 segment(s), which were listed in Table 2 above and for which the sequence(s) are given at the end of the application. These segment(s) are portions of nucleic acid sequence(s) which are described herein separately because they are of particular interest. A description of each segment according to the present invention is now provided.

[2437] Segment cluster M77903_node_{—}2 (SEQ ID NO:476) according to the present invention is supported by 150 libraries. The number of libraries was determined as previously described. This segment can be found in the following transcript(s): M77903_T11 (SEQ ID NO:81), M77903_T12 (SEQ ID NO:82), M77903_T34 (SEQ ID NO:83) and M77903_T36 (SEQ ID NO:84). Table 19 below describes the starting and ending position of this segment on each transcript.

TABLE 19
Segment location on transcripts

| | Segment | Segment |
|---|---|---|
| Transcript name | starting position | ending position |
| M77903_T11 (SEQ ID NO: 81) | 118 | 278 |
| M77903_T12 (SEQ ID NO: 82) | 118 | 278 |
| M77903_T34 (SEQ ID NO: 83) | 118 | 278 |
| M77903_T36 (SEQ ID NO: 84) | 118 | 278 |

[2438] Segment cluster M77903_node_{—}13 (SEQ ID NO:477) according to the present invention is supported by 1 libraries. The number of libraries was determined as previously described. This segment can be found in the following transcript(s): M77903_T36 (SEQ ID NO:84). Table 20 below describes the starting and ending position of this segment on each transcript.

TABLE 20
Segment location on transcripts

| | Segment | Segment |
|---|---|---|
| Transcript name | starting position | ending position |
| M77903_T36 (SEQ ID NO: 84) | 480 | 629 |

[2439] Segment cluster M77903_node_{—}16 (SEQ ID NO:478) according to the present invention is supported by 149 libraries. The number of libraries was determined as previously described. This segment can be found in the following transcript(s): M77903_T11 (SEQ ID NO:81), M77903_T12 (SEQ ID NO:82) and M77903_T34 (SEQ ID NO:83). Table 21 below describes the starting and ending position of this segment on each transcript.

TABLE 21
Segment location on transcripts

| | Segment | Segment |
|---|---|---|
| Transcript name | starting position | ending position |
| M77903_T11 (SEQ ID NO: 81) | 523 | 683 |
| M77903_T12 (SEQ ID NO: 82) | 523 | 683 |
| M77903_T34 (SEQ ID NO: 83) | 523 | 683 |

[2440] Segment cluster M77903_node_{—}18 (SEQ ID NO:479) according to the present invention is supported by 2 libraries. The number of libraries was determined as previously described. This segment can be found in the following transcript(s): M77903_T34 (SEQ ID NO:83). Table 22 below describes the starting and ending position of this segment on each transcript.

TABLE 22
Segment location on transcripts

| | Segment | Segment |
|---|---|---|
| Transcript name | starting position | ending position |
| M77903_T34 (SEQ ID NO: 83) | 743 | 935 |

[2441] Segment cluster M77903_node_{—}35 (SEQ ID NO:480) according to the present invention is supported by 145 libraries. The number of libraries was determined as previously described. This segment can be found in the following transcript(s): M77903_T11 (SEQ ID NO:81) and M77903_T12 (SEQ ID NO:82). Table 23 below describes the starting and ending position of this segment on each transcript.

TABLE 23
Segment location on transcripts

| | Segment | Segment |
|---|---|---|
| Transcript name | starting position | ending position |
| M77903_T11 (SEQ ID NO: 81) | 978 | 1162 |
| M77903_T12 (SEQ ID NO: 82) | 884 | 1068 |

[2442] Segment cluster M77903_node_{—}36 (SEQ ID NO:481) according to the present invention is supported by 173 libraries. The number of libraries was determined as previously described. This segment can be found in the following transcript(s): M77903_T11 (SEQ ID NO:81) and M77903_T12 (SEQ ID NO:82). Table 24 below describes the starting and ending position of this segment on each transcript.

TABLE 24
Segment location on transcripts

| | Segment | Segment |
|---|---|---|
| Transcript name | starting position | ending position |
| M77903_T11 (SEQ ID NO: 81) | 1163 | 1571 |
| M77903_T12 (SEQ ID NO: 82) | 1069 | 1477 |

[2443] Segment cluster M77903_node_{—}37 (SEQ ID NO:482) according to the present invention is supported by 128 libraries. The number of libraries was determined as previously described. This segment can be found in the following transcript(s): M77903_T11 (SEQ ID NO:81) and M77903_T12 (SEQ ID NO:82). Table 25 below describes the starting and ending position of this segment on each transcript.

TABLE 25
Segment location on transcripts

| | Segment | Segment |
|---|---|---|
| Transcript name | starting position | ending position |
| M77903_T11 (SEQ ID NO: 81) | 1572 | 1913 |
| M77903_T12 (SEQ ID NO: 82) | 1478 | 1819 |

[2444] Segment cluster M77903_node_{—}38 (SEQ ID NO:483) according to the present invention is supported by 152 libraries. The number of libraries was determined as previously described. This segment can be found in the following transcript(s): M77903_T11 (SEQ ID NO:81) and M77903_T12 (SEQ ID NO:82). Table 26 below describes the starting and ending position of this segment on each transcript.

TABLE 26
Segment location on transcripts

| | Segment | Segment |
|---|---|---|
| Transcript name | starting position | ending position |
| M77903_T11 (SEQ ID NO: 81) | 1914 | 2411 |
| M77903_T12 (SEQ ID NO: 82) | 1820 | 2317 |

[2445] Segment cluster M77903_node_{—}40 (SEQ ID NO:484) according to the present invention is supported by 186 libraries. The number of libraries was determined as previously described. This segment can be found in the following transcript(s): M77903_T11 (SEQ ID NO:81) and M77903_T12 (SEQ ID NO:82). Table 27 below describes the starting and ending position of this segment on each transcript.

TABLE 27
Segment location on transcripts

| | Segment | Segment |
|---|---|---|
| Transcript name | starting position | ending position |
| M77903_T11 (SEQ ID NO: 81) | 2412 | 2923 |
| M77903_T12 (SEQ ID NO: 82) | 2318 | 2829 |

[2446] Segment cluster M77903_node_{—}44 (SEQ ID NO:485) according to the present invention is supported by 122 libraries. The number of libraries was determined as previously described. This segment can be found in the following transcript(s): M77903_T11 (SEQ ID NO:81) and M77903_T12 (SEQ ID NO:82). Table 28 below describes the starting and ending position of this segment on each transcript.

TABLE 28
Segment location on transcripts

| | Segment | Segment |
|---|---|---|
| Transcript name | starting position | ending position |
| M77903_T11 (SEQ ID NO: 81) | 3079 | 3826 |
| M77903_T12 (SEQ ID NO: 82) | 2985 | 3732 |

[2447] Segment cluster M77903_node_{—}46 (SEQ ID NO:486) according to the present invention is supported by 10 libraries. The number of libraries was determined as previously described. This segment can be found in the following transcript(s): M77903_T11 (SEQ ID NO:81) and M77903_T12 (SEQ ID NO:82). Table 29 below describes the starting and ending position of this segment on each transcript.

TABLE 29
Segment location on transcripts

| | Segment | Segment |
|---|---|---|
| Transcript name | starting position | ending position |
| M77903_T11 (SEQ ID NO: 81) | 3827 | 4196 |
| M77903_T12 (SEQ ID NO: 82) | 3733 | 4102 |

[2448] Segment cluster M77903_node_{—}47 (SEQ ID NO:487) according to the present invention is supported by 40 libraries. The number of libraries was determined as previously described. This segment can be found in the following transcript(s): M77903_T11 (SEQ ID NO:81) and M77903_T12 (SEQ ID NO:82). Table 30 below describes the starting and ending position of this segment on each transcript.

TABLE 30
Segment location on transcripts

| | Segment | Segment |
|---|---|---|
| Transcript name | starting position | ending position |
| M77903_T11 (SEQ ID NO: 81) | 4197 | 5182 |
| M77903_T12 (SEQ ID NO: 82) | 4103 | 5088 |

[2449] Segment cluster M77903_node_{—}48 (SEQ ID NO:488) according to the present invention is supported by 63 libraries. The number of libraries was determined as previously described. This segment can be found in the following transcript(s): M77903_T11 (SEQ ID NO:81) and M77903_T12 (SEQ ID NO:82). Table 31 below describes the starting and ending position of this segment on each transcript.

TABLE 31
Segment location on transcripts

| | Segment | Segment |
|---|---|---|
| Transcript name | starting position | ending position |
| M77903_T11 (SEQ ID NO: 81) | 5183 | 6133 |
| M77903_T12 (SEQ ID NO: 82) | 5089 | 6039 |

[2450] Segment cluster M77903_node_{—}49 (SEQ ID NO:489) according to the present invention is supported by 7 libraries. The number of libraries was determined as previously described. This segment can be found in the following transcript(s): M77903_T11 (SEQ ID NO:81) and M77903_T12 (SEQ ID NO:82). Table 32 below describes the starting and ending position of this segment on each transcript.

TABLE 32
Segment location on transcripts

| | Segment | Segment |
|---|---|---|
| Transcript name | starting position | ending position |
| M77903_T11 (SEQ ID NO: 81) | 6134 | 6319 |
| M77903_T12 (SEQ ID NO: 82) | 6040 | 6225 |

[2451] Segment cluster M77903_node_{—}51 (SEQ ID NO:490) according to the present invention is supported by 14 libraries. The number of libraries was determined as previously described. This segment can be found in the following transcript(s): M77903_T11 (SEQ ID NO:81) and M77903_T12 (SEQ ID NO:82). Table 33 below describes the starting and ending position of this segment on each transcript.

TABLE 33
Segment location on transcripts

| | Segment | Segment |
|---|---|---|
| Transcript name | starting position | ending position |
| M77903_T11 (SEQ ID NO: 81) | 6320 | 7542 |
| M77903_T12 (SEQ ID NO: 82) | 6226 | 7448 |

[2452] Segment cluster M77903_node_{—}52 (SEQ ID NO:491) according to the present invention is supported by 160 libraries. The number of libraries was determined as previously described. This segment can be found in the following transcript(s): M77903_T11 (SEQ ID NO:81) and M77903_T12 (SEQ ID NO:82). Table 34 below describes the starting and ending position of this segment on each transcript.

TABLE 34
Segment location on transcripts

| | Segment | Segment |
|---|---|---|
| Transcript name | starting position | ending position |
| M77903_T11 (SEQ ID NO: 81) | 7543 | 9702 |
| M77903_T12 (SEQ ID NO: 82) | 7449 | 9608 |

[2453] According to an optional embodiment of the present invention, short segments related to the above cluster are also provided. These segments are up to about 120 bp in length, and so are included in a separate description.

[2454] Segment cluster M77903_node_{—}1 (SEQ ID NO:492) according to the present invention is supported by 4 libraries. The number of libraries was determined as previously described. This segment can be found in the following transcript(s): M77903_T11 (SEQ ID NO:81), M77903_T12 (SEQ ID NO:82), M77903_T34 (SEQ ID NO:83) and M77903_T36 (SEQ ID NO:84). Table 35 below describes the starting and ending position of this segment on each transcript.

TABLE 35
Segment location on transcripts

| | Segment | Segment |
|---|---|---|
| Transcript name | starting position | ending position |
| M77903_T11 (SEQ ID NO: 81) | 1 | 117 |
| M77903_T12 (SEQ ID NO: 82) | 1 | 117 |
| M77903_T34 (SEQ ID NO: 83) | 1 | 117 |
| M77903_T36 (SEQ ID NO: 84) | 1 | 117 |

[2455] Segment cluster M77903_node_{—}5 (SEQ ID NO:493) according to the present invention is supported by 154 libraries. The number of libraries was determined as previously described. This segment can be found in the following transcript(s): M77903_T11 (SEQ ID NO:81), M77903_T12 (SEQ ID NO:82), M77903_T34 (SEQ ID NO:83) and M77903_T36 (SEQ ID NO:84). Table 36 below describes the starting and ending position of this segment on each transcript.

TABLE 36
Segment location on transcripts

| | Segment | Segment |
|---|---|---|
| Transcript name | starting position | ending position |
| M77903_T11 (SEQ ID NO: 81) | 279 | 391 |
| M77903_T12 (SEQ ID NO: 82) | 279 | 391 |
| M77903_T34 (SEQ ID NO: 83) | 279 | 391 |
| M77903_T36 (SEQ ID NO: 84) | 279 | 391 |

[2456] Segment cluster M77903_node_{—}9 (SEQ ID NO:494) according to the present invention can be found in the following transcript(s): M77903_T11 (SEQ ID NO:81), M77903_T12 (SEQ ID NO:82), M77903_T34 (SEQ ID NO:83) and M77903_T36 (SEQ ID NO:84). Table 37 below describes the starting and ending position of this segment on each transcript.

TABLE 37
Segment location on transcripts

| | Segment | Segment |
|---|---|---|
| Transcript name | starting position | ending position |
| M77903_T11 (SEQ ID NO: 81) | 392 | 395 |
| M77903_T12 (SEQ ID NO: 82) | 392 | 395 |
| M77903_T34 (SEQ ID NO: 83) | 392 | 395 |
| M77903_T36 (SEQ ID NO: 84) | 392 | 395 |

[2457] Segment cluster M77903_node_{—}10 (SEQ ID NO:495) according to the present invention is supported by 148 libraries. The number of libraries was determined as previously described. This segment can be found in the following transcript(s): M77903_T11 (SEQ ID NO:81), M77903_T12 (SEQ ID NO:82), M77903_T34 (SEQ ID NO:83) and M77903_T36 (SEQ ID NO:84). Table 38 below describes the starting and ending position of this segment on each transcript.

TABLE 38
Segment location on transcripts

| | Segment | Segment |
|---|---|---|
| Transcript name | starting position | ending position |
| M77903_T11 (SEQ ID NO: 81) | 396 | 468 |
| M77903_T12 (SEQ ID NO: 82) | 396 | 468 |
| M77903_T34 (SEQ ID NO: 83) | 396 | 468 |
| M77903_T36 (SEQ ID NO: 84) | 396 | 468 |

[2458] Segment cluster M77903_node_{—}11 (SEQ ID NO:496) according to the present invention can be found in the following transcript(s): M77903_T11 (SEQ ID NO:81), M77903_T12 (SEQ ID NO:82), M77903_T34 (SEQ ID NO:83) and M77903_T36 (SEQ ID NO:84). Table 39 below describes the starting and ending position of this segment on each transcript.

TABLE 39
Segment location on transcripts

| | Segment | Segment |
|---|---|---|
| Transcript name | starting position | ending position |
| M77903_T11 (SEQ ID NO: 81) | 469 | 473 |
| M77903_T12 (SEQ ID NO: 82) | 469 | 473 |
| M77903_T34 (SEQ ID NO: 83) | 469 | 473 |
| M77903_T36 (SEQ ID NO: 84) | 469 | 473 |

[2459] Segment cluster M77903_node_{—}12 (SEQ ID NO:497) according to the present invention can be found in the following transcript(s): M77903_T11 (SEQ ID NO:81), M77903_T12 (SEQ ID NO:82), M77903_T34 (SEQ ID NO:83) and M77903_T36 (SEQ ID NO:84). Table 40 below describes the starting and ending position of this segment on each transcript.

TABLE 40
Segment location on transcripts

| | Segment | Segment |
|---|---|---|
| Transcript name | starting position | ending position |
| M77903_T11 (SEQ ID NO: 81) | 474 | 479 |
| M77903_T12 (SEQ ID NO: 82) | 474 | 479 |
| M77903_T34 (SEQ ID NO: 83) | 474 | 479 |
| M77903_T36 (SEQ ID NO: 84) | 474 | 479 |

[2460] Segment cluster M77903_node_{—}15 (SEQ ID NO:498) according to the present invention is supported by 129 libraries. The number of libraries was determined as previously described. This segment can be found in the following transcript(s): M77903_T11 (SEQ ID NO:81), M77903_T12 (SEQ ID NO:82) and M77903_T34 (SEQ ID NO:83). Table 41 below describes the starting and ending position of this segment on each transcript.

TABLE 41
Segment location on transcripts

| | Segment | Segment |
|---|---|---|
| Transcript name | starting position | ending position |
| M77903_T11 (SEQ ID NO: 81) | 480 | 522 |
| M77903_T12 (SEQ ID NO: 82) | 480 | 522 |
| M77903_T34 (SEQ ID NO: 83) | 480 | 522 |

[2461] Segment cluster M77903_node_{—}17 (SEQ ID NO:499) according to the present invention is supported by 141 libraries. The number of libraries was determined as previously described. This segment can be found in the following transcript(s): M77903_T11 (SEQ ID NO:81), M77903_T12 (SEQ ID NO:82) and M77903_T34 (SEQ ID NO:83). Table 42 below describes the starting and ending position of this segment on each transcript.

TABLE 42
Segment location on transcripts

| | Segment | Segment |
|---|---|---|
| Transcript name | starting position | ending position |
| M77903_T11 (SEQ ID NO: 81) | 684 | 742 |
| M77903_T12 (SEQ ID NO: 82) | 684 | 742 |
| M77903_T34 (SEQ ID NO: 83) | 684 | 742 |

[2462] Segment cluster M77903_node_{—}20 (SEQ ID NO:500) according to the present invention is supported by 134 libraries. The number of libraries was determined as previously described. This segment can be found in the following transcript(s): M77903_T11 (SEQ ID NO:81) and M77903_T12 (SEQ ID NO:82). Table 43 below describes the starting and ending position of this segment on each transcript.

TABLE 43
Segment location on transcripts

| | Segment | Segment |
|---|---|---|
| Transcript name | starting position | ending position |
| M77903_T11 (SEQ ID NO: 81) | 743 | 819 |
| M77903_T12 (SEQ ID NO: 82) | 743 | 819 |

[2463] Segment cluster M77903_node_{—}28 (SEQ ID NO:501) according to the present invention is supported by 134 libraries. The number of libraries was determined as previously described. This segment can be found in the following transcript(s): M77903_T11 (SEQ ID NO:81). Table 44 below describes the starting and ending position of this segment on each transcript.

TABLE 44
Segment location on transcripts

| | Segment | Segment |
|---|---|---|
| Transcript name | starting position | ending position |
| M77903_T11 (SEQ ID NO: 81) | 820 | 913 |

[2464] Segment cluster M77903_node_{—}34 (SEQ ID NO:502) according to the present invention is supported by 134 libraries. The number of libraries was determined as previously described. This segment can be found in the following transcript(s): M77903_T11 (SEQ ID NO:81) and M77903_T12 (SEQ ID NO:82). Table 45 below describes the starting and ending position of this segment on each transcript.

TABLE 45
Segment location on transcripts

| | Segment | Segment |
|---|---|---|
| Transcript name | starting position | ending position |
| M77903_T11 (SEQ ID NO: 81) | 914 | 977 |
| M77903_T12 (SEQ ID NO: 82) | 820 | 883 |

[2465] Segment cluster M77903_node_{—}41 (SEQ ID NO:503) according to the present invention is supported by 119 libraries. The number of libraries was determined as previously described. This segment can be found in the following transcript(s): M77903_T11 (SEQ ID NO:81) and M77903_T12 (SEQ ID NO:82). Table 46 below describes the starting and ending position of this segment on each transcript.

TABLE 46
Segment location on transcripts

| | Segment | Segment |
|---|---|---|
| Transcript name | starting position | ending position |
| M77903_T11 (SEQ ID NO: 81) | 2924 | 2984 |
| M77903_T12 (SEQ ID NO: 82) | 2830 | 2890 |

[2466] Segment cluster M77903_node_{—}42 (SEQ ID NO:504) according to the present invention is supported by 123 libraries. The number of libraries was determined as previously described. This segment can be found in the following transcript(s): M77903_T11 (SEQ ID NO:81) and M77903_T12 (SEQ ID NO:82). Table 47 below describes the starting and ending position of this segment on each transcript.

TABLE 47
Segment location on transcripts

| | Segment | Segment |
|---|---|---|
| Transcript name | starting position | ending position |
| M77903_T11 (SEQ ID NO: 81) | 2985 | 3078 |
| M77903_T12 (SEQ ID NO: 82) | 2891 | 2984 |

### Variant Protein Alignment to the Previously Known Protein:

Sequence name: SSRA_HUMAN (SEQ ID NO:641)
Sequence documentation:
Alignment of: M77903_P4 (SEQ ID NO:608) × SSRA_HUMAN (SEQ ID NO:641) ..
Alignment segment 1/1:

| | | | |
|---|---|---|---|
| Quality: | 1991.00 | Escore: | 0 |
| Matching length: | 208 | Total length: | 208 |
| Matching Percent Similarity: | 100.00 | Matching Percent Identity: | 99.52 |
| Total Percent Similarity: | 100.00 | Total Percent Identity: | 99.52 |
| Gaps: | 0 | | |
| Alignment: | | | |

[chemical structure]

[chemical structure]

[chemical structure]

[chemical structure]

[chemical structure]

Sequence name: SSRA_HUMAN (SEQ ID NO:641)
Sequence documentation:
Alignment of: M77903_P5 (SEQ ID NO:609) × SSRA_HUMAN (SEQ ID NO:641) ..
Alignment segment 1/1:

| | | | |
|---|---|---|---|
| Quality: | 1987.00 | Escore: | 0 |
| Matching length: | 207 | Total length: | 207 |
| Matching Percent Similarity: | 100.00 | Matching Percent Identity: | 100.00 |
| Total Percent Similarity: | 100.00 | Total Percent Identity: | 100.00 |
| Gaps: | 0 | | |
| Alignment: | | | |

[chemical structure]

[chemical structure]

[chemical structure]

[chemical structure]

[chemical structure]

Sequence name: SSRA_HUMAN (SEQ ID NO:641)
Sequence documentation:
Alignment of: M77903_P15 (SEQ ID NO:610) × SSRA_HUMAN (SEQ ID 110:641) ..
Alignment segment 1/1:

| | | | |
|---|---|---|---|
| Quality: | 1741.00 | Escore: | 0 |
| Matching length: | 181 | Total length: | 181 |
| Matching Percent Similarity: | 100.00 | Matching Percent Identity: | 100.00 |
| Total Percent Similarity: | 100.00 | Total Percent Identity: | 100.00 |
| Gaps: | 0 | | |
| Alignment: | | | |

[chemical structure]

[chemical structure]

[chemical structure]

[chemical structure]

Sequence name: SSRA_HUMAN (SEQ ID NO:641)
Sequence documentation:
Alignment of: M77903_P16 (SEQ ID NO:611) × SSRA_HUMAN (SEQ ID NO:641) ..
Alignment segment 1/1:

| | | | |
|---|---|---|---|
| Quality: | 869.00 | Escore: | 0 |
| Matching length: | 93 | Total length: | 93 |
| Matching Percent Similarity: | 100.00 | Matching Percent Identity: | 100.00 |
| Total Percent Similarity: | 100.00 | Total Percent Identity: | 100.00 |
| Gaps: | 0 | | |
| Alignment: | | | |

[chemical structure]

[chemical structure]

[2468] Expression of SSRA_HUMAN: SSR-Alpha M77903 Transcripts, which are Detectable by Amplicon, as Depicted in Sequence Name M77903Seg18 (SEQ ID NO: 1303) in Normal and Cancerous Colon Tissues.

[2469] Transcripts detectable by or according to M77903seg18 amplicon (SEQ ID NO:1303) and M77903seg18F (SEQ ID NO: 1301) and M77903seg18R (SEQ ID NO: 1302) primers were measured by real time PCR. In parallel the expression of four housekeeping genes: PBGD (GenBank Accession No. BC019323 (SEQ ID NO:1576); amplicon—PBGD-amplicon, SEQ ID NO:531), HPRT1 (GenBank Accession No. NM_{—}000194 (SEQ ID NO:1577); amplicon—HPRT1-amplicon, SEQ ID NO:612), and, G6PD (GenBank Accession No. NM_{—}000402 (SEQ ID NO:1578); HPRT1-amplicon, SEQ ID NO:615), and RPS27A (GenBank Accession No. NM_{—}002954 (SEQ ID NO:1579); RPS27A amplicon, SEQ ID NO:1261), was measured similarly. For each RT sample, the expression of the above amplicon was normalized to the geometric mean of the quantities of the housekeeping genes. The normalized quantity of each RT sample was then divided by the median of the quantities of the normal post-mortem (PM) samples (Sample Nos. 41, 52, 62-67, 69-71, Table 1 Tissue samples in testing panel), to obtain a value of fold up-regulation for each sample relative to median of the normal PM samples.

[2470] FIG. 34 is a histogram showing over expression of the above-indicated SSRA_HUMAN: SSR-alpha transcripts in cancerous colon samples relative to the normal samples.

[2471] As is evident from FIG. 34, the expression of SSRA_HUMAN: SSR-alpha transcripts detectable by the above amplicon(s) in a few cancer samples was higher than in the non-cancerous samples (Sample Nos. 41, 52, 62-67, 69-71 Table 1 Tissue samples in testing panel). Notably an over-expression of at least 5 fold was found in 5 out of 37 adenocarcinoma samples.

[2472] Primer pairs are also optionally and preferably encompassed within the present invention; for example, for the above experiment, the following primer pair was used as a non-limiting illustrative example only of a suitable primer pair: M77903seg18F forward primer (SEQ ID NO: 1301); and M77903seg18R reverse primer (SEQ ID NO: 1302).

[2473] The present invention also preferably encompasses any amplicon obtained through the use of any suitable primer pair; for example, for the above experiment, the following amplicon was obtained as a non-limiting illustrative example only of a suitable amplicon: M77903seg18] (SEQ ID NO: 1303).

M77903seg18F

(SEQ ID NO: 1301)

CGGTGACGTTGTTTAATAGAATATATCTGT
M77903seg18R

(SEQ ID NO: 1302)

AAGAAACGTGCAATTTATCTTTGCT
M77903seg18 amplicon

(SEQ ID NO: 1303)

CGGTGACGTTGTTTAATAGAATATATCTGTTCATTCAGTTGCCTGTTTTG
TGGTTGAACCTGTGATAGCCACCAGGGAAGCAAAGATAAATTGCACGTTT
CTT

[2474] As can be seen from FIGS. 35 and 36, for cluster M77903, amplicon name: M77903 junc20-34-35, and M77903 junc20-28, respectively, low over expression was observed in one experiment carried out with colon.

### Expression of SSRA_HUMAN

### Translocon-Associated Protein, Alpha Subunit (Trap-Alpha Signal Sequence Receptor Alpha SubunitSSR-Alpha) M77903 Transcripts which are Detectable by Amplicon as Depicted in Sequence Name M77903junc20-28 (SEQ ID NO: 1306) in Normal and Cancerous Colon Tissues

[2475] Expression of SSRA_HUMAN: Translocon-associated protein, alpha subunit (TRAP-alpha Signal sequence receptor alpha subunitSSR-alpha ) transcripts detectable by or according to junc20-28, M77903junc20-28 amplicon (SEQ ID NO: 1306) and primers M77903junc20-28F (SEQ ID NO: 1304) and M77903junc20-28R (SEQ ID NO: 1305) was measured by real time PCR. In parallel the expression of four housekeeping genes —PBGD (GenBank Accession No. BC019323 (SEQ ID NO:1576); amplicon—PBGD-amplicon, SEQ ID NO:531), HPRT1 (GenBank Accession No. NM_{—}000194 (SEQ ID NO:1577); amplicon—HPRT1-amplicon, SEQ ID NO:612), G6PD (GenBank Accession No. NM_{—}000402 (SEQ ID NO:1578); HPRT1-amplicon, SEQ ID NO:615), RPS27A (GenBank Accession No. NM_{—}002954 (SEQ ID NO:1579); RPS27A amplicon, SEQ ID NO:1261) was measured similarly. For each RT sample, the expression of the above amplicon was normalized to the geometric mean of the quantities of the housekeeping genes. The normalized quantity of each RT sample was then divided by the median of the quantities of the normal post-mortem (PM) samples (Sample Nos. 41, 52, 62-67, 69-71, Table 1, above, “Tissue samples in testing panel”), to obtain a value of fold up-regulation for each sample relative to median of the normal PM samples.

[2476] FIG. 35 is a histogram showing over expression of the above-indicated SSRA_HUMAN: Translocon-associated protein, alpha subunit TRAP-alpha Signal sequence receptor alpha subunitSSR-alpha transcripts in cancerous colon samples relative to the normal samples.

[2477] As is evident from FIG. 35, the expression of the above-indicated SSRA_HUMAN: Translocon-associated protein, alpha subunit TRAP-alpha Signal sequence receptor alpha subunitSSR-alpha transcripts detectable by the above amplicon in cancer samples was higher in a few samples than in the non-cancerous samples (Sample Nos. 41, 52, 62-67, 69-71, Table 1, above, “Tissue samples in testing panel”). Notably an over-expression of at least 5 fold was found in 4 out of 36 adenocarcinoma samples.

[2478] Primer pairs are also optionally and preferably encompassed within the present invention; for example, for the above experiment, the following primer pair was used as a non-limiting illustrative example only of a suitable primer pair: M77903junc20-28F forward primer (SEQ ID NO: 1304); and M77903junc20-28R reverse primer (SEQ ID NO: 1305).

[2479] The present invention also preferably encompasses any amplicon obtained through the use of any suitable primer pair; for example, for the above experiment, the following amplicon was obtained as a non-limiting illustrative example only of a suitable amplicon: M77903junc20-28 (SEQ ID NO: 1306).

Primers:
Forward primer M77903junc20-28F (SEQ ID NO: 1304):
GGCAATGTATTCCAAGATGCAG
Reverse primer M77903junc20-28R (SEQ ID NO: 1305):
TCTGTATGGGTCTCTTACGGTTTCT
Amplicon M77903junc20-28 (SEQ ID NO: 1306):
GGCAATGTATTCCAGATGCAGTCTTCAATCAAACAGTTACAGTTATTGAA
AGAGAGGATGGGTTAGATGGAGAAACCGTAAGAGACCCATACAGA

### Expression of SSRA_HUMAN

### Translocon-Associated Protein, Alpha Subunit Trap-Alpha Signal Sequence Receptor Alpha SubunitSSR-AlphaM77903 Transcripts which are Detectable by Amplicon as Depicted in Sequence Name M77903junc20-34-35 (SEQ ID NO: 1309) in Normal and Cancerous Colon Tissues

[2480] Expression of SSRA_HUMAN: Translocon-associated protein, alpha subunit TRAP-alpha Signal sequence receptor alpha subunitSSR-alpha transcripts detectable by or according to junc20-34-35, M77903junc20-34-35 amplicon (SEQ ID NO: 1309) and primers M77903junc20-34-35F (SEQ ID NO: 1307) and M77903junc20-34-35R (SEQ ID NO: 1308) was measured by real time PCR. In parallel the expression of four housekeeping genes —PBGD (GenBank Accession No. BC019323 (SEQ ID NO:1576); amplicon—PBGD-amplicon, SEQ ID NO:531), HPRT1 (GenBank Accession No. NM_{—}000194 (SEQ ID NO:1577); amplicon—HPRT1-amplicon, SEQ ID NO:612), G6PD (GenBank Accession No. NM_{—}000402 (SEQ ID NO:1578); HPRT1-amplicon, SEQ ID NO:615), RPS27A (GenBank Accession No. NM_{—}002954 (SEQ ID NO:1579); RPS27A amplicon, SEQ ID NO:1261) was measured similarly. For each RT sample, the expression of the above amplicon was normalized to the geometric mean of the quantities of the housekeeping genes. The normalized quantity of each RT sample was then divided by the median of the quantities of the normal post-mortem (PM) samples (Sample Nos. 41, 52, 62-67, 69-71 Table 1, above, “Tissue samples in testing panel”), to obtain a value of fold up-regulation for each sample relative to median of the normal PM samples.

[2481] FIG. 36 is a histogram showing over expression of the above-indicated SSRA_HUMAN: Translocon-associated protein, alpha subunit TRAP-alpha Signal sequence receptor alpha subunit SSR-alpha transcripts in cancerous colon samples relative to the normal samples.

[2482] As is evident from FIG. 36, the expression of SSRA_HUMAN: Translocon-associated protein, alpha subunit, TRAP-alpha Signal sequence receptor alpha subunitSSR-alpha transcripts detectable by the above amplicon in cancer samples was higher in a few samples than in the non-cancerous samples (Sample Nos. 41, 52, 62-67, 69-71, Table 1, above, “Tissue samples in testing panel”). Notably an over-expression of at least 10 fold was found in 7 out of 36 adenocarcinoma samples.

[2483] Primer pairs are also optionally and preferably encompassed within the present invention; for example, for the above experiment, the following primer pair was used as a non-limiting illustrative example only of a suitable primer pair: M77903junc20-34-35F forward primer (SEQ ID NO: 1307); and M77903junc20-34-35R reverse primer (SEQ ID NO: 1308).

[2484] The present invention also preferably encompasses any amplicon obtained through the use of any suitable primer pair; for example, for the above experiment, the following amplicon was obtained as a non-limiting illustrative example only of a suitable amplicon: M77903junc20-34-35 (SEQ ID NO: 1309).

Primers:
Forward primer M77903junc20-34-35F (SEQ ID NO:
1307):
ATGGGTTAGATGGAGAAACATAAAGCT
Reverse primer M77903junc20-34-35R (SEQ ID NO:
1308):
TGCACAAAGGAACATTTACTCATCA
Amplicon M77903junc20-34-35 (SEQ ID NO: 1309):
ATGGGTTAGATGGAGAAACATAAAGCTTCACCAAGAAGGTTGCCCAGGAA
ACGGGCACAGAAGAGATCAGTGGGATCTGATGAGTAAATGTTCCTTTGTG
CA

[2485] Combined expression of 6 Sequences (M85491seg24 (SEQ ID NO: 1276), M77903 seg18 (SEQ ID NO: 1303), M77903junc20-28 (SEQ ID NO: 1306), Z44808 junc8-11 (SEQ ID NO: 1291), Z25299 seg 20 (SEQ ID NO: 1294) and HSKITCR seg3 (SEQ ID NO: 1309)) in Normal and Cancerous Colon Tissues

[2486] Expression of Ephrin type-B receptor 2 precursor (EC 2.7.1.112) (Tyrosine-protein kinase receptor EPH-3), SSRA_HUMAN, SMO2_HUMAN SPARC related modular calcium-binding protein 2 precursor (Secreted modular calcium-binding protein 2) (SMOC-2) (Smooth muscle-associated protein 2), Secretory leukocyte protease inhibitor Acid-stable proteinase inhibitor and KIT_HUMAN; mast/stem cell growth factor receptor SCFR; Proto-oncogene tyrosine-protein kinase Kit; v-kit; CD117 antigen transcripts detectable by or according to M85491seg24 (SEQ ID NO: 1276), M77903 seg18 (SEQ ID NO: 1303), M77903junc20-28 (SEQ ID NO: 1306), Z44808 junc8-11 (SEQ ID NO: 1291), Z25299 seg 20 (SEQ ID NO: 1294) and HSKITCR seg3 (SEQ ID NO: 1309) amplicons and M85491seg24F (SEQ ID NO: 1274), M85491seg24R (SEQ ID NO: 1275), M77903 seg18F (SEQ ID NO: 1301), M77903 seg18R (SEQ ID NO: 1302), M77903junc20-28F (SEQ ID NO: 1304), M77903junc20-28R (SEQ ID NO: 1305), Z44808 junc8-11 (SEQ ID NO: 1289), Z44808 junc8-11R (SEQ ID NO: 1290), Z25299 seg 20F (SEQ ID NO: 1292), Z25299 seg 20R (SEQ ID NO: 1293), HSKITCR seg3F (SEQ ID NO: 1307) and HSKITCR seg3R (SEQ ID NO: 1308) primers was measured by real time PCR. In parallel the expression of four housekeeping genes —PBGD (GenBank Accession No. BC019323 (SEQ ID NO:1576); amplicon—PBGD-amplicon, SEQ ID NO:531), HPRT1 (GenBank Accession No. NM_{—}000194 (SEQ ID NO:1577); amplicon —HPRT1-amplicon, SEQ ID NO:612), G6PD (GenBank Accession No. NM_{—}000402 (SEQ ID NO:1578); HPRT1-amplicon, SEQ ID NO:615) and RPS27A (GenBank Accession No. NM_{—}002954 (SEQ ID NO:1579); RPS27A amplicon, SEQ ID NO:1261) was measured similarly. For each RT sample, the expression of the above amplicons was normalized to the geometric mean of the quantities of the housekeeping genes. The normalized quantity of each RT sample of each amplicon was then divided by the median of the quantities of the normal post-mortem (PM) samples detected for the same amplicon (Sample Nos. 41, 52, 62-67, 69-71 Table 3, above), to obtain a value of fold up-regulation for each sample relative to median of the normal PM samples. The reciprocal of this ratio was calculated for HSKITCR seg3 (SEQ ID NO: 1309), to obtain a value of fold down-regulation for each sample relative to median of the normal PM samples. The expression of HSKITCR transcripts which can be detected by the HSKITCR seg3 (SEQ ID NO: 1309), is described also in the patent application “NOVEL NUCLEOTIDE AND AMINO ACID SEQUENCES, AND ASSAYS AND METHODS OF USE THEREOF FOR DIAGNOSIS”, attorney reference number XXXXX, by the same inventors, filed on the same date ans incorporated herein by reference.

[2487] FIGS. 37-38 are histograms showing differential expression of the above-indicated transcripts in cancerous colon samples relative to the normal samples, in different combinations. The number and percentage of samples that exhibit at least 5 fold differential of at least one of the sequences, out of the total number of samples tested is indicated in the bottom.

[2488] As is evident from FIGS. 37-38, differential expression of at least 5 fold in at least one of the sequences was found in 29 out of 36 adenocarcinoma samples in the combinations of 6 transcripts, and in 13 out of 36 adenocarcinoma samples in the combinations of 5 transcripts.

[2489] Statistical analysis was applied to verify the significance of these results, as described below. Threshold of 5 fold differential expression of at least one of the amplicons was found to differentiate between cancer and normal samples as checked by exact fisher test.

[2490] The above values demonstrate statistical significance of the results.

### Description for Cluster HSSTROL3

[2491] Cluster HSSTROL3 features 6 transcript(s) and 16 segment(s) of interest, the names for which are given in Tables 1 and 2, respectively, the sequences themselves are given at the end of the application. The selected protein variants are given in table 3.

TABLE 1
Transcripts of interest

| Transcript Name | SEQ ID NO: |
|---|---|
| HSSTROL3_T5 | 85 |
| HSSTROL3_T8 | 86 |
| HSSTROL3_T9 | 87 |
| HSSTROL3_T10 | 88 |
| HSSTROL3_T11 | 505 |
| HSSTROL3_T12 | 506 |

TABLE 2
Segments of interest

| Segment Name | SEQ ID NO: |
|---|---|
| HSSTROL3_node_6 | 507 |
| HSSTROL3_node_10 | 508 |
| HSSTROL3_node_13 | 509 |
| HSSTROL3_node_15 | 510 |
| HSSTROL3_node_19 | 511 |
| HSSTROL3_node_21 | 512 |
| HSSTROL3_node_24 | 513 |
| HSSTROL3_node_25 | 514 |
| HSSTROL3_node_26 | 515 |
| HSSTROL3_node_28 | 516 |
| HSSTROL3_node_29 | 517 |
| HSSTROL3_node_11 | 518 |
| HSSTROL3_node_17 | 519 |
| HSSTROL3_node_18 | 520 |
| HSSTROL3_node_20 | 521 |
| HSSTROL3_node_27 | 522 |

TABLE 3
Proteins of interest

| Protein Name | SEQ ID NO: | Corresponding Transcript(s) |
|---|---|---|
| HSSTROL3_P4 | 524 | HSSTROL3_T5 (SEQ ID NO: 85) |
| HSSTROL3_P5 | 525 | HSSTROL3_T8 (SEQ ID NO: 86); |
| | | HSSTROL3_T9 (SEQ ID NO: 87) |
| HSSTROL3_P7 | 526 | HSSTROL3_T10 (SEQ ID NO: 88) |
| HSSTROL3_P8 | 527 | HSSTROL3_T11 (SEQ ID NO: 505) |
| HSSTROL3_P9 | 528 | HSSTROL3_T12 (SEQ ID NO: 506) |

[2492] These sequences are variants of the known protein Stromelysin-3 precursor (SwissProt accession identifier MM11_HUMAN; known also according to the synonyms EC 3.4.24.-; Matrix metalloproteinase-11; MMP-11; ST3; SL-3), SEQ ID NO: 523, referred to herein as the previously known protein.

[2493] Protein Stromelysin-3 precursor (SEQ ID NO:523) is known or believed to have the following function(s): May play an important role in the progression of epithelial malignancies. The sequence for protein Stromelysin-3 precursor is given at the end of the application, as “Stromelysin-3 precursor amino acid sequence”.

[2494] The following GO Annotation(s) apply to the previously known protein. The following annotation(s) were found: proteolysis and peptidolysis; developmental processes; morphogenesis, which are annotation(s) related to Biological Process; stromelysin 3; calcium binding; zinc binding; hydrolase, which are annotation(s) related to Molecular Function; and extracellular matrix, which are annotation(s) related to Cellular Component.

[2495] The GO assignment relies on information from one or more of the SwissProt/TremB1 Protein knowledgebase, available from <http://www.expasy.ch/sprot/>; or Locuslink, available from <http://www.ncbi.nlm.nih.gov/projects/LocusLink/>.

[2496] Cluster HSSTROL3 can be used as a diagnostic marker according to overexpression of transcripts of this cluster in cancer. Expression of such transcripts in normal tissues is also given according to the previously described methods. The term “number” in the left hand column of the table and the numbers on the y-axis of the figure below refer to weighted expression of ESTs in each category, as “parts per million” (ratio of the expression of ESTs for a particular cluster to the expression of all ESTs in that category, according to parts per million).

[2497] Overall, the following results were obtained as shown with regard to the histograms in FIG. 75 and Table 4. This cluster is overexpressed (at least at a minimum level) in the following pathological conditions: transitional cell carcinoma, epithelial malignant tumors, a mixture of malignant tumors from different tissues and pancreas carinoma.

TABLE 4
Normal tissue distribution

| Name of Tissue | Number |
|---|---|
| adrenal | 0 |
| bladder | 0 |
| brain | 1 |
| colon | 63 |
| epithelial | 33 |
| general | 13 |
| head and neck | 101 |
| kidney | 0 |
| lung | 11 |
| breast | 8 |
| ovary | 14 |
| pancreas | 0 |
| prostate | 2 |
| skin | 99 |
| Thyroid | 0 |
| uterus | 181 |

TABLE 5
P values and ratios for expression in cancerous tissue

| Name of Tissue | P1 | P2 | SP1 | R3 | SP2 | R4 |
|---|---|---|---|---|---|---|
| adrenal | 1 | 4.6e−01 | 1 | 1.0 | 5.3e−01 | 1.9 |
| bladder | 2.7e−01 | 3.4e−01 | 3.3e−03 | 4.9 | 2.1e−02 | 3.3 |
| brain | 3.5e−01 | 2.6e−01 | 1 | 1.7 | 3.3e−01 | 2.8 |
| colon | 7.7e−02 | 1.5e−01 | 3.1e−01 | 1.4 | 5.2e−01 | 1.0 |
| epithelial | 1.2e−04 | 1.2e−02 | 1.3e−06 | 2.7 | 4.6e−02 | 1.4 |
| general | 5.4e−09 | 3.1e−05 | 1.8e−16 | 5.0 | 3.1e−07 | 2.6 |
| head and neck | 4.6e−01 | 4.3e−01 | 1 | 0.6 | 9.4e−01 | 0.7 |
| kidney | 2.5e−01 | 3.5e−01 | 1.1e−01 | 4.0 | 2.4e−01 | 2.8 |
| lung | 1.8e−01 | 4.5e−01 | 1.9e−01 | 2.7 | 5.1e−01 | 1.4 |
| breast | 2.0e−01 | 3.4e−01 | 7.3e−02 | 3.3 | 2.5e−01 | 2.0 |
| ovary | 2.6e−01 | 3.2e−01 | 2.2e−02 | 2.0 | 7.0e−02 | 1.6 |
| pancreas | 9.5e−02 | 1.8e−01 | 1.8e−04 | 7.8 | 1.6e−03 | 5.5 |
| prostate | 8.2e−01 | 7.8e−01 | 4.5e−01 | 1.8 | 5.6e−01 | 1.5 |
| skin | 5.2e−01 | 5.8e−01 | 7.1e−01 | 0.8 | 1 | 0.3 |
| Thyroid | 2.9e−01 | 2.9e−01 | 1 | 1.1 | 1 | 1.1 |
| uterus | 4.2e−01 | 8.0e−01 | 7.5e−01 | 0.6 | 9.9e−01 | 0.4 |

[2498] AS noted above, cluster HSSTROL3 features 6 transcript(s), which were listed in Table 1 above. These transcript(s) encode for protein(s) which are variant(s) of protein Stromelysin-3 precursor (SEQ ID NO:523). A description of each variant protein according to the present invention is now provided.

[2499] Variant protein HSSTROL3_P4 (SEQ ID NO:524) according to the present invention has an amino acid sequence as given at the end of the application; it is encoded by transcript(s) HSSTROL3_T5 (SEQ ID NO:85). An alignment is given to the known protein (Stromelysin-3 precursor (SEQ ID NO:523)) at the end of the application. One or more alignments to one or more previously published protein sequences are given at the end of the application. A brief description of the relationship of the variant protein according to the present invention to each such aligned protein is as follows:

[2500] Comparison Report Between HSSTROL3_P4 (SEQ ID NO:524) and MM11_HUMAN (SEQ ID NO:523):

[2501] 1. An isolated chimeric polypeptide encoding for HSSTROL3_P4 (SEQ ID NO:524), comprising a first amino acid sequence being at least 90% homologous to MAPAAWLRSAAARALLPPMLLLLLQPPPLLARALPPDVHHLHAERRGPQPWHAALPSSPAPAPATQEAPR PASSLRPPRCGVPDPSDGLSARNRQKRFVLSGGRWEKTDLTYRILRFPWQLVQEQVRQTMAEALKVWSD VTPLTFTEVHEGRADIMIDFARYW corresponding to amino acids 1-163 of MM11_HUMAN (SEQ ID NO:523), which also corresponds to amino acids 1-163 of HSSTROL3_P4 (SEQ ID NO:524), a bridging amino acid H corresponding to amino acid 164 of HSSTROL3_P4 (SEQ ID NO:524), a second amino acid sequence being at least 90% homologous to GDDLPFDGPGGILAHAFFPKTHREGDVHFDYDETWTIGDDQGTDLLQVAAHEFGHVLGLQHTTAAKALM SAFYTFRYPLSLSPDDCRGVQHLYGQPWPTVTSRTPALGPQAGIDTNEIAPLEPDAPPDACEASFDAVSTIR GELFFFKAGFVWRLRGGQLQPGYPALASRHWQGLPSPVDAAFEDAQGHIWFFQGAQYWVYDGEKPVLG PAPLTELGLVRFPVHAALVWGPEKNKIYFFRGRDYWRFHPSTRRVDSPVPRRATDWRGVPSEIDAAFQDA DG corresponding to amino acids 165-445 of MM11_HUMAN (SEQ ID NO:523), which also corresponds to amino acids 165-445 of HSSTROL3_P4 (SEQ ID NO:524), and a third amino acid sequence being at least 70%, optionally at least 80%, preferably at least 85%, more preferably at least 90% and most preferably at least 95% homologous to a polypeptide having the sequence ALGVRQLVGGGHSSRFSHLVVAGLPHACHRKSGSSSQVLCPEPSALLSVAG (SEQ ID NO:1568) corresponding to amino acids 446-496 of HSSTROL3_P4 (SEQ ID NO:524), wherein said first amino acid sequence, bridging amino acid, second amino acid sequence and third amino acid sequence are contiguous and in a sequential order.

[2502] 2. An isolated polypeptide encoding for a tail of HSSTROL3_P4 (SEQ ID NO:524), comprising a polypeptide being at least 70%, optionally at least about 80%, preferably at least about 85%, more preferably at least about 90% and most preferably at least about 95% homologous to the sequence ALGVRQLVGGGHSSRFSHLVVAGLPHACHRKSGSSSQVLCPEPSALLSVAG (SEQ ID NO:1568) in HSSTROL3_P4 (SEQ ID NO:524).

[2503] The location of the variant protein was determined according to results from a number of different software programs and analyses, including analyses from SignalP and other specialized programs. The variant protein is believed to be located as follows with regard to the cell: secreted. The protein localization is believed to be secreted because both signal-peptide prediction programs predict that this protein has a signal peptide, and neither trans-membrane region prediction program predicts that this protein has a trans-membrane region.

[2504] Variant protein HSSTROL3_P4 (SEQ ID NO:524) also has the following non-silent SNPs (Single Nucleotide Polymorphisms) as listed in Table 6, (given according to their position(s) on the amino acid sequence, with the alternative amino acid(s) listed; the last column indicates whether the SNP is known or not; the presence of known SNPs in variant protein HSSTROL3_P4 (SEQ ID NO:524) sequence provides support for the deduced sequence of this variant protein according to the present invention).

TABLE 6
Amino acid mutations

| SNP position(s) on | Alternative | Previously known |
|---|---|---|
| amino acid sequence | amino acid(s) | SNP? |
| 38 | V -> A | Yes |
| 104 | R -> P | Yes |
| 214 | A -> | No |
| 323 | Q -> H | Yes |

[2505] Variant protein HSSTROL3_P4 (SEQ ID NO:524) is encoded by the following transcript(s): HSSTROL3_T5 (SEQ ID NO:85), for which the sequence(s) is/are given at the end of the application. The coding portion of transcript HSSTROL3_T5 (SEQ ID NO:85) is shown in bold; this coding portion starts at position 24 and ends at position 1511. The transcript also has the following SNPs as listed in Table 7 (given according to their position on the nucleotide sequence, with the alternative nucleic acid listed; the last column indicates whether the SNP is known or not; the presence of known SNPs in variant protein HSSTROL3_P4 (SEQ ID NO:524) sequence provides support for the deduced sequence of this variant protein according to the present invention).

TABLE 7
Nucleic acid SNPs

| SNP position on nucleotide | Alternative | Previously |
|---|---|---|
| sequence | nucleic acid | known SNP? |
| 136 | T -> C | Yes |
| 334 | G -> C | Yes |
| 663 | G -> | No |
| 699 | -> T | No |
| 992 | G -> C | Yes |
| 1528 | A -> G | Yes |
| 1710 | A -> G | Yes |
| 2251 | A -> G | Yes |
| 2392 | C -> | No |
| 2444 | C -> A | Yes |
| 2470 | A -> T | Yes |
| 2687 | -> G | No |
| 2696 | -> G | No |
| 2710 | C -> | No |
| 2729 | -> A | No |
| 2755 | T -> C | No |
| 2813 | A -> | No |
| 2813 | A -> C | No |
| 2963 | A -> | No |
| 2963 | A -> C | No |
| 2993 | T -> C | Yes |
| 3140 | -> T | No |

[2506] Variant protein HSSTROL3_P5 (SEQ ID NO:525) according to the present invention has an amino acid sequence as given at the end of the application; it is encoded by transcript(s) HSSTROL3_T8 (SEQ ID NO:86) and HSSTROL3_T9 (SEQ ID NO:87). An alignment is given to the known protein (Stromelysin-3 precursor (SEQ ID NO:523)) at the end of the application. One or more alignments to one or more previously published protein sequences are given at the end of the application. A brief description of the relationship of the variant protein according to the present invention to each such aligned protein is as follows:

[2507] Comparison Report Between HSSTROL3_P5 (SEQ ID NO:525) and MM11_HUMAN (SEQ ID NO:523):

[2508] 1. An isolated chimeric polypeptide encoding for HSSTROL3_P5 (SEQ ID NO:525), comprising a first amino acid sequence being at least 90% homologous to MAPAAWLRSAAARALLPPMLLLLLQPPPLLARALPPDVHHLHAERRGPQPWHAALPSSPAPAPATQEAPR PASSLRPPRCGVPDPSDGLSARNRQKRFVLSGGRWEKTDLTYRILRFPWQLVQEQVRQTMAEALKVWSD VTPLTFTEVHEGRADIMIDFARYW corresponding to amino acids 1-163 of MM11_HUMAN (SEQ ID NO:523), which also corresponds to amino acids 1-163 of HSSTROL3_P5 (SEQ ID NO:525), a bridging amino acid H corresponding to amino acid 164 of HSSTROL3_P5 (SEQ ID NO:525), a second amino acid sequence being at least 90% homologous to GDDLPFDGPGGILAHAFFPKTHREGDVHFDYDETWTIGDDQGTDLLQVAAHEFGHVLGLQHTTAAKALM SAFYTFRYPLSLSPDDCRGVQHLYGQPWPTVTSRTPALGPQAGIDTNEIAPLEPDAPPDACEASFDAVSTIR GELFFFKAGFVWRLRGGQLQPGYPALASRHWQGLPSPVDAAFEDAQGHIWFFQ corresponding to amino acids 165-358 of MM11_HUMAN (SEQ ID NO:523), which also corresponds to amino acids 165-358 of HSSTROL3_P5 (SEQ ID NO:525), and a third amino acid sequence being at least 70%, optionally at least 80%, preferably at least 85%, more preferably at least 90% and most preferably at least 95% homologous to a polypeptide having the sequence ELGFPSSTGRDESLEHCRCQGLHK (SEQ ID NO:1569) corresponding to amino acids 359-382 of HSSTROL3_P5 (SEQ ID NO:525), wherein said first amino acid sequence, bridging amino acid, second amino acid sequence and third amino acid sequence are contiguous and in a sequential order.

[2509] 2. An isolated polypeptide encoding for a tail of HSSTROL3_P5 (SEQ ID NO:525), comprising a polypeptide being at least 70%, optionally at least about 80%, preferably at least about 85%, more preferably at least about 90% and most preferably at least about 95% homologous to the sequence ELGFPSSTGRDESLEHCRCQGLHK (SEQ ID NO:1569) in HSSTROL3_P5 (SEQ ID NO:525).

[2510] The location of the variant protein was determined according to results from a number of different software programs and analyses, including analyses from SignalP and other specialized programs. The variant protein is believed to be located as follows with regard to the cell: secreted. The protein localization is believed to be secreted because both signal-peptide prediction programs predict that this protein has a signal peptide, and neither trans-membrane region prediction program predicts that this protein has a trans-membrane region.

[2511] Variant protein HSSTROL3_P5 (SEQ ID NO:525) also has the following non-silent SNPs (Single Nucleotide Polymorphisms) as listed in Table 8, (given according to their position(s) on the amino acid sequence, with the alternative amino acid(s) listed; the last column indicates whether the SNP is known or not; the presence of known SNPs in variant protein HSSTROL3_P5 (SEQ ID NO:525) sequence provides support for the deduced sequence of this variant protein according to the present invention).

TABLE 8
Amino acid mutations

| SNP position(s) on amino acid | Alternative | Previously |
|---|---|---|
| sequence | amino acid(s) | known SNP? |
| 38 | V -> A | Yes |
| 104 | R -> P | Yes |
| 214 | A -> | No |
| 323 | Q -> H | Yes |

[2512] Variant protein HSSTROL3_P5 (SEQ ID NO:525) is encoded by the following transcript(s): HSSTROL3_T8 (SEQ ID NO:86) and HSSTROL3_T9 (SEQ ID NO:87), for which the sequence(s) is/are given at the end of the application.

[2513] The coding portion of transcript HSSTROL3_T8 (SEQ ID NO:86) is shown in bold; this coding portion starts at position 24 and ends at position 1169. The transcript also has the following SNPs as listed in Table 9 (given according to their position on the nucleotide sequence, with the alternative nucleic acid listed; the last column indicates whether the SNP is known or not; the presence of known SNPs in variant protein HSSTROL3_P5 (SEQ ID NO:525) sequence provides support for the deduced sequence of this variant protein according to the present invention).

TABLE 9
Nucleic acid SNPs

| SNP position on nucleotide | Alternative | Previously |
|---|---|---|
| sequence | nucleic acid | known SNP? |
| 136 | T -> C | Yes |
| 334 | G -> C | Yes |
| 663 | G -> | No |
| 699 | -> T | No |
| 992 | G -> C | Yes |
| 1903 | C -> | No |
| 1955 | C -> A | Yes |
| 1981 | A -> T | Yes |
| 2198 | -> G | No |
| 2207 | -> G | No |
| 2221 | C -> | No |
| 2240 | -> A | No |
| 2266 | T -> C | No |
| 2324 | A -> | No |
| 2324 | A -> C | No |
| 2474 | A -> | No |
| 2474 | A -> C | No |
| 2504 | T -> C | Yes |
| 2651 | -> T | No |

[2514] The coding portion of transcript HSSTROL3_T9 (SEQ ID NO:87) is shown in bold; this coding portion starts at position 24 and ends at position 1169. The transcript also has the following SNPs as listed in Table 10 (given according to their position on the nucleotide sequence, with the alternative nucleic acid listed; the last column indicates whether the SNP is known or not; the presence of known SNPs in variant protein HSSTROL3_P5 (SEQ ID NO:525) sequence provides support for the deduced sequence of this variant protein according to the present invention).

TABLE 10
Nucleic acid SNPs

| SNP position on nucleotide | | Previously |
|---|---|---|
| sequence | Alternative nucleic acid | known SNP? |
| 136 | T -> C | Yes |
| 334 | G -> C | Yes |
| 663 | G -> | No |
| 699 | -> T | No |
| 992 | G -> C | Yes |
| 1666 | A -> G | Yes |
| 1848 | A -> G | Yes |
| 2389 | A -> G | Yes |
| 2530 | C -> | No |
| 2582 | C -> A | Yes |
| 2608 | A -> T | Yes |
| 2825 | -> G | No |
| 2834 | -> G | No |
| 2848 | C -> | No |
| 2867 | -> A | No |
| 2893 | T -> C | No |
| 2951 | A -> | No |
| 2951 | A -> C | No |
| 3101 | A -> | No |
| 3101 | A -> C | No |
| 3131 | T -> C | Yes |
| 3278 | -> T | No |

[2515] Variant protein HSSTROL3_P7 (SEQ ID NO:526) according to the present invention has an amino acid sequence as given at the end of the application; it is encoded by transcript(s) HSSTROL3_T10 (SEQ ID NO:88). An alignment is given to the known protein (Stromelysin-3 precursor (SEQ ID NO:523)) at the end of the application. One or more alignments to one or more previously published protein sequences are given at the end of the application. A brief description of the relationship of the variant protein according to the present invention to each such aligned protein is as follows:

[2516] Comparison Report Between HSSTROL3_P7 (SEQ ID NO:526) and MM11_HUMAN (SEQ ID NO:523):

[2517] 1. An isolated chimeric polypeptide encoding for HSSTROL3_P7 (SEQ ID NO:526), comprising a first amino acid sequence being at least 90% homologous to MAPAAWLRSAAARALLPPMLLLLLQPPPLLARALPPDVHHLHAERRGPQPWHAALPSSPAPAPATQEAPR PASSLRPPRCGVPDPSDGLSARNRQKRFVLSGGRWEKTDLTYRILRFPWQLVQEQVRQTMAEALKVWSD VTPLTFTEVHEGRADIMIDFARYW corresponding to amino acids 1-163 of MM11_HUMAN (SEQ ID NO:523), which also corresponds to amino acids 1-163 of HSSTROL3_P7 (SEQ ID NO:526), a bridging amino acid H corresponding to amino acid 164 of HSSTROL3_P7 (SEQ ID NO:526), a second amino acid sequence being at least 90% homologous to GDDLPFDGPGGILAHAFFPKTHREGDVHFDYDETWTIGDDQGTDLLQVAAHEFGHVLGLQHTTAAKALM SAFYTFRYPLSLSPDDCRGVQHLYGQPWPTVTSRTPALGPQAGIDTNEIAPLEPDAPPDACEASFDAVSTIR GELFFFKAGFVWRLRGGQLQPGYPALASRHWQGLPSPVDAAFEDAQGHIWFFQG corresponding to amino acids 165-359 of MM11_HUMAN (SEQ ID NO:523), which also corresponds to amino acids 165-359 of HSSTROL3_P7 (SEQ ID NO:526), and a third amino acid sequence being at least 70%, optionally at least 80%, preferably at least 85%, more preferably at least 90% and most preferably at least 95% homologous to a polypeptide having the sequence TTGVSTPAPGV (SEQ ID NO:1570) corresponding to amino acids 360-370 of HSSTROL3_P7 (SEQ ID NO:526), wherein said first amino acid sequence, bridging amino acid, second amino acid sequence and third amino acid sequence are contiguous and in a sequential order.

[2518] 2. An isolated polypeptide encoding for a tail of HSSTROL3_P7 (SEQ ID NO:526), comprising a polypeptide being at least 70%, optionally at least about 80%, preferably at least about 85%, more preferably at least about 90% and most preferably at least about 95% homologous to the sequence TTGVSTPAPGV (SEQ ID NO:1570) in HSSTROL3_P7 (SEQ ID NO:526).

[2519] The location of the variant protein was determined according to results from a number of different software programs and analyses, including analyses from SignalP and other specialized programs. The variant protein is believed to be located as follows with regard to the cell: secreted. The protein localization is believed to be secreted because both signal-peptide prediction programs predict that this protein has a signal peptide, and neither trans-membrane region prediction program predicts that this protein has a trans-membrane region.

[2520] Variant protein HSSTROL3_P7 (SEQ ID NO:526) also has the following non-silent SNPs (Single Nucleotide Polymorphisms) as listed in Table 11, (given according to their position(s) on the amino acid sequence, with the alternative amino acid(s) listed; the last column indicates whether the SNP is known or not; the presence of known SNPs in variant protein HSSTROL3_P7 (SEQ ID NO:526) sequence provides support for the deduced sequence of this variant protein according to the present invention).

TABLE 11
Amino acid mutations

| SNP position(s) on amino acid | | Previously |
|---|---|---|
| sequence | Alternative amino acid(s) | known SNP? |
| 38 | V -> A | Yes |
| 104 | R -> P | Yes |
| 214 | A -> | No |
| 323 | Q -> H | Yes |

[2521] Variant protein HSSTROL3_P7 (SEQ ID NO:526) is encoded by the following transcript(s): HSSTROL3_T10 (SEQ ID NO:88), for which the sequence(s) is/are given at the end of the application. The coding portion of transcript HSSTROL3_T10 (SEQ ID NO:88) is shown in bold; this coding portion starts at position 24 and ends at position 1133. The transcript also has the following SNPs as listed in Table 12 (given according to their position on the nucleotide sequence, with the alternative nucleic acid listed; the last column indicates whether the SNP is known or not; the presence of known SNPs in variant protein HSSTROL3_P7 (SEQ ID NO:526) sequence provides support for the deduced sequence of this variant protein according to the present invention).

TABLE 12
Nucleic acid SNPs

| SNP position on nucleotide | | Previously |
|---|---|---|
| sequence | Alternative nucleic acid | known SNP? |
| 136 | T -> C | Yes |
| 334 | G -> C | Yes |
| 663 | G -> | No |
| 699 | -> T | No |
| 992 | G -> C | Yes |
| 1386 | A -> G | Yes |
| 1568 | A -> G | Yes |
| 2109 | A -> G | Yes |
| 2250 | C -> | No |
| 2302 | C -> A | Yes |
| 2328 | A -> T | Yes |
| 2545 | -> G | No |
| 2554 | -> G | No |
| 2568 | C -> | No |
| 2587 | -> A | No |
| 2613 | T -> C | No |
| 2671 | A -> | No |
| 2671 | A -> C | No |
| 2821 | A -> | No |
| 2821 | A -> C | No |
| 2851 | T -> C | Yes |
| 2998 | -> T | No |

[2522] Variant protein HSSTROL3_P8 (SEQ ID NO:527) according to the present invention has an amino acid sequence as given at the end of the application; it is encoded by transcript(s) HSSTROL3_T11 (SEQ ID NO:505). An alignment is given to the known protein (Stromelysin-3 precursor (SEQ ID NO:523)) at the end of the application. One or more alignments to one or more previously published protein sequences are given at the end of the application. A brief description of the relationship of the variant protein according to the present invention to each such aligned protein is as follows:

[2523] Comparison Report Between HSSTROL3_P8 (SEQ ID NO:527) and MM11_HUMAN (SEQ ID NO:523):

[2524] 1. An isolated chimeric polypeptide encoding for HSSTROL3_P8 (SEQ ID NO:527), comprising a first amino acid sequence being at least 90% homologous to MAPAAWLRSAAARALLPPMLLLLLQPPPLLARALPPDVHHLHAERRGPQPWHAALPSSPAPAPATQEAPR PASSLRPPRCGVPDPSDGLSARNRQKRFVLSGGRWEKTDLTYRILRFPWQLVQEQVRQTMAEALKVWSD VTPLTFTEVHEGRADIMIDFARYW corresponding to amino acids 1-163 of MM11_HUMAN (SEQ ID NO:523), which also corresponds to amino acids 1-163 of HSSTROL3_P8 (SEQ ID NO:527), a bridging amino acid H corresponding to amino acid 164 of HSSTROL3_P8 (SEQ ID NO:527), a second amino acid sequence being at least 90% homologous to GDDLPFDGPGGILAHAFFPKTHREGDVHFDYDETWTIGDDQGTDLLQVAAHEFGHVLGLQHTTAAKALM SAFYTFRYPLSLSPDDCRGVQHLYGQPWPTVTSRTPALGPQAGIDTNEIAPLE corresponding to amino acids 165-286 of MM11_HUMAN (SEQ ID NO:523), which also corresponds to amino acids 165-286 of HSSTROL3_P8 (SEQ ID NO:527), and a third amino acid sequence being at least 70%, optionally at least 80%, preferably at least 85%, more preferably at least 90% and most preferably at least 95% homologous to a polypeptide having the sequence VRPCLPVPLLLCWPL (SEQ ID NO:1571) corresponding to amino acids 287-301 of HSSTROL3_P8 (SEQ ID NO:527), wherein said first amino acid sequence, bridging amino acid, second amino acid sequence and third amino acid sequence are contiguous and in a sequential order.

[2525] 2. An isolated polypeptide encoding for a tail of HSSTROL3_P8 (SEQ ID NO:527), comprising a polypeptide being at least 70%, optionally at least about 80%, preferably at least about 85%, more preferably at least about 90% and most preferably at least about 95% homologous to the sequence VRPCLPVPLLLCWPL (SEQ ID NO:1571) in HSSTROL3_P8 (SEQ ID NO:527).

[2526] The location of the variant protein was determined according to results from a number of different software programs and analyses, including analyses from SignalP and other specialized programs. The variant protein is believed to be located as follows with regard to the cell: secreted. The protein localization is believed to be secreted because both signal-peptide prediction programs predict that this protein has a signal peptide, and neither trans-membrane region prediction program predicts that this protein has a trans-membrane region.

[2527] Variant protein HSSTROL3_P8 (SEQ ID NO:527) also has the following non-silent SNPs (Single Nucleotide Polymorphisms) as listed in Table 13, (given according to their position(s) on the amino acid sequence, with the alternative amino acid(s) listed; the last column indicates whether the SNP is known or not; the presence of known SNPs in variant protein HSSTROL3_P8 (SEQ ID NO:527) sequence provides support for the deduced sequence of this variant protein according to the present invention).

TABLE 13
Amino acid mutations

| SNP position(s) on amino acid | | Previously |
|---|---|---|
| sequence | Alternative amino acid(s) | known SNP? |
| 38 | V -> A | Yes |
| 104 | R -> P | Yes |
| 214 | A -> | No |

[2528] Variant protein HSSTROL3_P8 (SEQ ID NO:527) is encoded by the following transcript(s): HSSTROL3_T11 (SEQ ID NO:505), for which the sequence(s) is/are given at the end of the application. The coding portion of transcript HSSTROL3_T11 (SEQ ID NO:505) is shown in bold; this coding portion starts at position 24 and ends at position 926. The transcript also has the following SNPs as listed in Table 14 (given according to their position on the nucleotide sequence, with the alternative nucleic acid listed; the last column indicates whether the SNP is known or not; the presence of known SNPs in variant protein HSSTROL3_P8 (SEQ ID NO:527) sequence provides support for the deduced sequence of this variant protein according to the present invention).

TABLE 14
Nucleic acid SNPs

| SNP position on nucleotide | | Previously |
|---|---|---|
| sequence | Alternative nucleic acid | known SNP? |
| 136 | T -> C | Yes |
| 334 | G -> C | Yes |
| 663 | G -> | No |
| 699 | -> T | No |
| 935 | G -> A | Yes |
| 948 | G -> A | Yes |
| 1084 | G -> C | Yes |
| 1557 | C -> | No |
| 1609 | C -> A | Yes |
| 1635 | A -> T | Yes |
| 1852 | -> G | No |
| 1861 | -> G | No |
| 1875 | C -> | No |
| 1894 | -> A | No |
| 1920 | T -> C | No |
| 1978 | A -> | No |
| 1978 | A -> C | No |
| 2128 | A -> | No |
| 2128 | A -> C | No |
| 2158 | T -> C | Yes |
| 2305 | -> T | No |

[2529] Variant protein HSSTROL3_P9 (SEQ ID NO:528) according to the present invention has an amino acid sequence as given at the end of the application; it is encoded by transcript(s) HSSTROL3_T12 (SEQ ID NO:506). An alignment is given to the known protein (Stromelysin-3 precursor (SEQ ID NO:523)) at the end of the application. One or more alignments to one or more previously published protein sequences are given at the end of the application. A brief description of the relationship of the variant protein according to the present invention to each such aligned protein is as follows:

[2530] Comparison Report Between HSSTROL3_P9 (SEQ ID NO:528) and MM11_HUMAN (SEQ ID NO:523):

[2531] 1. An isolated chimeric polypeptide encoding for HSSTROL3_P9 (SEQ ID NO:528), comprising a first amino acid sequence being at least 90% homologous to MAPAAWLRSAAARALLPPMLLLLLQPPPLLARALPPDVHHLHAERRGPQPWHAALPSSPAPAPATQEAPR PASSLRPPRCGVPDPSDGLSARNRQK corresponding to amino acids 1-96 of MM11_HUMAN (SEQ ID NO:523), which also corresponds to amino acids 1-96 of HSSTROL3_P9 (SEQ ID NO:528), a second amino acid sequence being at least 90% homologous to RILRFPWQLVQEQVRQTMAEALKVWSDVTPLTFTEVHEGRADIMIDFARYW corresponding to amino acids 113-163 of MM11_HUMAN (SEQ ID NO:523), which also corresponds to amino acids 97-147 of HSSTROL3_P9 (SEQ ID NO:528), a bridging amino acid H corresponding to amino acid 148 of HSSTROL3_P9 (SEQ ID NO:528), a third amino acid sequence being at least 90% homologous to GDDLPFDGPGGILAHAFFPKTHREGDVHFDYDETWTIGDDQGTDLLQVAAHEFGHVLGLQHTTAAKALM SAFYTFRYPLSLSPDDCRGVQHLYGQPWPTVTSRTPALGPQAGIDTNEIAPLEPDAPPDACEASFDAVSTIR GELFFFKAGFVWRLRGGQLQPGYPALASRHWQGLPSPVDAAFEDAQGHIWFFQG corresponding to amino acids 165-359 of MM11_HUMAN (SEQ ID NO:523), which also corresponds to amino acids 149-343 of HSSTROL3_P9 (SEQ ID NO:528), and a fourth amino acid sequence being at least 70%, optionally at least 80%, preferably at least 85%, more preferably at least 90% and most preferably at least 95% homologous to a polypeptide having the sequence TTGVSTPAPGV (SEQ ID NO:1570) corresponding to amino acids 344-354 of HSSTROL3_P9 (SEQ ID NO:528), wherein said first amino acid sequence, second amino acid sequence, bridging amino acid, third amino acid sequence and fourth amino acid sequence are contiguous and in a sequential order.

[2532] 2. An isolated chimeric polypeptide encoding for an edge portion of HSSTROL3_P9 (SEQ ID NO:528), comprising a polypeptide having a length “n”, wherein n is at least about 10 amino acids in length, optionally at least about 20 amino acids in length, preferably at least about 30 amino acids in length, more preferably at least about 40 amino acids in length and most preferably at least about 50 amino acids in length, wherein at least two amino acids comprise KR, having a structure as follows: a sequence starting from any of amino acid numbers 96−x to 96; and ending at any of amino acid numbers 97+((n−2)−x), in which x varies from 0 to n−2.

[2533] 3. An isolated polypeptide encoding for a tail of HSSTROL3_P9 (SEQ ID NO:528), comprising a polypeptide being at least 70%, optionally at least about 80%, preferably at least about 85%, more preferably at least about 90% and most preferably at least about 95% homologous to the sequence TTGVSTPAPGV (SEQ ID NO:1570) in HSSTROL3_P9 (SEQ ID NO:528).

[2534] The location of the variant protein was determined according to results from a number of different software programs and analyses, including analyses from SignalP and other specialized programs. The variant protein is believed to be located as follows with regard to the cell: secreted. The protein localization is believed to be secreted because both signal-peptide prediction programs predict that this protein has a signal peptide, and neither trans-membrane region prediction program predicts that this protein has a trans-membrane region.

[2535] Variant protein HSSTROL3_P9 (SEQ ID NO:528) also has the following non-silent SNPs (Single Nucleotide Polymorphisms) as listed in Table 15, (given according to their position(s) on the amino acid sequence, with the alternative amino acid(s) listed; the last column indicates whether the SNP is known or not; the presence of known SNPs in variant protein HSSTROL3_P9 (SEQ ID NO:528) sequence provides support for the deduced sequence of this variant protein according to the present invention).

TABLE 15
Amino acid mutations

| SNP position(s) on amino acid | | Previously |
|---|---|---|
| sequence | Alternative amino acid(s) | known SNP? |
| 38 | V -> A | Yes |
| 198 | A -> | No |
| 307 | Q -> H | Yes |

[2536] Variant protein HSSTROL3_P9 (SEQ ID NO:528) is encoded by the following transcript(s): HSSTROL3_T12 (SEQ ID NO:506), for which the sequence(s) is/are given at the end of the application. The coding portion of transcript HSSTROL3_T12 (SEQ ID NO:506) is shown in bold; this coding portion starts at position 24 and ends at position 1085. The transcript also has the following SNPs as listed in Table 16 (given according to their position on the nucleotide sequence, with the alternative nucleic acid listed; the last column indicates whether the SNP is known or not; the presence of known SNPs in variant protein HSSTROL3_P9 (SEQ ID NO:528) sequence provides support for the deduced sequence of this variant protein according to the present invention).

TABLE 16
Nucleic acid SNPs

| SNP position on nucleotide | | Previously |
|---|---|---|
| sequence | Alternative nucleic acid | known SNP? |
| 136 | T -> C | Yes |
| 615 | G -> | No |
| 651 | -> T | No |
| 944 | G -> C | Yes |
| 1275 | C -> | No |
| 1327 | C -> A | Yes |
| 1353 | A -> T | Yes |
| 1570 | -> G | No |
| 1579 | -> G | No |
| 1593 | C -> | No |
| 1612 | -> A | No |
| 1638 | T -> C | No |
| 1696 | A -> | No |
| 1696 | A -> C | No |
| 1846 | A -> | No |
| 1846 | A -> C | No |
| 1876 | T -> C | Yes |
| 2023 | -> T | No |

[2537] As noted above, cluster HSSTROL3 features 16 segment(s), which were listed in Table 2 above and for which the sequence(s) are given at the end of the application. These segment(s) are portions of nucleic acid sequence(s) which are described herein separately because they are of particular interest. A description of each segment according to the present invention is now provided.

[2538] Segment cluster HSSTROL3_node_{—}6 (SEQ ID NO:507) according to the present invention is supported by 14 libraries. The number of libraries was determined as previously described. This segment can be found in the following transcript(s): HSSTROL3_T5 (SEQ ID NO:85), HSSTROL3_T8 (SEQ ID NO:86), HSSTROL3_T9 (SEQ ID NO:87), HSSTROL3_T10 (SEQ ID NO:88), HSSTROL3_T11 (SEQ ID NO:505) and HSSTROL3_T12 (SEQ ID NO:506). Table 17 below describes the starting and ending position of this segment on each transcript.

TABLE 17
Segment location on transcripts

| | Segment | Segment |
|---|---|---|
| Transcript name | starting position | ending position |
| HSSTROL3_T5 (SEQ ID NO: 85) | 1 | 131 |
| HSSTROL3_T8 (SEQ ID NO: 86) | 1 | 131 |
| HSSTROL3_T9 (SEQ ID NO: 87) | 1 | 131 |
| HSSTROL3_T10 (SEQ ID NO: 88) | 1 | 131 |
| HSSTROL3_T11 (SEQ ID NO: 505) | 1 | 131 |
| HSSTROL3_T12 (SEQ ID NO: 506) | 1 | 131 |

[2539] Segment cluster HSSTROL3_node_{—}10 (SEQ ID NO:508) according to the present invention is supported by 21 libraries. The number of libraries was determined as previously described. This segment can be found in the following transcript(s): HSSTROL3_T5 (SEQ ID NO:85), HSSTROL3_T8 (SEQ ID NO:86), HSSTROL3_T9 (SEQ ID NO:87), HSSTROL3_T10 (SEQ ID NO:88), HSSTROL3_T11 (SEQ ID NO:505) and HSSTROL3_T12 (SEQ ID NO:506). Table 18 below describes the starting and ending position of this segment on each transcript.

TABLE 18
Segment location on transcripts

| | Segment | Segment |
|---|---|---|
| Transcript name | starting position | ending position |
| HSSTROL3_T5 (SEQ ID NO: 85) | 132 | 313 |
| HSSTROL3_T8 (SEQ ID NO: 86) | 132 | 313 |
| HSSTROL3_T9 (SEQ ID NO: 87) | 132 | 313 |
| HSSTROL3_T10 (SEQ ID NO: 88) | 132 | 313 |
| HSSTROL3_T11 (SEQ ID NO: 505) | 132 | 313 |
| HSSTROL3_T12 (SEQ ID NO: 506) | 132 | 313 |

[2540] Segment cluster HSSTROL3_node_{—}13 (SEQ ID NO:509) according to the present invention is supported by 36 libraries. The number of libraries was determined as previously described. This segment can be found in the following transcript(s): HSSTROL3_T5 (SEQ ID NO:85), HSSTROL3_T8 (SEQ ID NO:86), HSSTROL3_T9 (SEQ ID NO:87), HSSTROL3_T10 (SEQ ID NO:88), HSSTROL3_T11 (SEQ ID NO:505) and HSSTROL3_T12 (SEQ ID NO:506). Table 19 below describes the starting and ending position of this segment on each transcript.

TABLE 19
Segment location on transcripts

| | Segment | Segment |
|---|---|---|
| Transcript name | starting position | ending position |
| HSSTROL3_T5 (SEQ ID NO: 85) | 362 | 505 |
| HSSTROL3_T8 (SEQ ID NO: 86) | 362 | 505 |
| HSSTROL3_T9 (SEQ ID NO: 87) | 362 | 505 |
| HSSTROL3_T10 (SEQ ID NO: 88) | 362 | 505 |
| HSSTROL3_T11 (SEQ ID NO: 505) | 362 | 505 |
| HSSTROL3_T12 (SEQ ID NO: 506) | 314 | 457 |

[2541] Segment cluster HSSTROL3_node_{—}15 (SEQ ID NO:510) according to the present invention is supported by 47 libraries. The number of libraries was determined as previously described. This segment can be found in the following transcript(s): HSSTROL3_T5 (SEQ ID NO:85), HSSTROL3_T8 (SEQ ID NO:86), HSSTROL3_T9 (SEQ ID NO:87), HSSTROL3_T10 (SEQ ID NO:88), HSSTROL3_T11 (SEQ ID NO:505) and HSSTROL3_T12 (SEQ ID NO:506). Table 20 below describes the starting and ending position of this segment on each transcript.

TABLE 20
Segment location on transcripts

| | Segment | Segment |
|---|---|---|
| Transcript name | starting position | ending position |
| HSSTROL3_T5 (SEQ ID NO: 85) | 506 | 639 |
| HSSTROL3_T8 (SEQ ID NO: 86) | 506 | 639 |
| HSSTROL3_T9 (SEQ ID NO: 87) | 506 | 639 |
| HSSTROL3_T10 (SEQ ID NO: 88) | 506 | 639 |
| HSSTROL3_T11 (SEQ ID NO: 505) | 506 | 639 |
| HSSTROL3_T12 (SEQ ID NO: 506) | 458 | 591 |

[2542] Segment cluster HSSTROL3_node_{—}19 (SEQ ID NO:511) according to the present invention is supported by 63 libraries. The number of libraries was determined as previously described. This segment can be found in the following transcript(s): HSSTROL3_T5 (SEQ ID NO:85), HSSTROL3_T8 (SEQ ID NO:86), HSSTROL3_T9 (SEQ ID NO:87), HSSTROL3_T10 (SEQ ID NO:88), HSSTROL3_T11 (SEQ ID NO:505) and HSSTROL3_T12 (SEQ ID NO:506). Table 21 below describes the starting and ending position of this segment on each transcript.

TABLE 21
Segment location on transcripts

| | Segment | Segment |
|---|---|---|
| Transcript name | starting position | ending position |
| HSSTROL3_T5 (SEQ ID NO: 85) | 699 | 881 |
| HSSTROL3_T8 (SEQ ID NO: 86) | 699 | 881 |
| HSSTROL3_T9 (SEQ ID NO: 87) | 699 | 881 |
| HSSTROL3_T10 (SEQ ID NO: 88) | 699 | 881 |
| HSSTROL3_T11 (SEQ ID NO: 505) | 699 | 881 |
| HSSTROL3_T12 (SEQ ID NO: 506) | 651 | 833 |

[2543] Segment cluster HSSTROL3_node_{—}21 (SEQ ID NO:512) according to the present invention is supported by 61 libraries. The number of libraries was determined as previously described. This segment can be found in the following transcript(s): HSSTROL3_T5 (SEQ ID NO:85), HSSTROL3_T8 (SEQ ID NO:86), HSSTROL3_T9 (SEQ ID NO:87), HSSTROL3_T10 (SEQ ID NO:88), HSSTROL3_T11 (SEQ ID NO:505) and HSSTROL3_T12 (SEQ ID NO:506). Table 22 below describes the starting and ending position of this segment on each transcript.

TABLE 22
Segment location on transcripts

| | Segment | Segment |
|---|---|---|
| Transcript name | starting position | ending position |
| HSSTROL3_T5 (SEQ ID NO: 85) | 882 | 1098 |
| HSSTROL3_T8 (SEQ ID NO: 86) | 882 | 1098 |
| HSSTROL3_T9 (SEQ ID NO: 87) | 882 | 1098 |
| HSSTROL3_T10 (SEQ ID NO: 88) | 882 | 1098 |
| HSSTROL3_T11 (SEQ ID NO: 505) | 974 | 1190 |
| HSSTROL3_T12 (SEQ ID NO: 506) | 834 | 1050 |

[2544] Segment cluster HSSTROL3_node_{—}24 (SEQ ID NO:513) according to the present invention is supported by 7 libraries. The number of libraries was determined as previously described. This segment can be found in the following transcript(s): HSSTROL3_T8 (SEQ ID NO:86) and HSSTROL3_T9 (SEQ ID NO:87). Table 23 below describes the starting and ending position of this segment on each transcript.

TABLE 23
Segment location on transcripts

| | Segment | Segment |
|---|---|---|
| Transcript name | starting position | ending position |
| HSSTROL3_T8 (SEQ ID NO: 86) | 1099 | 1236 |
| HSSTROL3_T9 (SEQ ID NO: 87) | 1099 | 1236 |

[2545] Segment cluster HSSTROL3_node_{—}25 (SEQ ID NO:514) according to the present invention is supported by 13 libraries. The number of libraries was determined as previously described. This segment can be found in the following transcript(s): HSSTROL3_T8 (SEQ ID NO:86). Table 24 below describes the starting and ending position of this segment on each transcript.

TABLE 24
Segment location on transcripts

| | Segment | Segment |
|---|---|---|
| Transcript name | starting position | ending position |
| HSSTROL3_T8 (SEQ ID NO: 86) | 1237 | 1536 |

[2546] Segment cluster HSSTROL3_node_{—}26 (SEQ ID NO: 515) according to the present invention is supported by 55 libraries. The number of libraries was determined as previously described. This segment can be found in the following transcript(s): HSSTROL3_T5 (SEQ ID NO:85), HSSTROL3_T8 (SEQ ID NO:86), HSSTROL3_T9 (SEQ ID NO:87) and HSSTROL3_T11 (SEQ ID NO:505). Table 25 below describes the starting and ending position of this segment on each transcript.

TABLE 25
Segment location on transcripts

| | Segment | Segment |
|---|---|---|
| Transcript name | starting position | ending position |
| HSSTROL3_T5 (SEQ ID NO: 85) | 1099 | 1240 |
| HSSTROL3_T8 (SEQ ID NO: 86) | 1537 | 1678 |
| HSSTROL3_T9 (SEQ ID NO: 87) | 1237 | 1378 |
| HSSTROL3_T11 (SEQ ID NO: 505) | 1191 | 1332 |

[2547] Segment cluster HSSTROL3_node_{—}28 (SEQ ID NO:516) according to the present invention is supported by 10 libraries. The number of libraries was determined as previously described. This segment can be found in the following transcript(s): HSSTROL3_T5 (SEQ ID NO:85), HSSTROL3_T9 (SEQ ID NO:87) and HSSTROL3_T10 (SEQ ID NO:88). Table 26 below describes the starting and ending position of this segment on each transcript.

TABLE 26
Segment location on transcripts

| | Segment | Segment |
|---|---|---|
| Transcript name | starting position | ending position |
| HSSTROL3_T5 (SEQ ID NO: 85) | 1357 | 2283 |
| HSSTROL3_T9 (SEQ ID NO: 87) | 1495 | 2421 |
| HSSTROL3_T10 (SEQ ID NO: 88) | 1215 | 2141 |

[2548] Segment cluster HSSTROL3_node_{—}29 (SEQ ID NO:517) according to the present invention is supported by 109 libraries. The number of libraries was determined as previously described. This segment can be found in the following transcript(s): HSSTROL3_T5 (SEQ ID NO:85), HSSTROL3_T8 (SEQ ID NO:86), HSSTROL3_T9 (SEQ ID NO:87), HSSTROL3_T10 (SEQ ID NO:88), HSSTROL3_T11 (SEQ ID NO:505) and HSSTROL3_T12 (SEQ ID NO:506). Table 27 below describes the starting and ending position of this segment on each transcript.

TABLE 27
Segment location on transcripts

| | Segment | Segment |
|---|---|---|
| Transcript name | starting position | ending position |
| HSSTROL3_T5 (SEQ ID NO: 85) | 2284 | 3194 |
| HSSTROL3_T8 (SEQ ID NO: 86) | 1795 | 2705 |
| HSSTROL3_T9 (SEQ ID NO: 87) | 2422 | 3332 |
| HSSTROL3_T10 (SEQ ID NO: 88) | 2142 | 3052 |
| HSSTROL3_T11 (SEQ ID NO: 505) | 1449 | 2359 |
| HSSTROL3_T12 (SEQ ID NO: 506) | 1167 | 2077 |

[2549] According to an optional embodiment of the present invention, short segments related to the above cluster are also provided. These segments are up to about 120 bp in length, and so are included in a separate description.

[2550] Segment cluster HSSTROL3_node_{—}11 (SEQ ID NO:518) according to the present invention is supported by 25 libraries. The number of libraries was determined as previously described. This segment can be found in the following transcript(s): HSSTROL3_T5 (SEQ ID NO:85), HSSTROL3_T8 (SEQ ID NO:86), HSSTROL3_T9 (SEQ ID NO:87), HSSTROL3_T10 (SEQ ID NO:88) and HSSTROL3_T11 (SEQ ID NO:505). Table 28 below describes the starting and ending position of this segment on each transcript.

TABLE 28
Segment location on transcripts

| | Segment | Segment |
|---|---|---|
| Transcript name | starting position | ending position |
| HSSTROL3_T5 (SEQ ID NO: 85) | 314 | 361 |
| HSSTROL3_T8 (SEQ ID NO: 86) | 314 | 361 |
| HSSTROL3_T9 (SEQ ID NO: 87) | 314 | 361 |
| HSSTROL3_T10 (SEQ ID NO: 88) | 314 | 361 |
| HSSTROL3_T11 (SEQ ID NO: 505) | 314 | 361 |

[2551] Segment cluster HSSTROL3_node_{—}17 (SEQ ID NO:519) according to the present invention is supported by 45 libraries. The number of libraries was determined as previously described. This segment can be found in the following transcript(s): HSSTROL3_T5 (SEQ ID NO:85), HSSTROL3_T8 (SEQ ID NO:86), HSSTROL3_T9 (SEQ ID NO:87), HSSTROL3_T10 (SEQ ID NO:88), HSSTROL3_T11 (SEQ ID NO:505) and HSSTROL3_T12 (SEQ ID NO:506). Table 29 below describes the starting and ending position of this segment on each transcript.

TABLE 29
Segment location on transcripts

| | Segment | Segment |
|---|---|---|
| Transcript name | starting position | ending position |
| HSSTROL3_T5 (SEQ ID NO: 85) | 640 | 680 |
| HSSTROL3_T8 (SEQ ID NO: 86) | 640 | 680 |
| HSSTROL3_T9 (SEQ ID NO: 87) | 640 | 680 |
| HSSTROL3_T10 (SEQ ID NO: 88) | 640 | 680 |
| HSSTROL3_T11 (SEQ ID NO: 505) | 640 | 680 |
| HSSTROL3_T12 (SEQ ID NO: 506) | 592 | 632 |

[2552] Segment cluster HSSTROL3_node_{—}18 (SEQ ID NO:520) according to the present invention can be found in the following transcript(s): HSSTROL3_T5 (SEQ ID NO:85), HSSTROL3_T8 (SEQ ID NO:86), HSSTROL3_T9 (SEQ ID NO:87), HSSTROL3_T10 (SEQ ID NO:88), HSSTROL3_T11 (SEQ ID NO:505) and HSSTROL3_T12 (SEQ ID NO:506). Table 30 below describes the starting and ending position of this segment on each transcript.

TABLE 30
Segment location on transcripts

| | Segment | Segment |
|---|---|---|
| Transcript name | starting position | ending position |
| HSSTROL3_T5 (SEQ ID NO: 85) | 681 | 698 |
| HSSTROL3_T8 (SEQ ID NO: 86) | 681 | 698 |
| HSSTROL3_T9 (SEQ ID NO: 87) | 681 | 698 |
| HSSTROL3_T10 (SEQ ID NO: 88) | 681 | 698 |
| HSSTROL3_T11 (SEQ ID NO: 505) | 681 | 698 |
| HSSTROL3_T12 (SEQ ID NO: 506) | 633 | 650 |

[2553] Segment cluster HSSTROL3_node_{—}20 (SEQ ID NO:521) according to the present invention is supported by 1 libraries. The number of libraries was determined as previously described. This segment can be found in the following transcript(s): HSSTROL3_T11 (SEQ ID NO:505). Table 31 below describes the starting and ending position of this segment on each transcript.

TABLE 31
Segment location on transcripts

| | Segment | Segment |
|---|---|---|
| Transcript name | starting position | ending position |
| HSSTROL3_T11 (SEQ ID NO: 505) | 882 | 973 |

[2554] Segment cluster HSSTROL3_node_{—}27 (SEQ ID NO:522) according to the present invention is supported by 50 libraries. The number of libraries was determined as previously described. This segment can be found in the following transcript(s): HSSTROL3_T5 (SEQ ID NO:85), HSSTROL3_T8 (SEQ ID NO:86), HSSTROL3_T9 (SEQ ID NO:87), HSSTROL3_T10 (SEQ ID NO:88), HSSTROL3_T11 (SEQ ID NO:505) and HSSTROL3_T12 (SEQ ID NO:506). Table 32 below describes the starting and ending position of this segment on each transcript.

TABLE 32
Segment location on transcripts

| | Segment | Segment |
|---|---|---|
| Transcript name | starting position | ending position |
| HSSTROL3_T5 (SEQ ID NO: 85) | 1241 | 1356 |
| HSSTROL3_T8 (SEQ ID NO: 86) | 1679 | 1794 |
| HSSTROL3_T9 (SEQ ID NO: 87) | 1379 | 1494 |
| HSSTROL3_T10 (SEQ ID NO: 88) | 1099 | 1214 |
| HSSTROL3_T11 (SEQ ID NO: 505) | 1333 | 1448 |
| HSSTROL3_T12 (SEQ ID NO: 506) | 1051 | 1166 |

### Variant Protein Alignment to the Previously Known Protein:

Sequence name: MM11_HUMAN (SEQ ID NO:523)
Sequence documentation:
Alignment of: HSSTROL3_P4 (SEQ ID NO:524) × M11_HUMAN (SEQ ID NO:523) ..
Alignment segment 1/1:

| | | | |
|---|---|---|---|
| Quality: | 4444.00 | Escore: | 0 |
| Matching length: | 445 | Total length: | 445 |
| Matching Percent Similarity: | 99.78 | Matching Percent Identity: | 99.78 |
| Total Percent Similarity: | 99.78 | Total Percent Identity: | 99.78 |
| Gaps: | 0 | | |
| Alignment: | | | |

[chemical structure]

[chemical structure]

[chemical structure]

[chemical structure]

[chemical structure]

[chemical structure]

[chemical structure]

[chemical structure]

[chemical structure]

Sequence name: MM11_HUMAN (SEQ ID NO:523)
Sequence documentation:
Alignment of: HSSTROL3_P5 (SEQ ID NO:525) × MM11_HUMAN (SEQ ID NO:523) ..
Alignment segment 1/1:

| | | | |
|---|---|---|---|
| Quality: | 3566.00 | Escore: | 0 |
| Matching length: | 358 | Total length: | 358 |
| Matching Percent Similarity: | 99.72 | Matching Percent Identity: | 99.72 |
| Total Percent Similarity: | 99.72 | Total Percent Identity: | 99.72 |
| Gaps: | 0 | | |
| Alignment: | | | |

[chemical structure]

[chemical structure]

[chemical structure]

[chemical structure]

[chemical structure]

[chemical structure]

[chemical structure]

[chemical structure]

Sequence name: MM11_HUMAN (SEQ ID NO:523)
Sequence documentation:
Alignment of: HSSTROL3_P7 (SEQ ID NO:526) × MM11_HUMAN (SEQ ID NO:523) ..
Alignment segment 1/1:

| | | | |
|---|---|---|---|
| Quality: | 3575.00 | Escore: | 0 |
| Matching length: | 359 | Total length: | 359 |
| Matching Percent Similarity: | 99.72 | Matching Percent Identity: | 99.72 |
| Total Percent Similarity: | 99.72 | Total Percent Identity: | 99.72 |
| Gaps: | 0 | | |
| Alignment: | | | |

[chemical structure]

[chemical structure]

[chemical structure]

[chemical structure]

[chemical structure]

[chemical structure]

[chemical structure]

[chemical structure]

Sequence name: MM11_HUMAN (SEQ ID NO:523)
Sequence documentation:
Alignment of: HSSTROL3_P8 (SEQ ID NO:527) × MM11_HUMAN (SEQ ID NO:523) ..
Alignment segment 1/1:

| | | | |
|---|---|---|---|
| Quality: | 2838.00 | Escore: | 0 |
| Matching length: | 286 | Total length: | 286 |
| Matching Percent Similarity: | 99.65 | Matching Percent Identity: | 99.65 |
| Total Percent Similarity: | 99.65 | Total Percent Identity: | 99.65 |
| Gaps: | 0 | | |
| Alignment: | | | |

[chemical structure]

[chemical structure]

[chemical structure]

[chemical structure]

[chemical structure]

[chemical structure]

Sequence name: MM11_HUMAN (SEQ ID NO:523)
Sequence documentation:
Alignment of: HSSTROL3_P9 (SEQ ID NO:528) × MM11_HUMAN (SEQ ID NO:523) ..
Alignment segment 1/1:

| | | | |
|---|---|---|---|
| Quality: | 3316.00 | Escore: | 0 |
| Matching length: | 343 | Total length: | 359 |
| Matching Percent Similarity: | 99.71 | Matching Percent Identity: | 99.71 |
| Total Percent Similarity: | 95.26 | Total Percent Identity: | 95.26 |
| Gaps: | 1 | | |
| Alignment: | | | |

[chemical structure]

[chemical structure]

[chemical structure]

[chemical structure]

[chemical structure]

[chemical structure]

[chemical structure]

[chemical structure]

### Expression of Homo sapiens Matrix Metalloproteinase 11 (Stromelysin 3) (MMP11) HSSTROL3 Transcripts which are Detectable by Amplicon as Depicted in Sequence Name HSSTROL3 junc21-27 (SEQ ID NO:1312) in Normal and Cancerous Colon Tissues

[2556] Expression of Homo sapiens matrix metalloproteinase 11 (stromelysin 3) (MMP11) transcripts detectable by or according to junc21-27, HSSTROL3 junc21-27 amplicon (SEQ ID NO:1312) and primers HSSTROL3 junc21-27F (SEQ ID NO:1310) and HSSTROL3 junc21-27R (SEQ ID NO:1311) was measured by real time PCR. In parallel the expression of four housekeeping genes —PBGD (GenBank Accession No. BC019323 (SEQ ID NO:1576); amplicon—PBGD-amplicon, SEQ ID NO:531), HPRT1 (GenBank Accession No. NM_{—}000194 (SEQ ID NO:1577); amplicon—HPRT1-amplicon, SEQ ID NO:612), G6PD (GenBank Accession No. NM_{—}000402 (SEQ ID NO:1578); HPRT1-amplicon, SEQ ID NO:615), RPS27A (GenBank Accession No. NM_{—}002954 (SEQ ID NO:1579); RPS27A amplicon, SEQ ID NO:1261), was measured similarly. For each RT sample, the expression of the above amplicon was normalized to the geometric mean of the quantities of the housekeeping genes. The normalized quantity of each RT sample was then divided by the median of the quantities of the normal post-mortem (PM) samples (Sample Nos. 41, 52, 62-67, 69-71, Table 1, above, “Tissue samples in testing panel”), to obtain a value of fold up-regulation for each sample relative to median of the normal PM samples.

[2557] FIG. 73 is a histogram showing over expression of the above-indicated Homo sapiens matrix metalloproteinase 11 (stromelysin 3) (MMP11) transcripts in cancerous colon samples relative to the normal samples.

[2558] As is evident from FIG. 73, the expression of Homo sapiens matrix metalloproteinase 11 (stromelysin 3) (MMP11) transcripts detectable by the above amplicon(s) in cancer samples was higher than in the non-cancerous samples (Sample Nos. 41, 52, 62-67, 69-71 Table 1, “Tissue samples in testing panel”). Notably an over-expression of at least 6 fold was found in 14 out of 36 adenocarcinoma samples.

[2559] Primer pairs are also optionally and preferably encompassed within the present invention; for example, for the above experiment, the following primer pair was used as a non-limiting illustrative example only of a suitable primer pair: HSSTROL3 junc21-27F forward primer (SEQ ID NO:1310); and HSSTROL3 junc21-27R reverse primer (SEQ ID NO:1311).

[2560] The present invention also preferably encompasses any amplicon obtained through the use of any suitable primer pair; for example, for the above experiment, the following amplicon was obtained as a non-limiting illustrative example only of a suitable amplicon: HSSTROL3 junc21-27 (SEQ ID NO:1312).

Primers:
Forward primer HSSTROL3 junc21-27F (SEQ ID NO:
1310):
ACATTTGGTTCTTCCAAGGGACTAC
Reverse primer HSSTROL3 junc21-27R (SEQ ID NO:
1311):
TCGATCTCAGAGGGCACCC
Amplicon HSSTROL3 junc21-27 (SEQ ID NO:1312):
ACATTTGGTTCTTCCAAGGGACTACTGGCGTTTCCACCCCAGCACCCGGC
GTGTAGACAGTCCCGTGCCCCGCAGGGCCACTGACTGGAGAGGGGTGCCC
TCTGAGATCGA

### Expression of Homo sapiens Matrix Metalloproteinase 11 (Stromelysin 3) (MMP11) HSSTROL3 Transcripts which are Detectable by Amplicon as Depicted in Sequence Name HSSTROL3 Seg25 (SEQ ID NO: 1315) in Normal and Cancerous Colon Tissues

[2561] Expression of Homo sapiens matrix metalloproteinase 11 (stromelysin 3) (MMP11) transcripts detectable by or according to seg25, amplicon (SEQ ID NO: 1315) and primers HSSTROL3 seg25F (SEQ ID NO: 1313) and HSSTROL3 seg25R (SEQ ID NO: 1314) was measured by real time PCR. In parallel the expression of four housekeeping genes —PBGD (GenBank Accession No. BC019323 (SEQ ID NO:1576); amplicon—PBGD-amplicon, SEQ ID NO:531), HPRT1 (GenBank Accession No. NM_{—}000194 (SEQ ID NO:1577); amplicon —HPRT1-amplicon, SEQ ID NO:612), G6PD (GenBank Accession No. NM_{—}000402 (SEQ ID NO:1578); HPRT1-amplicon, SEQ ID NO:615), RPS27A (GenBank Accession No. NM_{—}002954 (SEQ ID NO:1579); RPS27A amplicon, SEQ ID NO:1261), was measured similarly. For each RT sample, the expression of the above amplicon was normalized to the geometric mean of the quantities of the housekeeping genes. The normalized quantity of each RT sample was then divided by the median of the quantities of the normal post-mortem (PM) samples (Sample Nos. 41, 52, 62-67, 69-71, Table 1, “Tissue samples in testing panel”, above), to obtain a value of fold up-regulation for each sample relative to median of the normal PM samples.

[2562] FIG. 74 is a histogram showing over expression of the above-indicated Homo sapiens matrix metalloproteinase 11 (stromelysin 3) (MMP11) transcripts in cancerous colon samples relative to the normal samples.

[2563] As is evident from FIG. 74, the expression of Homo sapiens matrix metalloproteinase 11 (stromelysin 3) (MMP11) transcripts detectable by the above amplicon(s) was higher in a few cancer samples than in the non-cancerous samples (Sample Nos. 41, 52, 62-67, 69-71 Table 1, “Tissue samples in testing panel”). Notably an over-expression of at least 5 fold was found in 5 out of 36 adenocarcinoma samples.

[2564] Primer pairs are also optionally and preferably encompassed within the present invention; for example, for the above experiment, the following primer pair was used as a non-limiting illustrative example only of a suitable primer pair: HSSTROL3 seg25F forward primer (SEQ ID NO: 1313); and HSSTROL3 seg25R reverse primer (SEQ ID NO: 1314).

[2565] The present invention also preferably encompasses any amplicon obtained through the use of any suitable primer pair; for example, for the above experiment, the following amplicon was obtained as a non-limiting illustrative example only of a suitable amplicon: HSSTROL3 seg25 (SEQ ID NO: 1315).

Primers:
Forward primer HSSTROL3 seg25F (SEQ ID NO: 1313):
CACTGCCCCAGCTTATGCC
Reverse primer HSSTROL3 seg25R (SEQ ID NO: 1314):
CTCTCCCAGCCTCAGTTTCCT
Amplicon HSSTROL3 seg25 (SEQ ID NO: 1315):
CACTGCCCCAGCTTATCCCAGGCCTCCCGCTTCCCTCTGCGGGTGGGGTG
CTGAGCAGGCATTATTGGCCTGCATGTTTTACTGATGAGGAAACTGAGGC
TGGGAGAG

### Expression of Homo sapiens Matrix Metalloproteinase 11 (Stromelysin 3) (MMP11) HSSTROL3 Transcripts which are Detectable by Amplicon as Depicted in Sequence Name HSSTROL3 Seg24 (SEQ ID NO: 1318) in Normal and Cancerous Colon Tissues

[2566] Expression of Homo sapiens matrix metalloproteinase 11 (stromelysin 3) (MMP11) transcripts detectable by or according to seg24, HSSTROL3 seg24 amplicon (SEQ ID NO: 1318) and primers HSSTROL3 seg24F (SEQ ID NO: 1316) and HSSTROL3 seg24R (SEQ ID NO: 1317) was measured by real time PCR. In parallel the expression of four housekeeping genes —PBGD (GenBank Accession No. BC019323 (SEQ ID NO:1576); amplicon —PBGD-amplicon, SEQ ID NO: 531), HPRT1 (GenBank Accession No. NM_{—}000194 (SEQ ID NO:1577); amplicon—HPRT1-amplicon, SEQ ID NO: 612), G6PD (GenBank Accession No. NM_{—}000402 (SEQ ID NO:1578); G6PD amplicon, SEQ ID NO:615), RPS27A (GenBank Accession No. NM_{—}002954 (SEQ ID NO:1579); RPS27A amplicon, SEQ ID NO: 1261), was measured similarly. For each RT sample, the expression of the above amplicon was normalized to the geometric mean of the quantities of the housekeeping genes. The normalized quantity of each RT sample was then divided by the median of the quantities of the normal post-mortem (PM) samples (Sample Nos. 41, 52, 62-67, 69-71, Table 1, above, “Tissue samples in testing panel”), to obtain a value of fold differential expression for each sample relative to median of the normal PM samples.

[2567] In one experiment that was carried out no differential expression in the cancerous samples relative to the normal PM samples was observed.

[2568] Primer pairs are also optionally and preferably encompassed within the present invention; for example, for the above experiment, the following primer pair was used as a non-limiting illustrative example only of a suitable primer pair: HSSTROL3 seg24F forward primer (SEQ ID NO: 1316); and HSSTROL3 seg24R reverse primer (SEQ ID NO: 1317).

[2569] The present invention also preferably encompasses any amplicon obtained through the use of any suitable primer pair; for example, for the above experiment, the following amplicon was obtained as a non-limiting illustrative example only of a suitable amplicon: HSSTROL3 seg24 (SEQ ID NO: 1318).

Primers:
Forward primer HSSTROL3 seg24F (SEQ ID NO: 1316):
ATTTCCATCCTCAACTGGCAGA
Reverse primer HSSTROL3 seg24R (SEQ ID NO: 1317):
TGCCCTGGAACCCACG
Amp1icon HSSTROL3 seg24 (SEQ ID NO: 1318):
ATTTCCATCCTCAACTGGCAGAGATGAGAGCCTGGAGCATTGCAGATGCC
AGGGACTTCACAAATGAAGGCACAGCATGGGAAACCTGCGTGGGTTCCAG
GGCA

### Expression of Stromelysin-3 Precursor (Matrix Metalloproteinase-11) (MMP-11) (ST3) (SL-3) HSSTROL3 Transcripts which are Detectable by Amplicon as Depicted in Sequence Name HSSTROL3 Seg24 (SEQ ID NO: 1318) in Different Normal Tissues

[2570] Expression of Stromelysin-3 precursor (EC 3.4.24.-) (Matrix metalloproteinase-11) (MMP-11) (ST3) (SL-3 transcripts detectable by or according to HSSTROL3 seg24 amplicon (SEQ ID NO: 1318) and HSSTROL3 seg24F (SEQ ID NO: 1316) and HSSTROL3 seg24R (SEQ ID NO: 1317) was measured by real time PCR. In parallel the expression of four housekeeping genes UBC (GenBank Accession No. BC000449 (SEQ ID NO:1582); amplicon—Ubiquitin-amplicon, SEQ ID NO: 1270) and SDHA (GenBank Accession No. NM_{—}004168 (SEQ ID NO:1583); amplicon—SDHA-amplicon, SEQ ID NO: 1273), RPL19 (GenBank Accession No. NM_{—}000981 (SEQ ID NO:1580); RPL19 amplicon, SEQ ID NO: 1264), TATA box (GenBank Accession No. NM_{—}003194 (SEQ ID NO:1581); TATA amplicon, SEQ ID NO: 1267) was measured similarly. For each RT sample, the expression of the above amplicon was normalized to the geometric mean of the quantities of the housekeeping genes. The normalized quantity of each RT sample was then divided by the median of the quantities of the lung samples (Sample Nos. 15-17 above), to obtain a value of relative expression of each sample relative to median of the lung samples.

Primers:
Forward primer HSSTROL3 seg24F (SEQ ID NO: 1316):
ATTTCCATCCTCAACTGGCAGA
Reverse primer HSSTROL3 seg24R (SEQ ID NO: 1317):
TGCCCTGGAACCCACG
Amplicon HSSTROL3 seg24 (SEQ ID NO: 1318):
ATTTCCATCCTCAACTGGCAGAGATGAGAGCCTGGAGCATTGCAGATGCC
AGGGACTTCACAAATGAAGGCACAGCATGGGAAACCTGCGTGGGTTCCAG
GGCA

The results are presented in FIG. 76, showing the expression of Stromelysin-3 HSSTROL3 transcripts which are detectable by amplicon as depicted in sequence name HSSTROL3 seg24 in different normal tissues.

### Description for Cluster AA583399

[2571] Cluster AA583399 features 16 transcript(s) and 20 segment(s) of interest, the names for which are given in Tables 1 and 2, respectively, the sequences themselves are given at the end of the application. The selected protein variants are given in table 3.

TABLE 1
Transcripts of interest

| Transcript name | SEQ ID NO: |
|---|---|
| AA583399_PEA_1_T0 | 643 |
| AA583399_PEA_1_T1 | 644 |
| AA583399_PEA_1_T2 | 645 |
| AA583399_PEA_1_T3 | 646 |
| AA583399_PEA_1_T4 | 647 |
| AA583399_PEA_1_T5 | 648 |
| AA583399_PEA_1_T6 | 649 |
| AA583399_PEA_1_T7 | 650 |
| AA583399_PEA_1_T8 | 651 |
| AA583399_PEA_1_T9 | 652 |
| AA583399_PEA_1_T10 | 653 |
| AA583399_PEA_1_T11 | 654 |
| AA583399_PEA_1_T12 | 655 |
| AA583399_PEA_1_T15 | 656 |
| AA583399_PEA_1_T16 | 657 |
| AA583399_PEA_1_T17 | 658 |

TABLE 2
Segments of interest

| Segment Name | SEQ ID NO: |
|---|---|
| AA583399_PEA_1_node_0 | 659 |
| AA583399_PEA_1_node_3 | 660 |
| AA583399_PEA_1_node_9 | 661 |
| AA583399_PEA_1_node_10 | 662 |
| AA583399_PEA_1_node_12 | 663 |
| AA583399_PEA_1_node_14 | 664 |
| AA583399_PEA_1_node_21 | 665 |
| AA583399_PEA_1_node_24 | 666 |
| AA583399_PEA_1_node_25 | 667 |
| AA583399_PEA_1_node_29 | 668 |
| AA583399_PEA_1_node_1 | 669 |
| AA583399_PEA_1_node_2 | 670 |
| AA583399_PEA_1_node_4 | 671 |
| AA583399_PEA_1_node_5 | 672 |
| AA583399_PEA_1_node_6 | 673 |
| AA583399_PEA_1_node_7 | 674 |
| AA583399_PEA_1_node_8 | 675 |
| AA583399_PEA_1_node_11 | 676 |
| AA583399_PEA_1_node_19 | 677 |
| AA583399_PEA_1_node_27 | 678 |

TABLE 3
Proteins of interest

| Protein Name | SEQ ID NO: | Corresponding Transcript(s) |
|---|---|---|
| AA583399_PEA_1_P3 | 683 | AA583399_PEA_1_T1 (SEQ ID NO: 644); |
| | | AA583399_PEA_1_T6 (SEQ ID NO: 649); |
| | | AA583399_PEA_1_T9 (SEQ ID NO: 652) |
| AA583399_PEA_1_P2 | 684 | AA583399_PEA_1_T3 (SEQ ID NO: 646); |
| | | AA583399_PEA_1_T4 (SEQ ID NO: 647); |
| | | AA583399_PEA_1_T5 (SEQ ID NO: 648) |
| AA583399_PEA_1_P4 | 685 | AA583399_PEA_1_T7 (SEQ ID NO: 650) |
| AA583399_PEA_1_P5 | 686 | AA583399_PEA_1_T8 (SEQ ID NO: 651) |
| AA583399_PEA_1_P6 | 687 | AA583399_PEA_1_T12 (SEQ ID NO: 655); |
| | | AA583399_PEA_1_T16 (SEQ ID NO: 657) |
| AA583399_PEA_1_P8 | 688 | AA583399_PEA_1_T17 (SEQ ID NO: 658) |
| AA583399_PEA_1_P10 | 689 | AA583399_PEA_1_T0 (SEQ ID NO: 643) |
| AA583399_PEA_1_P11 | 690 | AA583399_PEA_1_T2 (SEQ ID NO: 645) |
| AA583399_PEA_1_P12 | 691 | AA583399_PEA_1_T10 (SEQ ID NO: 653); |
| | | AA583399_PEA_1_T11 (SEQ ID NO: 654) |
| AA583399_PEA_1_P14 | 692 | AA583399_PEA_1_T15 (SEQ ID NO: 656) |

[2572] These sequences are variants of the known protein Myeloma overexpressed gene protein (SwissProt accession identifier MYEO_HUMAN; known also according to the synonyms Oncogene in multiple myeloma), SEQ ID NO: 679, referred to herein as the previously known protein.

[2573] The sequence for protein Myeloma overexpressed gene protein (SEQ ID NO:679) is given at the end of the application, as “Myeloma overexpressed gene protein amino acid sequence”. Known polymorphisms for this sequence are as shown in Table 4.

TABLE 4
Amino acid mutations for Known Protein

| SNP position(s) | |
|---|---|
| on amino | |
| acid sequence | Comment |
| 159 | A -> V (in dbSNP: 7103126). /FTId = VAR_016603. |
| 198 | R -> Q |
| 219 | V -> M |
| 271 | G -> R |

[2574] Cluster AA583399 can be used as a diagnostic marker according to overexpression of transcripts of this cluster in cancer. Expression of such transcripts in normal tissues is also given according to the previously described methods. The term “number” in the left hand column of the table and the numbers on the y-axis of the figure below refer to weighted expression of ESTs in each category, as “parts per million” (ratio of the expression of ESTs for a particular cluster to the expression of all ESTs in that category, according to parts per million).

[2575] Overall, the following results were obtained as shown with regard to the histograms in FIG. 40 and Table 5. This cluster is overexpressed (at least at a minimum level) in the following pathological conditions: brain malignant tumors, epithelial malignant tumors, a mixture of malignant tumors from different tissues and gastric carcinoma.

TABLE 5
Normal tissue distribution

| Name of Tissue | Number |
|---|---|
| bone | 32 |
| brain | 0 |
| colon | 0 |
| epithelial | 4 |
| general | 2 |
| kidney | 0 |
| liver | 0 |
| lung | 2 |
| lymph nodes | 0 |
| breast | 79 |
| ovary | 0 |
| pancreas | 0 |
| prostate | 0 |
| skin | 0 |
| stomach | 0 |

TABLE 6
P values and ratios for expression in cancerous tissue

| Name of Tissue | P1 | P2 | SP1 | R3 | SP2 | R4 |
|---|---|---|---|---|---|---|
| bone | 9.2e−01 | 5.8e−01 | 1 | 0.5 | 9.1e−01 | 0.8 |
| brain | 9.8e−01 | 1.4e−01 | 1 | 0.8 | 2.0e−09 | 11.1 |
| colon | 1.6e−01 | 7.3e−02 | 3.4e−01 | 2.5 | 2.7e−01 | 2.7 |
| epithelial | 3.0e−03 | 1.3e−04 | 1.1e−01 | 2.3 | 5.4e−06 | 4.1 |
| general | 1.1e−05 | 3.2e−10 | 2.0e−03 | 4.5 | 1.1e−17 | 10.7 |
| kidney | 6.5e−01 | 5.1e−01 | 1 | 1.1 | 7.0e−01 | 1.5 |
| liver | 1 | 1.3e−01 | 1 | 1.0 | 1.6e−01 | 2.2 |
| lung | 1.7e−01 | 2.7e−01 | 1.7e−01 | 3.5 | 2.4e−01 | 2.5 |
| lymph nodes | 1 | 5.7e−01 | 1 | 1.0 | 5.8e−01 | 1.7 |
| breast | 8.8e−01 | 8.6e−01 | 9.0e−01 | 0.5 | 8.5e−01 | 0.6 |
| ovary | 1.6e−01 | 1.9e−01 | 1 | 1.1 | 1 | 1.1 |
| pancreas | 3.3e−01 | 4.4e−01 | 4.2e−01 | 2.4 | 5.3e−01 | 1.9 |
| prostate | 1 | 7.8e−01 | 1 | 1.0 | 5.6e−01 | 1.7 |
| skin | 1 | 4.4e−01 | 1 | 1.0 | 6.4e−01 | 1.6 |
| stomach | 3.6e−01 | 1.3e−01 | 1 | 1.1 | 1.8e−03 | 3.8 |

[2576] As noted above, cluster AA583399 features 16 transcript(s), which were listed in Table 1 above. These transcript(s) encode for protein(s) which are variant(s) of protein Myeloma overexpressed gene protein (SEQ ID NO:679). A description of each variant protein according to the present invention is now provided.

[2577] Variant protein AA583399_PEA_{—}1_P3 (SEQ ID NO:683) according to the present invention has an amino acid sequence as given at the end of the application; it is encoded by transcript(s) AA583399_PEA_{—}1_T1 (SEQ ID NO:644). The location of the variant protein was determined according to results from a number of different software programs and analyses, including analyses from SignalP and other specialized programs. The variant protein is believed to be located as follows with regard to the cell: secreted. The protein localization is believed to be secreted because both signal-peptide prediction programs predict that this protein has a signal peptide. Variant protein AA583399_PEA_{—}1_P3 (SEQ ID NO:683) also has the following non-silent SNPs (Single Nucleotide Polymorphisms) as listed in Table 7, (given according to their position(s) on the amino acid sequence, with the alternative amino acid(s) listed; the last column indicates whether the SNP is known or not; the presence of known SNPs in variant protein AA583399_PEA_{—}1_P3 (SEQ ID NO:683) sequence provides support for the deduced sequence of this variant protein according to the present invention).

TABLE 7
Amino acid mutations

| SNP position(s) | | |
|---|---|---|
| on amino acid | Alternative | Previously |
| sequence | amino acid(s) | known SNP? |
| 159 | V -> A | Yes |
| 198 | R -> Q | Yes |
| 219 | M -> V | No |
| 271 | G -> R | Yes |
| 284 | P -> T | Yes |

[2578] Variant protein AA583399_PEA_{—}1_P3 (SEQ ID NO:683) is encoded by the following transcript(s): AA583399_PEA_{—}1_T1 (SEQ ID NO:644), for which the sequence(s) is/are given at the end of the application. The coding portion of transcript AA583399_PEA_{—}1_T1 (SEQ ID NO:644) is shown in bold; this coding portion starts at position 587 and ends at position 1525. The transcript also has the following SNPs as listed in Table 8 (given according to their position on the nucleotide sequence, with the alternative nucleic acid listed; the last column indicates whether the SNP is known or not; the presence of known SNPs in variant protein AA583399_PEA_{—}1_P3 (SEQ ID NO:683) sequence provides support for the deduced sequence of this variant protein according to the present invention).

TABLE 8
Nucleic acid SNPs

| SNP position | | |
|---|---|---|
| on nucleotide | Alternative | Previously |
| sequence | nucleic acid | known SNP? |
| 380 | A -> G | Yes |
| 805 | C -> T | Yes |
| 1062 | T -> C | Yes |
| 1179 | G -> A | Yes |
| 1241 | A -> G | No |
| 1397 | G -> C | Yes |
| 1436 | C -> A | Yes |
| 1653 | C -> T | No |
| 1657 | T -> G | No |

[2579] Variant protein AA583399_PEA_{—}1_P2 (SEQ ID NO:684) according to the present invention has an amino acid sequence as given at the end of the application; it is encoded by transcript(s) AA583399_PEA_{—}1_T3 (SEQ ID NO:646). An alignment is given to the known protein (Myeloma overexpressed gene protein (SEQ ID NO:679)) at the end of the application. One or more alignments to one or more previously published protein sequences are given at the end of the application. A brief description of the relationship of the variant protein according to the present invention to each such aligned protein is as follows:

[2580] Comparison Report Between AA583399_PEA_{—}1_P2 (SEQ ID NO:684) and MYEO_HUMAN_V1 (SEQ ID NO: 680):

[2581] 1. An isolated chimeric polypeptide encoding for AA583399_PEA_{—}1_P2 (SEQ ID NO:684), comprising a first amino acid sequence being at least 90% homologous to MFTRQAGHFVEGSKAGRSRGRLCLSQALRVAVRGAFVSLWFAAGAGDRERNKGDKGAQTGAGLSQEAE DVDVSRARRVTDAPQGTLCGTGNRNSGSQSARVVGVAHLGEAFRVGVEQAISSCPEEVHGRHGLSMEIM WARMDVALRSPGRGLLAGAGALCMTLAESSCPDYERGRRACLTLHRHPTPHCSTWGLPLRVAGSWLTV VTVEALGGWRMGVRRTGQVGPTMHPPPVSGASPLLLHHLLLLLLIIILTC corresponding to amino acids 59-313 of MYEO_HUMAN_V1 (SEQ ID NO:680), which also corresponds to amino acids 1-255 of AA583399_PEA_{—}1_P2 (SEQ ID NO:684).

[2582] It should be noted that the known protein sequence (MYEO_HUMAN (SEQ ID NO:679)) has one or more changes than the sequence given at the end of the application and named as being the amino acid sequence for MYEO_HUMAN_V1 (SEQ ID NO:680). These changes were previously known to occur and are listed in the table below.

TABLE 9
Changes to MYEO_HUMAN_V1 (SEQ ID NO: 680)

| SNP position(s) on amino | |
|---|---|
| acid sequence | Type of change |
| 160 | variant |
| 220 | conflict |

[2583] The location of the variant protein was determined according to results from a number of different software programs and analyses, including analyses from SignalP and other specialized programs. The variant protein is believed to be located as follows with regard to the cell: secreted. The protein localization is believed to be secreted because one of the two signal-peptide prediction programs (HMM:Signal peptide,NN:NO) predicts that this protein has a signal peptide.

[2584] Variant protein AA583399_PEA_{—}1_P2 (SEQ ID NO:684) is encoded by the following transcript(s): AA583399_PEA_{—}1_T3 (SEQ ID NO:646), for which the sequence(s) is/are given at the end of the application. The coding portion of transcript AA583399_PEA_{—}1_T3 (SEQ ID NO:646) is shown in bold; this coding portion starts at position 689 and ends at position 1453. The transcript also has the following SNPs as listed in Table 10 (given according to their position on the nucleotide sequence, with the alternative nucleic acid listed; the last column indicates whether the SNP is known or not; the presence of known SNPs in variant protein AA583399_PEA_{—}1_P2 (SEQ ID NO:684) sequence provides support for the deduced sequence of this variant protein according to the present invention).

TABLE 10
Nucleic acid SNPs

| SNP position on | Alternative | Previously |
|---|---|---|
| nucleotide sequence | nucleic acid | known SNP? |
| 380 | A -> G | Yes |
| 733 | C -> T | Yes |
| 990 | T -> C | Yes |
| 1107 | G -> A | Yes |
| 1169 | A -> G | No |
| 1325 | G -> C | Yes |
| 1364 | C -> A | Yes |
| 1581 | C -> T | No |
| 1585 | T -> G | No |

[2585] Variant protein AA583399_PEA_{—}1_P4 (SEQ ID NO:685) according to the present invention has an amino acid sequence as given at the end of the application; it is encoded by transcript(s) AA583399_PEA_{—}1_T7 (SEQ ID NO:650). An alignment is given to the known protein (Myeloma overexpressed gene protein (SEQ ID NO:679)) at the end of the application. One or more alignments to one or more previously published protein sequences are given at the end of the application. A brief description of the relationship of the variant protein according to the present invention to each such aligned protein is as follows:

[2586] Comparison Report Between AA583399_PEA_{—}1_P4 (SEQ ID NO:685) and MYEO_HUMAN_V1 (SEQ ID NO:680):

[2587] 1. An isolated chimeric polypeptide encoding for AA583399_PEA_{—}1_P4 (SEQ ID NO:685), comprising a first amino acid sequence being at least 70%, optionally at least 80%, preferably at least 85%, more preferably at least 90% and most preferably at least 95% homologous to a polypeptide having the sequence MSDLFIGFLVCSLSPLGTGTRCSCSPG (SEQ ID NO:1479) corresponding to amino acids 1-27 of AA583399_PEA_{—}1_P4 (SEQ ID NO:685), and a second amino acid sequence being at least 90% homologous to RNSGSQSARVVGVAHLGEAFRVGVEQAISSCPEEVHGRHGLSMEIMWARMDVALRSPGRGLLAGAGALC MTLAESSCPDYERGRRACLTLHRHPTPHCSTWGLPLRVAGSWLTVVTVEALGGWRMGVRRTGQVGPTM HPPPVSGASPLLLHHLLLLLLIIILTC corresponding to amino acids 150-313 of MYEO_HUMAN_V1 (SEQ ID NO:680), which also corresponds to amino acids 28-191 of AA583399_PEA_{—}1_P4 (SEQ ID NO:685), wherein said first amino acid sequence and second amino acid sequence are contiguous and in a sequential order.

[2588] 2. An isolated polypeptide encoding for a head of AA583399_PEA_{—}1_P4 (SEQ ID NO:685), comprising a polypeptide being at least 70%, optionally at least about 80%, preferably at least about 85%, more preferably at least about 90% and most preferably at least about 95% homologous to the sequence MSDLFIGFLVCSLSPLGTGTRCSCSPG (SEQ ID NO:1479) of AA583399_PEA_{—}1_P4 (SEQ ID NO:685).

[2589] It should be noted that the known protein sequence (MYEO_HUMAN (SEQ ID NO:679)) has one or more changes than the sequence given at the end of the application and named as being the amino acid sequence for MYEO_HUMAN_V1 (SEQ ID NO:680). These changes were previously known to occur and are listed in the table below.

TABLE 11
Changes to MYEO_HUMAN_V1 (SEQ ID NO: 680)

| SNP position(s) on amino | |
|---|---|
| acid sequence | Type of change |
| 160 | variant |
| 220 | conflict |

[2590] The location of the variant protein was determined according to results from a number of different software programs and analyses, including analyses from SignalP and other specialized programs. The variant protein is believed to be located as follows with regard to the cell: secreted. The protein localization is believed to be secreted because both signal-peptide prediction programs predict that this protein has a signal peptide.

[2591] Variant protein AA583399_PEA_{—}1_P4 (SEQ ID NO:685) also has the following non-silent SNPs (Single Nucleotide Polymorphisms) as listed in Table 12, (given according to their position(s) on the amino acid sequence, with the alternative amino acid(s) listed; the last column indicates whether the SNP is known or not; the presence of known SNPs in variant protein AA583399_PEA_{—}1_P4 (SEQ ID NO:685) sequence provides support for the deduced sequence of this variant protein according to the present invention).

TABLE 12
Amino acid mutations

| SNP position(s) on | Alternative | Previously |
|---|---|---|
| amino acid sequence | amino acid(s) | known SNP? |
| 37 | V -> A | Yes |
| 76 | R -> Q | Yes |
| 97 | M -> V | No |
| 149 | G -> R | Yes |
| 162 | P -> T | Yes |

[2592] Variant protein AA583399_PEA_{—}1_P4 (SEQ ID NO:685) is encoded by the following transcript(s): AA583399_PEA_{—}1_T7 (SEQ ID NO:650), for which the sequence(s) is/are given at the end of the application. The coding portion of transcript AA583399_PEA_{—}1_T7 (SEQ ID NO:650) is shown in bold; this coding portion starts at position 789 and ends at position 1361. The transcript also has the following SNPs as listed in Table 13 (given according to their position on the nucleotide sequence, with the alternative nucleic acid listed; the last column indicates whether the SNP is known or not; the presence of known SNPs in variant protein AA583399_PEA_{—}1_P4 (SEQ ID NO:685) sequence provides support for the deduced sequence of this variant protein according to the present invention).

TABLE 13
Nucleic acid SNPs

| SNP position on | Alternative | Previously |
|---|---|---|
| nucleotide sequence | nucleic acid | known SNP? |
| 380 | A -> G | Yes |
| 898 | T -> C | Yes |
| 1015 | G -> A | Yes |
| 1077 | A -> G | No |
| 1233 | G -> C | Yes |
| 1272 | C -> A | Yes |
| 1489 | C -> T | No |
| 1493 | T -> G | No |

[2593] Variant protein AA583399_PEA_{—}1_P5 (SEQ ID NO:686) according to the present invention has an amino acid sequence as given at the end of the application; it is encoded by transcript(s) AA583399_PEA_{—}1_T8 (SEQ ID NO:651). An alignment is given to the known protein (Myeloma overexpressed gene protein (SEQ ID NO:679)) at the end of the application. One or more alignments to one or more previously published protein sequences are given at the end of the application. A brief description of the relationship of the variant protein according to the present invention to each such aligned protein is as follows:

[2594] Comparison Report Between AA583399_PEA_{—}1_P5 (SEQ ID NO:686) and MYEO_HUMAN_V2 (SEQ ID NO: 681):

[2595] 1. An isolated chimeric polypeptide encoding for AA583399_PEA_{—}1_P5 (SEQ ID NO:686), comprising a first amino acid sequence being at least 90% homologous to MEIMWARMDVALRSPGRGLLAGAGALCMTLAESSCPDYERGRRACLTLHRHPTPHCSTWGLPLRVAGS WLTVVTVEALGGWRMGVRRTGQVGPTMHPPPVSGASPLLLHHLLLLLLIIILTC corresponding to amino acids 192-313 of MYEO_HUMAN_V2 (SEQ ID NO:681), which also corresponds to amino acids 1-122 of AA583399_PEA_{—}1_P5 (SEQ ID NO:686).

[2596] It should be noted that the known protein sequence (MYEO_HUMAN (SEQ ID NO:679)) has one or more changes than the sequence given at the end of the application and named as being the amino acid sequence for MYEO_HUMAN_V2 (SEQ ID NO:681). These changes were previously known to occur and are listed in the table below.

TABLE 14
Changes to MYEO_HUMAN_V2 (SEQ ID NO: 681)

| SNP position(s) on amino | |
|---|---|
| acid sequence | Type of change |
| 220 | conflict |

[2597] The location of the variant protein was determined according to results from a number of different software programs and analyses, including analyses from SignalP and other specialized programs. The variant protein is believed to be located as follows with regard to the cell: secreted. The protein localization is believed to be secreted because one of the two signal-peptide prediction programs (HMM:Signal peptide,NN:NO) predicts that this protein has a signal peptide.

[2598] Variant protein AA583399_PEA_{—}1_P5 (SEQ ID NO:686) also has the following non-silent SNPs (Single Nucleotide Polymorphisms) as listed in Table 15, (given according to their position(s) on the amino acid sequence, with the alternative amino acid(s) listed; the last column indicates whether the SNP is known or not; the presence of known SNPs in variant protein AA583399_PEA_{—}1_P5 (SEQ ID NO:686) sequence provides support for the deduced sequence of this variant protein according to the present invention).

TABLE 15
Amino acid mutations

| SNP position(s) on | Alternative | Previously |
|---|---|---|
| amino acid sequence | amino acid(s) | known SNP? |
| 7 | R -> Q | Yes |
| 28 | M -> V | No |
| 80 | G -> R | Yes |
| 93 | P -> T | Yes |

[2599] Variant protein AA583399_PEA_{—}1_P5 (SEQ ID NO:686) is encoded by the following transcript(s): AA583399_PEA_{—}1_T8 (SEQ ID NO:651), for which the sequence(s) is/are given at the end of the application. The coding portion of transcript AA583399_PEA_{—}1_T8 (SEQ ID NO:651) is shown in bold; this coding portion starts at position 849 and ends at position 1214. The transcript also has the following SNPs as listed in Table 16 (given according to their position on the nucleotide sequence, with the alternative nucleic acid listed; the last column indicates whether the SNP is known or not; the presence of known SNPs in variant protein AA583399_PEA_{—}1_P5 (SEQ ID NO:686) sequence provides support for the deduced sequence of this variant protein according to the present invention).

TABLE 16
Nucleic acid SNPs

| SNP position on | Alternative | Previously |
|---|---|---|
| nucleotide sequence | nucleic acid | known SNP? |
| 380 | A -> G | Yes |
| 494 | C -> T | Yes |
| 751 | T -> C | Yes |
| 868 | G -> A | Yes |
| 930 | A -> G | No |
| 1086 | G -> C | Yes |
| 1125 | C -> A | Yes |
| 1342 | C -> T | No |
| 1346 | T -> G | No |

[2600] Variant protein AA583399_PEA_{—}1_P6 (SEQ ID NO:687) according to the present invention has an amino acid sequence as given at the end of the application; it is encoded by transcript(s) AA583399_PEA_{—}1_T12 (SEQ ID NO:655). The location of the variant protein was determined according to results from a number of different software programs and analyses, including analyses from SignalP and other specialized programs. The variant protein is believed to be located as follows with regard to the cell: intracellularly. The protein localization is believed to be intracellularly because neither of the trans-membrane region prediction programs predicted a trans-membrane region for this protein. In addition both signal-peptide prediction programs predict that this protein is a non-secreted protein.

[2601] Variant protein AA583399_PEA_{—}1_P6 (SEQ ID NO:687) is encoded by the following transcript(s): AA583399_PEA_{—}1_T12 (SEQ ID NO:655), for which the sequence(s) is/are given at the end of the application. The coding portion of transcript AA583399_PEA_{—}1_T12 (SEQ ID NO:655) is shown in bold; this coding portion starts at position 39 and ends at position 371. The transcript also has the following SNPs as listed in Table 17 (given according to their position on the nucleotide sequence, with the alternative nucleic acid listed; the last column indicates whether the SNP is known or not; the presence of known SNPs in variant protein AA583399_PEA_{—}1_P6 (SEQ ID NO:687) sequence provides support for the deduced sequence of this variant protein according to the present invention).

TABLE 17
Nucleic acid SNPs

| SNP position on | Alternative | Previously |
|---|---|---|
| nucleotide sequence | nucleic acid | known SNP? |
| 198 | A -> G | Yes |
| 538 | C -> A | Yes |
| 659 | C -> G | Yes |
| 1009 | C -> T | Yes |
| 1145 | A -> G | Yes |

[2602] Variant protein AA583399_PEA_{—}1_P8 (SEQ ID NO:688) according to the present invention has an amino acid sequence as given at the end of the application; it is encoded by transcript(s) AA583399_PEA_{—}1_T17 (SEQ ID NO:658). The location of the variant protein was determined according to results from a number of different software programs and analyses, including analyses from SignalP and other specialized programs. The variant protein is believed to be located as follows with regard to the cell: intracellularly. The protein localization is believed to be intracellularly because neither of the trans-membrane region prediction programs predicted a trans-membrane region for this protein. In addition both signal-peptide prediction programs predict that this protein is a non-secreted protein.

[2603] Variant protein AA583399_PEA_{—}1_P8 (SEQ ID NO:688) is encoded by the following transcript(s): AA583399_PEA_{—}1_T17 (SEQ ID NO:658), for which the sequence(s) is/are given at the end of the application. The coding portion of transcript AA583399_PEA_{—}1_T17 (SEQ ID NO:658) is shown in bold; this coding portion starts at position 191 and ends at position 400.

[2604] Variant protein AA583399_PEA_{—}1_P10 (SEQ ID NO:689) according to the present invention has an amino acid sequence as given at the end of the application; it is encoded by transcript(s) AA583399_PEA_{—}1_T0 (SEQ ID NO:643). An alignment is given to the known protein (Myeloma overexpressed gene protein (SEQ ID NO:679)) at the end of the application. One or more alignments to one or more previously published protein sequences are given at the end of the application. A brief description of the relationship of the variant protein according to the present invention to each such aligned protein is as follows:

[2605] Comparison Report Between AA583399_PEA_{—}1_P10 (SEQ ID NO:689) and MYEO_HUMAN_V3 (SEQ ID NO: 682):

[2606] 1. An isolated chimeric polypeptide encoding for AA583399_PEA_{—}1_P10 (SEQ ID NO:689), comprising a first amino acid sequence being at least 90% homologous to MFTRQAGHFVEGSKAGRSRGRLCLSQALRVAVRGAFVSLWFAAGAGDRERNKGDKGAQTGAGLSQEAE DVDVSRARRVTDAPQGTLCGTGNRNSGSQSARAVGVAHLGEAFRVGVEQAISSCPEEVHGRHGLSMEIM WAQMDVALRSPGRGLLAGAGALCMTLAESSCPDYERGRRACLTLHRHPTPHCSTWGLPLRVAGSWLTV VTVEALGRWRMGVRRTGQVGPTMHPPPVSGASPLLLHHLLLLLLIIILTC corresponding to amino acids 59-313 of MYEO_HUMAN_V3 (SEQ ID NO:682), which also corresponds to amino acids 1-255 of AA583399_PEA_{—}1_P10 (SEQ ID NO:689).

[2607] It should be noted that the known protein sequence (MYEO_HUMAN (SEQ ID NO:679)) has one or more changes than the sequence given at the end of the application and named as being the amino acid sequence for MYEO_HUMAN_V3 (SEQ ID NO:682). These changes were previously known to occur and are listed in the table below.

TABLE 18
Changes to MYEO_HUMAN_V3 (SEQ ID NO: 682)

| SNP position(s) on amino | |
|---|---|
| acid sequence | Type of change |
| 199 | conflict |
| 220 | conflict |
| 272 | conflict |

[2608] The location of the variant protein was determined according to results from a number of different software programs and analyses, including analyses from SignalP and other specialized programs. The variant protein is believed to be located as follows with regard to the cell: secreted. The protein localization is believed to be secreted because one of the two signal-peptide prediction programs (HMM:Signal peptide,NN:NO) predicts that this protein has a signal peptide.

[2609] Variant protein AA583399_PEA_{—}1_P10 (SEQ ID NO:689) also has the following non-silent SNPs (Single Nucleotide Polymorphisms) as listed in Table 19, (given according to their position(s) on the amino acid sequence, with the alternative amino acid(s) listed; the last column indicates whether the SNP is known or not; the presence of known SNPs in variant protein AA583399_PEA_{—}1_P10 (SEQ ID NO:689) sequence provides support for the deduced sequence of this variant protein according to the present invention).

TABLE 19
Amino acid mutations

| SNP position(s) on | Alternative | Previously |
|---|---|---|
| amino acid sequence | amino acid(s) | known SNP? |
| 101 | A -> V | Yes |
| 140 | Q -> R | Yes |
| 161 | M -> V | No |
| 213 | R -> G | Yes |
| 226 | P -> T | Yes |

[2610] Variant protein AA583399_PEA_{—}1_P10 (SEQ ID NO:689) is encoded by the following transcript(s): AA583399_PEA_{—}1_T0 (SEQ ID NO:643), for which the sequence(s) is/are given at the end of the application. The coding portion of transcript AA583399_PEA_{—}1_T0 (SEQ ID NO:643) is shown in bold; this coding portion starts at position 857 and ends at position 1621. The transcript also has the following SNPs as listed in Table 20 (given according to their position on the nucleotide sequence, with the alternative nucleic acid listed; the last column indicates whether the SNP is known or not; the presence of known SNPs in variant protein AA583399_PEA_{—}1_P10 (SEQ ID NO:689) sequence provides support for the deduced sequence of this variant protein according to the present invention).

TABLE 20
Nucleic acid SNPs

| SNP position on | Alternative | Previously |
|---|---|---|
| nucleotide sequence | nucleic acid | known SNP? |
| 380 | A -> G | Yes |
| 901 | C -> T | Yes |
| 1158 | T -> C | Yes |
| 1275 | G -> A | Yes |
| 1337 | A -> G | No |
| 1493 | G -> C | Yes |
| 1532 | C -> A | Yes |
| 1749 | C -> T | No |
| 1753 | T -> G | No |

[2611] Variant protein AA583399_PEA_{—}1_P11 (SEQ ID NO:690) according to the present invention has an amino acid sequence as given at the end of the application; it is encoded by transcript(s) AA583399_PEA_{—}1_T2 (SEQ ID NO:645). The location of the variant protein was determined according to results from a number of different software programs and analyses, including analyses from SignalP and other specialized programs. The variant protein is believed to be located as follows with regard to the cell: secreted. The protein localization is believed to be secreted because both signal-peptide prediction programs predict that this protein has a signal peptide.

[2612] Variant protein AA583399_PEA_{—}1_P11 (SEQ ID NO:690) also has the following non-silent SNPs (Single Nucleotide Polymorphisms) as listed in Table 21, (given according to their position(s) on the amino acid sequence, with the alternative amino acid(s) listed; the last column indicates whether the SNP is known or not; the presence of known SNPs in variant protein AA583399_PEA_{—}1_P11 (SEQ ID NO:690) sequence provides support for the deduced sequence of this variant protein according to the present invention).

TABLE 21
Amino acid mutations

| SNP position(s) on | Alternative | Previously |
|---|---|---|
| amino acid sequence | amino acid(s) | known SNP? |
| 159 | A -> V | Yes |
| 198 | R -> Q | Yes |
| 219 | V -> M | No |
| 271 | G -> R | Yes |
| 284 | P -> T | Yes |

[2613] Variant protein AA583399_PEA_{—}1_P11 (SEQ ID NO:690) is encoded by the following transcript(s): AA583399_PEA_{—}1_T2 (SEQ ID NO:645), for which the sequence(s) is/are given at the end of the application. The coding portion of transcript AA583399_PEA_{—}1_T2 (SEQ ID NO:645) is shown in bold; this coding portion starts at position 493 and ends at position 1431. The transcript also has the following SNPs as listed in Table 22 (given according to their position on the nucleotide sequence, with the alternative nucleic acid listed; the last column indicates whether the SNP is known or not; the presence of known SNPs in variant protein AA583399_PEA_{—}1_P11 (SEQ ID NO:690) sequence provides support for the deduced sequence of this variant protein according to the present invention).

TABLE 22
Nucleic acid SNPs

| SNP position on | Alternative | Previously |
|---|---|---|
| nucleotide sequence | nucleic acid | known SNP? |
| 380 | A -> G | Yes |
| 711 | C -> T | Yes |
| 968 | T -> C | Yes |
| 1085 | G -> A | Yes |
| 1147 | A -> G | No |
| 1303 | G -> C | Yes |
| 1342 | C -> A | Yes |
| 1559 | C -> T | No |
| 1563 | T -> G | No |

[2614] Variant protein AA583399_PEA_{—}1_P12 (SEQ ID NO:691) according to the present invention has an amino acid sequence as given at the end of the application; it is encoded by transcript(s) AA583399_PEA_{—}1_T10 (SEQ ID NO:653) and AA583399_PEA_{—}1_T11 (SEQ ID NO:654). The location of the variant protein was determined according to results from a number of different software programs and analyses, including analyses from SignalP and other specialized programs. The variant protein is believed to be located as follows with regard to the cell: intracellularly. The protein localization is believed to be intracellularly because neither of the trans-membrane region prediction programs predicted a trans-membrane region for this protein. In addition both signal-peptide prediction programs predict that this protein is a non-secreted protein.

[2615] Variant protein AA583399_PEA_{—}1_P12 (SEQ ID NO:691) is encoded by the following transcript(s): AA583399_PEA_{—}1_T10 (SEQ ID NO:653) and AA583399_PEA_{—}1_T11 (SEQ ID NO:654), for which the sequence(s) is/are given at the end of the application.

[2616] The coding portion of transcript AA583399_PEA_{—}1_T10 (SEQ ID NO:653) is shown in bold; this coding portion starts at position 191 and ends at position 367. The transcript also has the following SNPs as listed in Table 23 (given according to their position on the nucleotide sequence, with the alternative nucleic acid listed; the last column indicates whether the SNP is known or not; the presence of known SNPs in variant protein AA583399_PEA_{—}1_P12 (SEQ ID NO:691) sequence provides support for the deduced sequence of this variant protein according to the present invention).

TABLE 23
Nucleic acid SNPs

| SNP position on | Alternative | Previously |
|---|---|---|
| nucleotide sequence | nucleic acid | known SNP? |
| 380 | A -> G | Yes |

[2617] The coding portion of transcript AA583399_PEA_{—}1_T11 (SEQ ID NO:654) is shown in bold; this coding portion starts at position 191 and ends at position 367. The transcript also has the following SNPs as listed in Table 24 (given according to their position on the nucleotide sequence, with the alternative nucleic acid listed; the last column indicates whether the SNP is known or not; the presence of known SNPs in variant protein AA583399_PEA_{—}1_P12 (SEQ ID NO:691) sequence provides support for the deduced sequence of this variant protein according to the present invention).

TABLE 24
Nucleic acid SNPs

| SNP position on nucleotide | Alternative | |
|---|---|---|
| sequence | nucleic acid | Previously known SNP? |
| 380 | A -> G | Yes |

[2618] Variant protein AA583399_PEA_{—}1_P14 (SEQ ID NO:692) according to the present invention has an amino acid sequence as given at the end of the application; it is encoded by transcript(s) AA583399_PEA_{—}1_T15 (SEQ ID NO:656). The location of the variant protein was determined according to results from a number of different software programs and analyses, including analyses from SignalP and other specialized programs. The variant protein is believed to be located as follows with regard to the cell: intracellularly. The protein localization is believed to be intracellularly because neither of the trans-membrane region prediction programs predicted a trans-membrane region for this protein. In addition both signal-peptide prediction programs predict that this protein is a non-secreted protein.

[2619] Variant protein AA583399_PEA_{—}1_P14 (SEQ ID NO:692) is encoded by the following transcript(s): AA583399_PEA_{—}1_T15 (SEQ ID NO:656), for which the sequence(s) is/are given at the end of the application. The coding portion of transcript AA583399_PEA_{—}1_T15 (SEQ ID NO:656) is shown in bold; this coding portion starts at position 43 and ends at position 210.

[2620] As noted above, cluster AA583399 features 20 segment(s), which were listed in Table 2 above and for which the sequence(s) are given at the end of the application. These segment(s) are portions of nucleic acid sequence(s) which are described herein separately because they are of particular interest. A description of each segment according to the present invention is now provided.

[2621] Segment cluster AA583399_PEA_{—}1_node_{—}0 (SEQ ID NO:659) according to the present invention is supported by 24 libraries. The number of libraries was determined as previously described. This segment can be found in the following transcript(s): AA583399_PEA_{—}1_T0 (SEQ ID NO:643), AA583399_PEA_{—}1_T1 (SEQ ID NO:644), AA583399_PEA_{—}1_T2 (SEQ ID NO:645), AA583399_PEA_{—}1_T3 (SEQ ID NO:646), AA583399_PEA_{—}1_T4 (SEQ ID NO:647), AA583399_PEA_{—}1_T5 (SEQ ID NO:648), AA583399_PEA_{—}1_T6 (SEQ ID NO:649), AA583399_PEA_{—}1_T7 (SEQ ID NO:650), AA583399_PEA_{—}1_T8 (SEQ ID NO:651), AA583399_PEA_{—}1_T9 (SEQ ID NO:652), AA583399_PEA_{—}1_T10 (SEQ ID NO:653), AA583399_PEA_{—}1_T11 (SEQ ID NO:654) and AA583399_PEA_{—}1_T17 (SEQ ID NO:658). Table 25 below describes the starting and ending position of this segment on each transcript.

TABLE 25
Segment location on transcripts

| | Segment | Segment |
|---|---|---|
| | starting | ending |
| Transcript name | position | position |
| AA583399_PEA_1_T0 (SEQ ID NO: 643) | 1 | 355 |
| AA583399_PEA_1_T1 (SEQ ID NO: 644) | 1 | 355 |
| AA583399_PEA_1_T2 (SEQ ID NO: 645) | 1 | 355 |
| AA583399_PEA_1_T3 (SEQ ID NO: 646) | 1 | 355 |
| AA583399_PEA_1_T4 (SEQ ID NO: 647) | 1 | 355 |
| AA583399_PEA_1_T5 (SEQ ID NO: 648) | 1 | 355 |
| AA583399_PEA_1_T6 (SEQ ID NO: 649) | 1 | 355 |
| AA583399_PEA_1_T7 (SEQ ID NO: 650) | 1 | 355 |
| AA583399_PEA_1_T8 (SEQ ID NO: 651) | 1 | 355 |
| AA583399_PEA_1_T9 (SEQ ID NO: 652) | 1 | 355 |
| AA583399_PEA_1_T10 (SEQ ID NO: 653) | 1 | 355 |
| AA583399_PEA_1_T11 (SEQ ID NO: 654) | 1 | 355 |
| AA583399_PEA_1_T17 (SEQ ID NO: 658) | 1 | 355 |

[2622] Segment cluster AA583399_PEA_{—}1_node_{—}3 (SEQ ID NO:660) according to the present invention is supported by 4 libraries. The number of libraries was determined as previously described. This segment can be found in the following transcript(s): AA583399_PEA_{—}1_T4 (SEQ ID NO:647). Table 26 below describes the starting and ending position of this segment on each transcript.

TABLE 26
Segment location on transcripts

| | Segment | |
|---|---|---|
| | starting | Segment |
| Transcript name | position | ending position |
| AA583399_PEA_1_T4 (SEQ ID NO: 647) | 465 | 1120 |

[2623] Segment cluster AA583399_PEA_{—}1_node_{—}9 (SEQ ID NO:661) according to the present invention is supported by 23 libraries. The number of libraries was determined as previously described. This segment can be found in the following transcript(s): AA583399_PEA_{—}1_T0 (SEQ ID NO:643), AA583399_PEA_{—}1_T1 (SEQ ID NO:644), AA583399_PEA_{—}1_T2 (SEQ ID NO:645), AA583399_PEA_{—}1_T3 (SEQ ID NO:646), AA583399_PEA_{—}1_T4 (SEQ ID NO:647), AA583399_PEA_{—}1_T5 (SEQ ID NO:648), AA583399_PEA_{—}1_T6 (SEQ ID NO:649), AA583399_PEA_{—}1_T8 (SEQ ID NO:651) and AA583399_PEA_{—}1_T9 (SEQ ID NO:652). Table 27 below describes the starting and ending position of this segment on each transcript.

TABLE 27
Segment location on transcripts

| | Segment | |
|---|---|---|
| | starting | Segment |
| Transcript name | position | ending position |
| AA583399_PEA_1_T0 (SEQ ID NO: 643) | 872 | 1131 |
| AA583399_PEA_1_T1 (SEQ ID NO: 644) | 776 | 1035 |
| AA583399_PEA_1_T2 (SEQ ID NO: 645) | 682 | 941 |
| AA583399_PEA_1_T3 (SEQ ID NO: 646) | 704 | 963 |
| AA583399_PEA_1_T4 (SEQ ID NO: 647) | 1528 | 1787 |
| AA583399_PEA_1_T5 (SEQ ID NO: 648) | 778 | 1037 |
| AA583399_PEA_1_T6 (SEQ ID NO: 649) | 776 | 1035 |
| AA583399_PEA_1_T8 (SEQ ID NO: 651) | 465 | 724 |
| AA583399_PEA_1_T9 (SEQ ID NO: 652) | 776 | 1035 |

[2624] Segment cluster AA583399_PEA_{—}1_node_{—}10 (SEQ ID NO:662) according to the present invention is supported by 59 libraries. The number of libraries was determined as previously described. This segment can be found in the following transcript(s): AA583399_PEA_{—}1_T0 (SEQ ID NO:643), AA583399_PEA_{—}1_T1 (SEQ ID NO:644), AA583399_PEA_{—}1_T2 (SEQ ID NO:645), AA583399_PEA_{—}1_T3 (SEQ ID NO:646), AA583399_PEA_{—}1_T4 (SEQ ID NO:647), AA583399_PEA_{—}1_T5 (SEQ ID NO:648), AA583399_PEA_{—}1_T6 (SEQ ID NO:649), AA583399_PEA_{—}1_T7 (SEQ ID NO:650), AA583399_PEA_{—}1_T8 (SEQ ID NO:651) and AA583399_PEA_{—}1_T9 (SEQ ID NO:652). Table 28 below describes the starting and ending position of this segment on each transcript.

TABLE 28
Segment location on transcripts

| | Segment | |
|---|---|---|
| | starting | Segment |
| Transcript name | position | ending position |
| AA583399_PEA_1_T0 (SEQ ID NO: 643) | 1132 | 2389 |
| AA583399_PEA_1_T1 (SEQ ID NO: 644) | 1036 | 2293 |
| AA583399_PEA_1_T2 (SEQ ID NO: 645) | 942 | 2199 |
| AA583399_PEA_1_T3 (SEQ ID NO: 646) | 964 | 2221 |
| AA583399_PEA_1_T4 (SEQ ID NO: 647) | 1788 | 3045 |
| AA583399_PEA_1_T5 (SEQ ID NO: 648) | 1038 | 2295 |
| AA583399_PEA_1_T6 (SEQ ID NO: 649) | 1036 | 2293 |
| AA583399_PEA_1_T7 (SEQ ID NO: 650) | 872 | 2129 |
| AA583399_PEA_1_T8 (SEQ ID NO: 651) | 725 | 1982 |
| AA583399_PEA_1_T9 (SEQ ID NO: 652) | 1036 | 2293 |

[2625] Segment cluster AA583399_PEA_{—}1_node_{—}12 (SEQ ID NO:663) according to the present invention is supported by 34 libraries. The number of libraries was determined as previously described. This segment can be found in the following transcript(s): AA583399_PEA_{—}1_T0 (SEQ ID NO:643), AA583399_PEA_{—}1_T1 (SEQ ID NO:644), AA583399_PEA_{—}1_T2 (SEQ ID NO:645), AA583399_PEA_{—}1_T3 (SEQ ID NO:646), AA583399_PEA_{—}1_T4 (SEQ ID NO:647), AA583399_PEA_{—}1_T5 (SEQ ID NO:648), AA583399_PEA_{—}1_T6 (SEQ ID NO:649), AA583399_PEA_{—}1_T7 (SEQ ID NO:650), AA583399_PEA_{—}1_T8 (SEQ ID NO:651) and AA583399_PEA_{—}1_T9 (SEQ ID NO:652). Table 29 below describes the starting and ending position of this segment on each transcript.

TABLE 29
Segment location on transcripts

| | Segment | |
|---|---|---|
| | starting | Segment |
| Transcript name | position | ending position |
| AA583399_PEA_1_T0 (SEQ ID NO: 643) | 2412 | 2519 |
| AA583399_PEA_1_T1 (SEQ ID NO: 644) | 2316 | 2423 |
| AA583399_PEA_1_T2 (SEQ ID NO: 645) | 2222 | 2329 |
| AA583399_PEA_1_T3 (SEQ ID NO: 646) | 2244 | 2351 |
| AA583399_PEA_1_T4 (SEQ ID NO: 647) | 3068 | 3175 |
| AA583399_PEA_1_T5 (SEQ ID NO: 648) | 2318 | 2425 |
| AA583399_PEA_1_T6 (SEQ ID NO: 649) | 2316 | 2589 |
| AA583399_PEA_1_T7 (SEQ ID NO: 650) | 2152 | 2259 |
| AA583399_PEA_1_T8 (SEQ ID NO: 651) | 2005 | 2112 |
| AA583399_PEA_1_T9 (SEQ ID NO: 652) | 2294 | 2401 |

[2626] Segment cluster AA583399_PEA_{—}1_node_{—}14 (SEQ ID NO:664) according to the present invention is supported by 6 libraries. The number of libraries was determined as previously described. This segment can be found in the following transcript(s): AA583399_PEA_{—}1_T12 (SEQ ID NO:655) and AA583399_PEA_{—}1_T16 (SEQ ID NO:657). Table 30 below describes the starting and ending position of this segment on each transcript.

TABLE 30
Segment location on transcripts

| | Segment | Segment |
|---|---|---|
| | starting | ending |
| Transcript name | position | position |
| AA583399_PEA_1_T12 (SEQ ID NO: 655) | 1 | 1179 |
| AA583399_PEA_1_T16 (SEQ ID NO: 657) | 1 | 1179 |

[2627] Segment cluster AA583399_PEA_{—}1_node_{—}21 (SEQ ID NO:665) according to the present invention is supported by 15 libraries. The number of libraries was determined as previously described. This segment can be found in the following transcript(s): AA583399_PEA_{—}1_T10 (SEQ ID NO:653), AA583399_PEA_{—}1_T11 (SEQ ID NO:654), AA583399_PEA_{—}1_T12 (SEQ ID NO:655), AA583399_PEA_{—}1_T15 (SEQ ID NO:656), AA583399_PEA_{—}1_T16 (SEQ ID NO:657) and AA583399_PEA_{—}1_T17 (SEQ ID NO:658). Table 31 below describes the starting and ending position of this segment on each transcript.

TABLE 31
Segment location on transcripts

| | Segment | Segment |
|---|---|---|
| | starting | ending |
| Transcript name | position | position |
| AA583399_PEA_1_T10 (SEQ ID NO: 653) | 465 | 633 |
| AA583399_PEA_1_T11 (SEQ ID NO: 654) | 465 | 633 |
| AA583399_PEA_1_T12 (SEQ ID NO: 655) | 1180 | 1348 |
| AA583399_PEA_1_T15 (SEQ ID NO: 656) | 78 | 246 |
| AA583399_PEA_1_T16 (SEQ ID NO: 657) | 1180 | 1348 |
| AA583399_PEA_1_T17 (SEQ ID NO: 658) | 434 | 602 |

[2628] Segment cluster AA583399_PEA_{—}1_node_{—}24 (SEQ ID NO:666) according to the present invention is supported by 7 libraries. The number of libraries was determined as previously described. This segment can be found in the following transcript(s): AA583399_PEA_{—}1_T11 (SEQ ID NO:654), AA583399_PEA_{—}1_T12 (SEQ ID NO:655), AA583399_PEA_{—}1_T15 (SEQ ID NO:656) and AA583399_PEA_{—}1_T16 (SEQ ID NO:657). Table 32 below describes the starting and ending position of this segment on each transcript.

TABLE 32
Segment location on transcripts

| | Segment | Segment |
|---|---|---|
| | starting | ending |
| Transcript name | position | position |
| AA583399_PEA_1_T11 (SEQ ID NO: 654) | 634 | 757 |
| AA583399_PEA_1_T12 (SEQ ID NO: 655) | 1349 | 1472 |
| AA583399_PEA_1_T15 (SEQ ID NO: 656) | 247 | 370 |
| AA583399_PEA_1_T16 (SEQ ID NO: 657) | 1349 | 1472 |

[2629] Segment cluster AA583399_PEA_{—}1_node_{—}25 (SEQ ID NO:667) according to the present invention is supported by 1 libraries. The number of libraries was determined as previously described. This segment can be found in the following transcript(s): AA583399_PEA_{—}1_T16 (SEQ ID NO:657). Table 33 below describes the starting and ending position of this segment on each transcript.

TABLE 33
Segment location on transcripts

| | Segment | Segment |
|---|---|---|
| Transcript name | starting position | ending position |
| AA583399_PEA_1_T16 (SEQ ID | 1473 | 1614 |
| NO: 657) | | |

[2630] Segment cluster AA583399_PEA_{—}1_node_{—}29 (SEQ ID NO:668) according to the present invention is supported by 8 libraries. The number of libraries was determined as previously described. This segment can be found in the following transcript(s): AA583399_PEA_{—}1_T11 (SEQ ID NO:654), AA583399_PEA_{—}1_T12 (SEQ ID NO:655) and AA583399_PEA_{—}1_T15 (SEQ ID NO:656). Table 34 below describes the starting and ending position of this segment on each transcript.

TABLE 34
Segment location on transcripts

| | Segment | Segment |
|---|---|---|
| | starting | ending |
| Transcript name | position | position |
| AA583399_PEA_1_T11 (SEQ ID NO: 654) | 832 | 1491 |
| AA583399_PEA_1_T12 (SEQ ID NO: 655) | 1547 | 2206 |
| AA583399_PEA_1_T15 (SEQ ID NO: 656) | 445 | 1104 |

[2631] According to an optional embodiment of the present invention, short segments related to the above cluster are also provided. These segments are up to about 120 bp in length, and so are included in a separate description.

[2632] Segment cluster AA583399_PEA_{—}1_node_{—}1 (SEQ ID NO:669) according to the present invention is supported by 22 libraries. The number of libraries was determined as previously described. This segment can be found in the following transcript(s): AA583399_PEA_{—}1_T0 (SEQ ID NO:643), AA583399_PEA_{—}1_T1 (SEQ ID NO:644), AA583399_PEA_{—}1_T2 (SEQ ID NO:645), AA583399_PEA_{—}1_T3 (SEQ ID NO:646), AA583399_PEA_{—}1_T4 (SEQ ID NO:647), AA583399_PEA_{—}1_T5 (SEQ ID NO:648), AA583399_PEA_{—}1_T6 (SEQ ID NO:649), AA583399_PEA_{—}1_T7 (SEQ ID NO:650), AA583399_PEA_{—}1_T8 (SEQ ID NO:651), AA583399_PEA_{—}1_T9 (SEQ ID NO:652), AA583399_PEA_{—}1_T10 (SEQ ID NO:653) and AA583399_PEA_{—}1_T11 (SEQ ID NO:654). Table 35 below describes the starting and ending position of this segment on each transcript.

TABLE 35
Segment location on transcripts

| | Segment | Segment |
|---|---|---|
| | starting | ending |
| Transcript name | position | position |
| AA583399_PEA_1_T0 (SEQ ID NO: 643) | 356 | 386 |
| AA583399_PEA_1_T1 (SEQ ID NO: 644) | 356 | 386 |
| AA583399_PEA_1_T2 (SEQ ID NO: 645) | 356 | 386 |
| AA583399_PEA_1_T3 (SEQ ID NO: 646) | 356 | 386 |
| AA583399_PEA_1_T4 (SEQ ID NO: 647) | 356 | 386 |
| AA583399_PEA_1_T5 (SEQ ID NO: 648) | 356 | 386 |
| AA583399_PEA_1_T6 (SEQ ID NO: 649) | 356 | 386 |
| AA583399_PEA_1_T7 (SEQ ID NO: 650) | 356 | 386 |
| AA583399_PEA_1_T8 (SEQ ID NO: 651) | 356 | 386 |
| AA583399_PEA_1_T9 (SEQ ID NO: 652) | 356 | 386 |
| AA583399_PEA_1_T10 (SEQ ID NO: 653) | 356 | 386 |
| AA583399_PEA_1_T11 (SEQ ID NO: 654) | 356 | 386 |

[2633] Segment cluster AA583399_PEA_{—}1_node_{—}2 (SEQ ID NO:670) according to the present invention is supported by 24 libraries. The number of libraries was determined as previously described. This segment can be found in the following transcript(s): AA583399_PEA_{—}1_T0 (SEQ ID NO:643), AA583399_PEA_{—}1_T1 (SEQ ID NO:644), AA583399_PEA_{—}1_T2 (SEQ ID NO:645), AA583399_PEA_{—}1_T3 (SEQ ID NO:646), AA583399_PEA_{—}1_T4 (SEQ ID NO:647), AA583399_PEA_{—}1_T5 (SEQ ID NO:648), AA583399_PEA_{—}1_T6 (SEQ ID NO:649), AA583399_PEA_{—}1_T7 (SEQ ID NO:650), AA583399_PEA_{—}1_T8 (SEQ ID NO:651), AA583399_PEA_{—}1_T9 (SEQ ID NO:652), AA583399_PEA_{—}1_T10 (SEQ ID NO:653), AA583399_PEA_{—}1_T11 (SEQ ID NO:654) and AA583399_PEA_{—}1_T17 (SEQ ID NO:658). Table 36 below describes the starting and ending position of this segment on each transcript.

TABLE 36
Segment location on transcripts

| | Segment | Segment |
|---|---|---|
| | starting | ending |
| Transcript name | position | position |
| AA583399_PEA_1_T0 (SEQ ID NO: 643) | 387 | 464 |
| AA583399_PEA_1_T1 (SEQ ID NO: 644) | 387 | 464 |
| AA583399_PEA_1_T2 (SEQ ID NO: 645) | 387 | 464 |
| AA583399_PEA_1_T3 (SEQ ID NO: 646) | 387 | 464 |
| AA583399_PEA_1_T4 (SEQ ID NO: 647) | 387 | 464 |
| AA583399_PEA_1_T5 (SEQ ID NO: 648) | 387 | 464 |
| AA583399_PEA_1_T6 (SEQ ID NO: 649) | 387 | 464 |
| AA583399_PEA_1_T7 (SEQ ID NO: 650) | 387 | 464 |
| AA583399_PEA_1_T8 (SEQ ID NO: 651) | 387 | 464 |
| AA583399_PEA_1_T9 (SEQ ID NO: 652) | 387 | 464 |
| AA583399_PEA_1_T10 (SEQ ID NO: 653) | 387 | 464 |
| AA583399_PEA_1_T11 (SEQ ID NO: 654) | 387 | 464 |
| AA583399_PEA_1_T17 (SEQ ID NO: 658) | 356 | 433 |

[2634] Segment cluster AA583399_PEA_{—}1_node_{—}4 (SEQ ID NO:671) according to the present invention is supported by 13 libraries. The number of libraries was determined as previously described. This segment can be found in the following transcript(s): AA583399_PEA_{—}1_T0 (SEQ ID NO:643), AA583399_PEA_{—}1_T1 (SEQ ID NO:644), AA583399_PEA_{—}1_T4 (SEQ ID NO:647), AA583399_PEA_{—}1_T6 (SEQ ID NO:649), AA583399_PEA_{—}1_T7 (SEQ ID NO:650) and AA583399_PEA_{—}1_T9 (SEQ ID NO:652). Table 37 below describes the starting and ending position of this segment on each transcript.

TABLE 37
Segment location on transcripts

| | Segment | |
|---|---|---|
| | starting | Segment |
| Transcript name | position | ending position |
| AA583399_PEA_1_T0 (SEQ ID NO: 643) | 465 | 558 |
| AA583399_PEA_1_T1 (SEQ ID NO: 644) | 465 | 558 |
| AA583399_PEA_1_T4 (SEQ ID NO: 647) | 1121 | 1214 |
| AA583399_PEA_1_T6 (SEQ ID NO: 649) | 465 | 558 |
| AA583399_PEA_1_T7 (SEQ ID NO: 650) | 465 | 558 |
| AA583399_PEA_1_T9 (SEQ ID NO: 652) | 465 | 558 |

[2635] Segment cluster AA583399_PEA_{—}1_node_{—}5 (SEQ ID NO:672) according to the present invention is supported by 13 libraries. The number of libraries was determined as previously described. This segment can be found in the following transcript(s): AA583399_PEA_{—}1_T0 (SEQ ID NO:643), AA583399_PEA_{—}1_T1 (SEQ ID NO:644), AA583399_PEA_{—}1_T2 (SEQ ID NO:645), AA583399_PEA_{—}1_T4 (SEQ ID NO:647), AA583399_PEA_{—}1_T5 (SEQ ID NO:648), AA583399_PEA_{—}1_T6 (SEQ ID NO:649), AA583399_PEA_{—}1_T7 (SEQ ID NO:650) and AA583399_PEA_{—}1_T9 (SEQ ID NO:652). Table 38 below describes the starting and ending position of this segment on each transcript.

TABLE 38
Segment location on transcripts

| | Segment | |
|---|---|---|
| | starting | Segment |
| Transcript name | position | ending position |
| AA583399_PEA_1_T0 (SEQ ID NO: 643) | 559 | 632 |
| AA583399_PEA_1_T1 (SEQ ID NO: 644) | 559 | 632 |
| AA583399_PEA_1_T2 (SEQ ID NO: 645) | 465 | 538 |
| AA583399_PEA_1_T4 (SEQ ID NO: 647) | 1215 | 1288 |
| AA583399_PEA_1_T5 (SEQ ID NO: 648) | 465 | 538 |
| AA583399_PEA_1_T6 (SEQ ID NO: 649) | 559 | 632 |
| AA583399_PEA_1_T7 (SEQ ID NO: 650) | 559 | 632 |
| AA583399_PEA_1_T9 (SEQ ID NO: 652) | 559 | 632 |

[2636] Segment cluster AA583399_PEA_{—}1_node_{—}6 (SEQ ID NO:673) according to the present invention is supported by 13 libraries. The number of libraries was determined as previously described. This segment can be found in the following transcript(s): AA583399_PEA_{—}1_T0 (SEQ ID NO:643), AA583399_PEA_{—}1_T1 (SEQ ID NO:644), AA583399_PEA_{—}1_T2 (SEQ ID NO:645), AA583399_PEA_{—}1_T3 (SEQ ID NO:646), AA583399_PEA_{—}1_T4 (SEQ ID NO:647), AA583399_PEA_{—}1_T5 (SEQ ID NO:648), AA583399_PEA_{—}1_T6 (SEQ ID NO:649), AA583399_PEA_{—}1_T7 (SEQ ID NO:650) and AA583399_PEA_{—}1_T9 (SEQ ID NO:652). Table 39 below describes the starting and ending position of this segment on each transcript.

TABLE 39
Segment location on transcripts

| | Segment | |
|---|---|---|
| | starting | Segment |
| Transcript name | position | ending position |
| AA583399_PEA_1_T0 (SEQ ID NO: 643) | 633 | 727 |
| AA583399_PEA_1_T1 (SEQ ID NO: 644) | 633 | 727 |
| AA583399_PEA_1_T2 (SEQ ID NO: 645) | 539 | 633 |
| AA583399_PEA_1_T3 (SEQ ID NO: 646) | 465 | 559 |
| AA583399_PEA_1_T4 (SEQ ID NO: 647) | 1289 | 1383 |
| AA583399_PEA_1_T5 (SEQ ID NO: 648) | 539 | 633 |
| AA583399_PEA_1_T6 (SEQ ID NO: 649) | 633 | 727 |
| AA583399_PEA_1_T7 (SEQ ID NO: 650) | 633 | 727 |
| AA583399_PEA_1_T9 (SEQ ID NO: 652) | 633 | 727 |

[2637] Segment cluster AA583399_PEA_{—}1_node_{—}7 (SEQ ID NO:674) according to the present invention is supported by 9 libraries. The number of libraries was determined as previously described. This segment can be found in the following transcript(s): AA583399_PEA_{—}1_T0 (SEQ ID NO:643), AA583399_PEA_{—}1_T3 (SEQ ID NO:646), AA583399_PEA_{—}1_T4 (SEQ ID NO:647), AA583399_PEA_{—}1_T5 (SEQ ID NO:648) and AA583399_PEA_{—}1_T7 (SEQ ID NO:650). Table 40 below describes the starting and ending position of this segment on each transcript.

TABLE 40
Segment location on transcripts

| | Segment | |
|---|---|---|
| | starting | Segment |
| Transcript name | position | ending position |
| AA583399_PEA_1_T0 (SEQ ID NO: 643) | 728 | 823 |
| AA583399_PEA_1_T3 (SEQ ID NO: 646) | 560 | 655 |
| AA583399_PEA_1_T4 (SEQ ID NO: 647) | 1384 | 1479 |
| AA583399_PEA_1_T5 (SEQ ID NO: 648) | 634 | 729 |
| AA583399_PEA_1_T7 (SEQ ID NO: 650) | 728 | 823 |

[2638] Segment cluster AA583399_PEA_{—}1_node_{—}8 (SEQ ID NO:675) according to the present invention is supported by 13 libraries. The number of libraries was determined as previously described. This segment can be found in the following transcript(s): AA583399_PEA_{—}1_T0 (SEQ ID NO:643), AA583399_PEA_{—}1_T1 (SEQ ID NO:644), AA583399_PEA_{—}1_T2 (SEQ ID NO:645), AA583399_PEA_{—}1_T3 (SEQ ID NO:646), AA583399_PEA_{—}1_T4 (SEQ ID NO:647), AA583399_PEA_{—}1_T5 (SEQ ID NO:648), AA583399_PEA_{—}1_T6 (SEQ ID NO:649), AA583399_PEA_{—}1_T7 (SEQ ID NO:650) and AA583399_PEA_{—}1_T9 (SEQ ID NO:652). Table 41 below describes the starting and ending position of this segment on each transcript.

TABLE 41
Segment location on transcripts

| | Segment | |
|---|---|---|
| | starting | Segment |
| Transcript name | position | ending position |
| AA583399_PEA_1_T0 (SEQ ID NO: 643) | 824 | 871 |
| AA583399_PEA_1_T1 (SEQ ID NO: 644) | 728 | 775 |
| AA583399_PEA_1_T2 (SEQ ID NO: 645) | 634 | 681 |
| AA583399_PEA_1_T3 (SEQ ID NO: 646) | 656 | 703 |
| AA583399_PEA_1_T4 (SEQ ID NO: 647) | 1480 | 1527 |
| AA583399_PEA_1_T5 (SEQ ID NO: 648) | 730 | 777 |
| AA583399_PEA_1_T6 (SEQ ID NO: 649) | 728 | 775 |
| AA583399_PEA_1_T7 (SEQ ID NO: 650) | 824 | 871 |
| AA583399_PEA_1_T9 (SEQ ID NO: 652) | 728 | 775 |

[2639] Segment cluster AA583399_PEA_{—}1_node_{—}11 (SEQ ID NO:676) according to the present invention can be found in the following transcript(s): AA583399_PEA_{—}1_T0 (SEQ ID NO:643), AA583399_PEA_{—}1_T1 (SEQ ID NO:644), AA583399_PEA_{—}1_T2 (SEQ ID NO:645), AA583399_PEA_{—}1_T3 (SEQ ID NO:646), AA583399_PEA_{—}1_T4 (SEQ ID NO:647), AA583399_PEA_{—}1_T5 (SEQ ID NO:648), AA583399_PEA_{—}1_T6 (SEQ ID NO:649), AA583399_PEA_{—}1_T7 (SEQ ID NO:650) and AA583399_PEA_{—}1_T8 (SEQ ID NO:651). Table 42 below describes the starting and ending position of this segment on each transcript.

TABLE 42
Segment location on transcripts

| | Segment | |
|---|---|---|
| | starting | Segment |
| Transcript name | position | ending position |
| AA583399_PEA_1_T0 (SEQ ID NO: 643) | 2390 | 2411 |
| AA583399_PEA_1_T1 (SEQ ID NO: 644) | 2294 | 2315 |
| AA583399_PEA_1_T2 (SEQ ID NO: 645) | 2200 | 2221 |
| AA583399_PEA_1_T3 (SEQ ID NO: 646) | 2222 | 2243 |
| AA583399_PEA_1_T4 (SEQ ID NO: 647) | 3046 | 3067 |
| AA583399_PEA_1_T5 (SEQ ID NO: 648) | 2296 | 2317 |
| AA583399_PEA_1_T6 (SEQ ID NO: 649) | 2294 | 2315 |
| AA583399_PEA_1_T7 (SEQ ID NO: 650) | 2130 | 2151 |
| AA583399_PEA_1_T8 (SEQ ID NO: 651) | 1983 | 2004 |

[2640] Segment cluster AA583399_PEA_{—}1_node_{—}19 (SEQ ID NO:677) according to the present invention is supported by 1 libraries. The number of libraries was determined as previously described. This segment can be found in the following transcript(s): AA583399_PEA_{—}1_T15 (SEQ ID NO:656). Table 43 below describes the starting and ending position of this segment on each transcript.

TABLE 43
Segment location on transcripts

| | Segment | Segment |
|---|---|---|
| | starting | ending |
| Transcript name | position | position |
| AA583399_PEA_1_T15 (SEQ ID NO: 656) | 1 | 77 |

[2641] Segment cluster AA583399_PEA_{—}1_node_{—}27 (SEQ ID NO:678) according to the present invention is supported by 4 libraries. The number of libraries was determined as previously described. This segment can be found in the following transcript(s): AA583399_PEA_{—}1_T11 (SEQ ID NO:654), AA583399_PEA_{—}1_T12 (SEQ ID NO:655) and AA583399_PEA_{—}1_T15 (SEQ ID NO:656). Table 44 below describes the starting and ending position of this segment on each transcript.

TABLE 44
Segment location on transcripts

| | Segment | Segment |
|---|---|---|
| | starting | ending |
| Transcript name | position | position |
| AA583399_PEA_1_T11 (SEQ ID NO: 654) | 758 | 831 |
| AA583399_PEA_1_T12 (SEQ ID NO: 655) | 1473 | 1546 |
| AA583399_PEA_1_T15 (SEQ ID NO: 656) | 371 | 444 |

### Variant Protein Alignment to the Previously Known Protein:

Sequence name: MYEO_HUMAN_V1 (SEQ ID NO:680)
Sequence documentation:
Alignment of: AA583399_PEA_1_P2 (SEQ ID NO:684) × MYEO_HUMAN_V1 (SEQ ID
NO:680) ..
Alignment segment 1/1:

| | | | |
|---|---|---|---|
| Quality: | 2473.00 | Escore: | 0 |
| Matching length: | 255 | Total length: | 255 |
| Matching Percent Similarity: | 100.00 | Matching Percent Identity: | 100.00 |
| Total Percent Similarity: | 100.00 | Total Percent Identity: | 100.00 |
| Gaps: | 0 | | |
| Alignment: | | | |

[chemical structure]

[chemical structure]

[chemical structure]

[chemical structure]

[chemical structure]

[chemical structure]

Sequence name: MYEO_HUMAN_V1 (SEQ ID NO:680)
Sequence documentation:
Alignment of: AA583399_PEA_1_P4 (SEQ ID NO:685) × MYEO_HUMAN_V1 (SEQ ID
NO:680) ..
Alignment segment 1/1:

| | | | |
|---|---|---|---|
| Quality: | 1607.00 | Escore: | 0 |
| Matching length: | 164 | Total length: | 164 |
| Matching Percent Similarity: | 100.00 | Matching Percent Identity: | 100.00 |
| Total Percent Similarity: | 100.00 | Total Percent Identity: | 100.00 |
| Gaps: | 0 | | |
| Alignment: | | | |

[chemical structure]

[chemical structure]

[chemical structure]

[chemical structure]

Sequence name: MYEO_HUMAN_V2 (SEQ ID NO:681)
Sequence documentation:
Alignment of: AA583399_PEA_1_P5 (SEQ ID NO:686) × MYEO_HUMAN_V2 (SEQ ID
NO:681) ..
Alignment segment 1/1:

| | | | |
|---|---|---|---|
| Quality: | 1206.00 | Escore: | 0 |
| Matching length: | 122 | Total length: | 122 |
| Matching Percent Similarity: | 100.00 | Matching Percent Identity: | 100.00 |
| Total Percent Similarity: | 100.00 | Total Percent Identity: | 100.00 |
| Gaps: | 0 | | |
| Alignment: | | | |

[chemical structure]

[chemical structure]

[chemical structure]

Sequence name: MYEO_HUMAN_V3 (SEQ ID NO:682)
Sequence documentation:
Alignment of: AA583399_PEA_1_P10 (SEQ ID NO:689) × MYEO_HUMAN_V3
(SEQ ID NO:682) ..
Alignment segment 1/1:

| | | | |
|---|---|---|---|
| Quality: | 2475.00 | Escore: | 0 |
| Matching length: | 255 | Total length: | 255 |
| Matching Percent Similarity: | 100.00 | Matching Percent Identity: | 100.00 |
| Total Percent Similarity: | 100.00 | Total Percent Identity: | 100.00 |
| Gaps: | 0 | | |
| Alignment: | | | |

[chemical structure]

[chemical structure]

[chemical structure]

[chemical structure]

[chemical structure]

[chemical structure]

[2643] Expression of Myeloma Overexpressed Gene (in a Subset of t(11;14) Positive Multiple Myelomas) (MYEOV) AA583399 Transcripts which are Detectable by Amplicon as Depicted in Sequence Name

### AA583399seg30-32 (SEQ ID NO:1321) in Normal and Cancerous Colon Tissues

[2644] Expression of myeloma overexpressed gene (in a subset of t(11;14) positive multiple myelomas) (MYEOV) transcripts detectable by or according to seg30-32, AA583399seg30-32 amplicon (SEQ ID NO:1321) and AA583399seg30-32F (SEQ ID NO: 1319) and AA583399seg30-32R(SEQ ID NO: 1320) primers was measured by real time PCR. In parallel the expression of four housekeeping genes —PBGD (GenBank Accession No. BC019323 (SEQ ID NO:1576); amplicon—PBGD-amplicon, SEQ ID NO:531), HPRT1 (GenBank Accession No. NM_{—}000194 (SEQ ID NO:1577); amplicon—HPRT1-amplicon, SEQ ID NO:612), G6PD (GenBank Accession No. NM_{—}000402 (SEQ ID NO:1578); G6PD amplicon, SEQ ID NO:615), RPS27A (GenBank Accession No. NM_{—}002954 (SEQ ID NO:1579); RPS27A amplicon, SEQ ID NO:1261), was measured similarly. For each RT sample, the expression of the above amplicon was normalized to the geometric mean of the quantities of the housekeeping genes. The normalized quantity of each RT sample was then divided by the median of the quantities of the normal post-mortem (PM) samples (Sample Nos. 41, 52, 62-67, 69-71, Table 1, above, “Tissue samples in testing panel”), to obtain a value of fold up-regulation for each sample relative to median of the normal PM samples.

[2645] FIG. 41 is a histogram showing over expression of the above-indicated myeloma overexpressed gene (in a subset of t(11;14) positive multiple myelomas) (MYEOV) transcripts in cancerous colon samples relative to the normal samples. (Values represent the average of duplicate experiments. Error bars indicate the minimal and maximal values obtained.) The number and percentage of samples that exhibit at least 5 fold over-expression, out of the total number of samples tested is indicated in the bottom.

[2646] As is evident from FIG. 41, the expression of myeloma overexpressed gene (in a subset of t(11;14) positive multiple myelomas) (MYEOV) transcripts detectable by the above amplicon in cancer samples was significantly higher than in the non-cancerous samples (Sample Nos. 41, 52, 62-67, 69-71, Table 1, “Tissue samples in testing panel”). Notably an over-expression of at least 5 fold was found in 27 out of 37 adenocarcinoma samples,

[2647] Statistical analysis was applied to verify the significance of these results, as described below.

[2648] The P value for the difference in the expression levels of myeloma overexpressed gene (in a subset of t(11;14) positive multiple myelomas) (MYEOV) transcripts detectable by the above amplicon in colon cancer samples versus the normal tissue samples was determined by T test as 6.50E-05.

[2649] Threshold of 5 fold overexpression was found to differentiate between cancer and normal samples with P value of 1.56E-05 as checked by exact fisher test. The above values demonstrate statistical significance of the results. Primer pairs are also optionally and preferably encompassed within the present invention; for example, for the above experiment, the following primer pair was used as a non-limiting illustrative example only of a suitable primer pair: AA583399seg30-23F forward primer (SEQ ID NO: 1319); and AA583399seg30-32 R reverse primer (SEQ ID NO: 1320). The present invention also preferably encompasses any amplicon obtained through the use of any suitable primer pair; for example, for the above experiment, the following amplicon was obtained as a non-limiting illustrative example only of a suitable amplicon: AA583399seg30-32 (SEQ ID NO: 1321). Forward primer

Forward primer (SEQ ID NO: 1319):
TGGAGATTCCTGGTTTAAAGCATT
Reverse primer (SEQ ID NO: 1320):
CCCCAGCTTAGAGCTGCACT
Amplicon (SEQ ID NO: 1321):
TGGAGATTCCTGGTTTAAAGCATTTAAAGCCTCTGTGAAAATTTGCCCAG
GCCAACAACTTCACTTTCCACACTCAGTGCCACGAAGTGCAGCTCTAAGC
TGGGG

[2650] Expression of Myeloma Overexpressed Gene (in a Subset of t(11;14) Positive Multiple Myelomas) (MYEOV) AA583399 Transcripts which are Detectable by Amplicon as Depicted in Sequence Name

### AA583399seg17 (SEQ ID NO: 1324) in Normal and Cancerous Colon Tissues

[2651] Expression of myeloma overexpressed gene (in a subset of t(111;14) positive multiple myelomas) (MYEOV) transcripts detectable by or according to seg17, AA583399seg17 amplicon (SEQ ID NO: 1324) and AA583399seg17F (SEQ ID NO: 1322) AA583399seg17R (SEQ ID NO: 1323) primers was measured by real time PCR. In parallel the expression of four housekeeping genes —PBGD (GenBank Accession No. BC019323 (SEQ ID NO:1576); amplicon—PBGD-amplicon, SEQ ID NO:531), HPRT1 (GenBank Accession No. NM_{—}000194 (SEQ ID NO:1577); amplicon—HPRT1-amplicon, SEQ ID NO:612), G6PD (GenBank Accession No. NM_{—}000402 (SEQ ID NO:1578); G6PD amplicon, SEQ ID NO:615), RPS27A (GenBank Accession No. NM_{—}002954 (SEQ ID NO:1579); RPS27A amplicon, SEQ ID NO:1261), was measured similarly. For each RT sample, the expression of the above amplicon was normalized to the geometric mean of the quantities of the housekeeping genes. The normalized quantity of each RT sample was then divided by the median of the quantities of the normal post-mortem (PM) samples (Sample Nos. 41, 52, 62-67, 69-71, Table 1, above, “Tissue samples in testing panel”), to obtain a value of fold up-regulation for each sample relative to median of the normal PM samples.

[2652] FIG. 42 is a histogram showing over expression of the above-indicated myeloma overexpressed gene (in a subset of t(11;14) positive multiple myelomas) (MYEOV) transcripts in cancerous colon samples relative to the normal samples. (Values represent the average of duplicate experiments. Error bars indicate the minimal and maximal values obtained.) The number and percentage of samples that exhibit at least 5 fold over-expression, out of the total number of samples tested is indicated in the bottom.

[2653] As is evident from FIG. 42, the expression of myeloma overexpressed gene (in a subset of t(11;14) positive multiple myelomas) (MYEOV) transcripts detectable by the above amplicon in cancer samples was significantly higher than in the non-cancerous samples (Sample Nos. 41, 52, 62-67, 69-71, Table 1, “Tissue samples in testing panel”). Notably an over-expression of at least 5 fold was found in 22 out of 37 adenocarcinoma samples.

[2654] Statistical analysis was applied to verify the significance of these results, as described below.

[2655] The P value for the difference in the expression levels of myeloma overexpressed gene (in a subset of t(11;14) positive multiple myelomas) (MYEOV) transcripts detectable by the above amplicon in colon cancer samples versus the normal tissue samples was determined by T test as 2.37E-04.

[2656] Threshold of 5 fold overexpression was found to differentiate between cancer and normal samples with P value of 3.42E-04 as checked by exact fisher test. The above values demonstrate statistical significance of the results.

[2657] Primer pairs are also optionally and preferably encompassed within the present invention; for example, for the above experiment, the following primer pair was used as a non-limiting illustrative example only of a suitable primer pair: AA583399seg17F forward primer (SEQ ID NO: 1322); and AA583399seg17 R reverse primer (SEQ ID NO: 1323).

[2658] The present invention also preferably encompasses any amplicon obtained through the use of any suitable primer pair; for example, for the above experiment, the following amplicon was obtained as a non-limiting illustrative example only of a suitable amplicon: AA583399seg17 (SEQ ID NO: 1324).

Forward primer (SEQ ID NO: 1322):
CATTCTCCACGCATCAGATGA
Reverse primer (SEQ ID NO: 1323):
ACCATCAGATTGGCAGCATG
Amplicon (SEQ ID NO: 1324):
CATTCTCCACGCATCAGATGATCCTGTGGCCCCTCAGTGCCAGGCCCCAC
TGGCCCTCTGCGCACATCAGTGACTCTGATGTTCTCCCCCACCGCATGCT
GCCAATCTGATGGT

### Expression of Myeloma Overexpressed Gene (in a Subset of t(11;14) Positive Multiple Myelomas) (MYEOV) AA583399 Transcripts which are Detectable by Amplicon as Depicted in Sequence Name AA583399Seg1 (SEQ ID NO: 1327) in Normal and Cancerous Colon Tissues

[2659] Expression of myeloma overexpressed gene (in a subset of t(11;14) positive multiple myelomas) (MYEOV) transcripts detectable by or according to seg1, AA583399seg1 amplicon (SEQ ID NO: 1327) and AA583399seg1F (SEQ ID NO: 1325) AA583399seg1R (SEQ ID NO: 1326) primers was measured by real time PCR. In parallel the expression of four housekeeping genes —PBGD (GenBank Accession No. BC019323 (SEQ ID NO:1576); amplicon—PBGD-amplicon, SEQ ID NO:531), HPRT1 (GenBank Accession No. NM_{—}000194 (SEQ ID NO:1577); amplicon—HPRT1-amplicon, SEQ ID NO:612), G6PD (GenBank Accession No. NM_{—}000402 (SEQ ID NO:1578); G6PD amplicon, SEQ ID NO:615), RPS27A (GenBank Accession No. NM_{—}002954 (SEQ ID NO:1579); RPS27A amplicon, SEQ ID NO:1261), was measured similarly. For each RT sample, the expression of the above amplicon was normalized to the geometric mean of the quantities of the housekeeping genes. The normalized quantity of each RT sample was then divided by the median of the quantities of the normal post-mortem (PM) samples (Sample Nos. 41, 52, 62-67, 69-71, Table 1, above, “Tissue samples in testing panel”), to obtain a value of fold up-regulation for each sample relative to median of the normal PM samples.

[2660] FIG. 43 is a histogram showing over expression of the above-indicated myeloma overexpressed gene (in a subset of t(11;14) positive multiple myelomas) (MYEOV) transcripts in cancerous colon samples relative to the normal samples. The number and percentage of samples that exhibit at least 5 fold over-expression, out of the total number of samples tested is indicated in the bottom.

[2661] As is evident from FIG. 43, the expression of myeloma overexpressed gene (in a subset of t(11;14) positive multiple myelomas) (MYEOV) transcripts detectable by the above amplicon in cancer samples was significantly higher than in the non-cancerous samples (Sample Nos. 41, 52, 62-67, 69-71, Table 1, “Tissue samples in testing panel”). Notably an over-expression of at least 5 fold was found in 23 out of 37 adenocarcinoma samples.

[2662] Statistical analysis was applied to verify the significance of these results, as described below.

[2663] The P value for the difference in the expression levels of myeloma overexpressed gene (in a subset of t(11;14) positive multiple myelomas) (MYEOV) transcripts detectable by the above amplicon in colon cancer samples versus the normal tissue samples was determined by T test as 1.55E-05.

[2664] Threshold of 5 fold overexpression was found to differentiate between cancer and normal samples with P value of 1.97E-04 as checked by exact fisher test. The above values demonstrate statistical significance of the results.

[2665] Primer pairs are also optionally and preferably encompassed within the present invention; for example, for the above experiment, the following primer pair was used as a non-limiting illustrative example only of a suitable primer pair: AA583399seg1F forward primer (SEQ ID NO: 1325); and AA583399seg1 R reverse primer (SEQ ID NO: 1326).

[2666] The present invention also preferably encompasses any amplicon obtained through the use of any suitable primer pair; for example, for the above experiment, the following amplicon was obtained as a non-limiting illustrative example only of a suitable amplicon: AA583399seg1 (SEQ ID NO: 1327).

Forward primer (SEQ ID NO: 1325):
GAATCAGCCCAAAGCCAGG
Reverse primer (SEQ ID NO: 1326):
GCTGGTGAAAGCACTGGGTT
Amplicon (SEQ ID NO: 1327):
GAATCAGCCCAAAGCCAGGCGTCCAGGGTCTCCCTCACCTGAAGCTGACT
TTTTCCCCACCTTGGACAGAGGGCGGGAGATGCCATCCCCACTGAACCCA
GTGCTTTCACCAGC

### Description for Cluster AI684092

[2667] Cluster AI684092 features 2 transcript(s) and 8 segment(s) of interest, the names for which are given in Tables 1 and 2, respectively, the sequences themselves are given at the end of the application. The selected protein variants are given in table 3.

TABLE 1
Transcripts of interest

| Transcript Name | SEQ ID NO: |
|---|---|
| AI684092_PEA_1_T2 | 693 |
| AI684092_PEA_1_T3 | 694 |

TABLE 2
Segments of interest

| Segment Name | SEQ ID NO: |
|---|---|
| AI684092_PEA_1_node_0 | 695 |
| AI684092_PEA_1_node_2 | 696 |
| AI684092_PEA_1_node_4 | 697 |
| AI684092_PEA_1_node_5 | 698 |
| AI684092_PEA_1_node_6 | 699 |
| AI684092_PEA_1_node_7 | 700 |
| AI684092_PEA_1_node_8 | 701 |
| AI684092_PEA_1_node_9 | 702 |

TABLE 3
Proteins of interest

| Protein Name | SEQ ID NO: | Corresponding Transcript(s) |
|---|---|---|
| AI684092_PEA_1_P1 | 703 | AI684092_PEA_1_T2 |
| | | (SEQ ID NO: 693) |
| AI684092_PEA_1_P3 | 704 | AI684092_PEA_1_T3 |
| | | (SEQ ID NO: 694) |

[2668] Cluster AI684092 can be used as a diagnostic marker according to overexpression of transcripts of this cluster in cancer. Expression of such transcripts in normal tissues is also given according to the previously described methods. The term “number” in the left hand column of the table and the numbers on the y-axis of the figure below refer to weighted expression of ESTs in each category, as “parts per million” (ratio of the expression of ESTs for a particular cluster to the expression of all ESTs in that category, according to parts per million).

[2669] Overall, the following results were obtained as shown with regard to the histograms in FIG. 44 and Table 4. This cluster is overexpressed (at least at a minimum level) in the following pathological conditions: brain malignant tumors, epithelial malignant tumors and a mixture of malignant tumors from different tissues.

TABLE 4
Normal tissue distribution

| Name of Tissue | Number |
|---|---|
| bone | 0 |
| brain | 0 |
| colon | 0 |
| epithelial | 0 |
| general | 0 |
| kidney | 0 |
| lung | 0 |
| lymph nodes | 0 |
| breast | 17 |
| ovary | 0 |
| prostate | 0 |
| stomach | 0 |
| uterus | 0 |

TABLE 5
P values and ratios for expression in cancerous tissue

| Name of Tissue | P1 | P2 | SP1 | R3 | SP2 | R4 |
|---|---|---|---|---|---|---|
| bone | 1 | 6.7e−01 | 1 | 1.0 | 7.0e−01 | 1.4 |
| brain | 1 | 1.3e−01 | 1 | 1.0 | 3.8e−03 | 9.2 |
| colon | 1 | 4.8e−01 | 1 | 1.0 | 5.9e−01 | 1.6 |
| epithelial | 7.2e−02 | 2.0e−02 | 4.1e−02 | 3.9 | 8.9e−03 | 4.8 |
| general | 3.0e−03 | 2.0e−04 | 1.4e−04 | 8.1 | 1.2e−06 | 9.0 |
| kidney | 1 | 7.2e−01 | 1 | 1.0 | 4.9e−01 | 1.9 |
| lung | 1 | 6.3e−01 | 1 | 1.0 | 6.2e−01 | 1.6 |
| lymph nodes | 3.1e−01 | 5.7e−01 | 2.9e−01 | 3.5 | 5.8e−01 | 1.7 |
| breast | 8.2e−01 | 7.3e−01 | 6.9e−01 | 1.0 | 5.6e−01 | 1.2 |
| ovary | 6.2e−01 | 6.5e−01 | 6.8e−01 | 1.5 | 7.7e−01 | 1.3 |
| prostate | 7.3e−01 | 7.8e−01 | 6.7e−01 | 1.5 | 7.5e−01 | 1.3 |
| stomach | 3.6e−01 | 4.7e−01 | 1 | 1.0 | 8.0e−01 | 1.3 |
| uterus | 2.1e−01 | 4.0e−01 | 4.4e−01 | 2.0 | 6.4e−01 | 1.5 |

[2670] As noted above, cluster AI684092 features 2 transcript(s), which were listed in Table 1 above. A description of each variant protein according to the present invention is now provided.

[2671] Variant protein AI684092_PEA_{—}1_P1 (SEQ ID NO:703) according to the present invention has an amino acid sequence as given at the end of the application; it is encoded by transcript(s) AI684092_PEA_{—}1_T2 (SEQ ID NO:693). The location of the variant protein was determined according to results from a number of different software programs and analyses, including analyses from SignalP and other specialized programs. The variant protein is believed to be located as follows with regard to the cell: intracellularly. The protein localization is believed to be intracellularly because neither of the trans-membrane region prediction programs predicted a trans-membrane region for this protein. In addition both signal-peptide prediction programs predict that this protein is a non-secreted protein.

[2672] Variant protein AI684092_PEA_{—}1_P1 (SEQ ID NO:703) also has the following non-silent SNPs (Single Nucleotide Polymorphisms) as listed in Table 6, (given according to their position(s) on the amino acid sequence, with the alternative amino acid(s) listed; the last column indicates whether the SNP is known or not; the presence of known SNPs in variant protein AI684092_PEA_{—}1_P1 (SEQ ID NO:703) sequence provides support for the deduced sequence of this variant protein according to the present invention).

TABLE 6
Amino acid mutations

| SNP position(s) on amino acid | | Previously |
|---|---|---|
| sequence | Alternative amino acid(s) | known SNP? |
| 137 | C -> Y | Yes |
| 160 | S -> P | Yes |
| 164 | A -> D | Yes |
| 168 | S -> R | Yes |
| 175 | A -> D | Yes |

[2673] Variant protein AI684092_PEA_{—}1_P1 (SEQ ID NO:703) is encoded by the following transcript(s): AI684092_PEA_{—}1_T2 (SEQ ID NO:693), for which the sequence(s) is/are given at the end of the application. The coding portion of transcript AI684092_PEA_{—}1_T2 (SEQ ID NO:693) is shown in bold; this coding portion starts at position 1480 and ends at position 2058. The transcript also has the following SNPs as listed in Table 7 (given according to their position on the nucleotide sequence, with the alternative nucleic acid listed; the last column indicates whether the SNP is known or not; the presence of known SNPs in variant protein AI684092_PEA_{—}1_P1 (SEQ ID NO:703) sequence provides support for the deduced sequence of this variant protein according to the present invention).

TABLE 7
Nucleic acid SNPs

| SNP position on nucleotide | | Previously |
|---|---|---|
| sequence | Alternative nucleic acid | known SNP? |
| 609 | G -> A | Yes |
| 807 | T -> C | Yes |
| 1284 | T -> C | No |
| 1295 | T -> G | No |
| 1889 | G -> A | Yes |
| 1932 | C -> G | Yes |
| 1941 | C -> T | Yes |
| 1957 | T -> C | Yes |
| 1970 | C -> A | Yes |
| 1983 | T -> G | Yes |
| 2003 | C -> A | Yes |
| 2019 | C -> G | Yes |
| 2052 | G -> C | Yes |
| 2142 | A -> T | Yes |

[2674] Variant protein AI684092_PEA_{—}1_P3 (SEQ ID NO:704) according to the present invention has an amino acid sequence as given at the end of the application; it is encoded by transcript(s) AI684092_PEA_{—}1_T3 (SEQ ID NO:694). The location of the variant protein was determined according to results from a number of different software programs and analyses, including analyses from SignalP and other specialized programs. The variant protein is believed to be located as follows with regard to the cell: intracellularly. The protein localization is believed to be intracellularly because neither of the trans-membrane region prediction programs predicted a trans-membrane region for this protein. In addition both signal-peptide prediction programs predict that this protein is a non-secreted protein.

[2675] Variant protein AI684092_PEA_{—}1_P3 (SEQ ID NO:704) is encoded by the following transcript(s): AI684092_PEA_{—}1_T3 (SEQ ID NO:694), for which the sequence(s) is/are given at the end of the application. The coding portion of transcript AI684092_PEA_{—}1_T3 (SEQ ID NO:694) is shown in bold; this coding portion starts at position 28 and ends at position 279. The transcript also has the following SNPs as listed in Table 8 (given according to their position on the nucleotide sequence, with the alternative nucleic acid listed; the last column indicates whether the SNP is known or not; the presence of known SNPs in variant protein AI684092_PEA_{—}1_P3 (SEQ ID NO:704) sequence provides support for the deduced sequence of this variant protein according to the present invention).

TABLE 8
Nucleic acid SNPs

| SNP position on nucleotide | | Previously |
|---|---|---|
| sequence | Alternative nucleic acid | known SNP? |
| 609 | G -> A | Yes |
| 807 | T -> C | Yes |
| 1284 | T -> C | No |
| 1295 | T -> G | No |
| 1571 | C -> A | Yes |
| 1584 | T -> G | Yes |
| 1604 | C -> A | Yes |
| 1620 | C -> G | Yes |
| 1653 | G -> C | Yes |
| 1743 | A -> T | Yes |

[2676] As noted above, cluster AI684092 features 8 segment(s), which were listed in Table 2 above and for which the sequence(s) are given at the end of the application. These segment(s) are portions of nucleic acid sequence(s) which are described herein separately because they are of particular interest. A description of each segment according to the present invention is now provided.

[2677] Segment cluster AI684092_PEA_{—}1_node_{—}0 (SEQ ID NO:695) according to the present invention is supported by 5 libraries. The number of libraries was determined as previously described. This segment can be found in the following transcript(s): AI684092_PEA_{—}1_T2 (SEQ ID NO:693) and AI684092_PEA_{—}1_T3 (SEQ ID NO:694). Table 9 below describes the starting and ending position of this segment on each transcript.

TABLE 9
Segment location on transcripts

| | Segment | |
|---|---|---|
| | starting | Segment |
| Transcript name | position | ending position |
| AI684092_PEA_1_T2 (SEQ ID NO: 693) | 1 | 368 |
| AI684092_PEA_1_T3 (SEQ ID NO: 694) | 1 | 368 |

[2678] Segment cluster AI684092_PEA_{—}1_node_{—}2 (SEQ ID NO:696) according to the present invention is supported by 5 libraries. The number of libraries was determined as previously described. This segment can be found in the following transcript(s): AI684092_PEA_{—}1_T2 (SEQ ID NO:693) and AI684092_PEA_{—}1_T3 (SEQ ID NO:694). Table 10 below describes the starting and ending position of this segment on each transcript.

TABLE 10
Segment location on transcripts

| | Segment | |
|---|---|---|
| | starting | Segment |
| Transcript name | position | ending position |
| AI684092_PEA_1_T2 (SEQ ID NO: 693) | 369 | 498 |
| AI684092_PEA_1_T3 (SEQ ID NO: 694) | 369 | 498 |

[2679] Segment cluster AI684092_PEA_{—}1_node_{—}4 (SEQ ID NO:697) according to the present invention is supported by 7 libraries. The number of libraries was determined as previously described. This segment can be found in the following transcript(s): AI684092_PEA_{—}1_T2 (SEQ ID NO:693) and AI684092_PEA_{—}1_T3 (SEQ ID NO:694). Table 11 below describes the starting and ending position of this segment on each transcript.

TABLE 11
Segment location on transcripts

| | Segment | Segment |
|---|---|---|
| | starting | ending |
| Transcript name | position | position |
| AI684092_PEA_1_T2 (SEQ ID NO: 693) | 499 | 665 |
| AI684092_PEA_1_T3 (SEQ ID NO: 694) | 499 | 665 |

[2680] Segment cluster AI684092_PEA_{—}1_node_{—}5 (SEQ ID NO:698) according to the present invention is supported by 7 libraries. The number of libraries was determined as previously described. This segment can be found in the following transcript(s): AI684092_PEA_{—}1_T2 (SEQ ID NO:693) and AI684092_PEA_{—}1_T3 (SEQ ID NO:694). Table 12 below describes the starting and ending position of this segment on each transcript.

TABLE 12
Segment location on transcripts

| | Segment | Segment |
|---|---|---|
| | starting | ending |
| Transcript name | position | position |
| AI684092_PEA_1_T2 (SEQ ID NO: 693) | 666 | 932 |
| AI684092_PEA_1_T3 (SEQ ID NO: 694) | 666 | 932 |

[2681] Segment cluster AI684092_PEA_{—}1_node_{—}6 (SEQ ID NO:699) according to the present invention is supported by 7 libraries. The number of libraries was determined as previously described. This segment can be found in the following transcript(s): AI684092_PEA_{—}1_T2 (SEQ ID NO:693) and AI684092_PEA_{—}1_T3 (SEQ ID NO:694). Table 13 below describes the starting and ending position of this segment on each transcript.

TABLE 13
Segment location on transcripts

| | Segment | Segment |
|---|---|---|
| | starting | ending |
| Transcript name | position | position |
| AI684092_PEA_1_T2 (SEQ ID NO: 693) | 933 | 1372 |
| AI684092_PEA_1_T3 (SEQ ID NO: 694) | 933 | 1372 |

[2682] Segment cluster AI684092_PEA_{—}1_node_{—}7 (SEQ ID NO:700) according to the present invention is supported by 9 libraries. The number of libraries was determined as previously described. This segment can be found in the following transcript(s): AI684092_PEA_{—}1_T2 (SEQ ID NO:693) and AI684092_PEA_{—}1_T3 (SEQ ID NO:694). Table 14 below describes the starting and ending position of this segment on each transcript.

TABLE 14
Segment location on transcripts

| | Segment | Segment |
|---|---|---|
| | starting | ending |
| Transcript name | position | position |
| AI684092_PEA_1_T2 (SEQ ID NO: 693) | 1373 | 1560 |
| AI684092_PEA_1_T3 (SEQ ID NO: 694) | 1373 | 1560 |

[2683] Segment cluster AI684092_PEA_{—}1_node_{—}8 (SEQ ID NO:701) according to the present invention is supported by 10 libraries. The number of libraries was determined as previously described. This segment can be found in the following transcript(s): AI684092_PEA_{—}1_T2 (SEQ ID NO:693). Table 15 below describes the starting and ending position of this segment on each transcript.

TABLE 15
Segment location on transcripts

| | Segment | Segment |
|---|---|---|
| | starting | ending |
| Transcript name | position | position |
| AI684092_PEA_1_T2 (SEQ ID NO: 693) | 1561 | 1959 |

[2684] Segment cluster AI684092_PEA_{—}1_node_{—}9 (SEQ ID NO:702) according to the present invention is supported by 9 libraries. The number of libraries was determined as previously described. This segment can be found in the following transcript(s): AI684092_PEA_{—}1_T2 (SEQ ID NO:693) and AI684092_PEA_{—}1_T3 (SEQ ID NO:694). Table 16 below describes the starting and ending position of this segment on each transcript.

TABLE 16
Segment location on transcripts

| | Segment | Segment |
|---|---|---|
| | starting | ending |
| Transcript name | position | position |
| AI684092_PEA_1_T2 (SEQ ID NO: 693) | 1960 | 2195 |
| AI684092_PEA_1_T3 (SEQ ID NO: 694) | 1561 | 1796 |

### Example 1

### Expression of AA5315457 Transcripts which are Detectable by Amplicon as Depicted in Sequence Name AA5315457seg8 (SEQ ID NO: 1330) in Normal and Cancerous Colon Tissues

[2685] Expression of AA5315457 transcripts detectable by or according to seg8, AA5315457 seg8 amplicon (SEQ ID NO: 1330) and AA5315457F (SEQ ID NO: 1328) AA5315457R (SEQ ID NO: 1329) primers was measured by real time PCR. In parallel the expression of four housekeeping genes —PBGD (GenBank Accession No. BC019323 (SEQ ID NO:1576); amplicon—PBGD-amplicon, SEQ ID NO:531), HPRT1 (GenBank Accession No. NM_{—}000194 (SEQ ID NO:1577); amplicon—HPRT1-amplicon, SEQ ID NO:612), G6PD (GenBank Accession No. NM_{—}000402 (SEQ ID NO:1578); G6PD amplicon, SEQ ID NO:615), RPS27A (GenBank Accession No. NM_{—}002954 (SEQ ID NO:1579); RPS27A amplicon, SEQ ID NO:1261), was measured similarly. For each RT sample, the expression of the above amplicon was normalized to the geometric mean of the quantities of the housekeeping genes. The normalized quantity of each RT sample was then divided by the median of the quantities of the normal post-mortem (PM) samples (Sample Nos. 41, 52, 62-67, 69-71, Table 1, above, “Tissue samples in testing panel”), to obtain a value of fold up-regulation for each sample relative to median of the normal PM samples.

[2686] FIG. 45 is a histogram showing over expression of the above-indicated AA5315457 transcripts in cancerous colon samples relative to the normal samples. (Values represent the average of duplicate experiments. Error bars indicate the minimal and maximal values obtained.) The number and percentage of samples that exhibit at least 3 fold over-expression, out of the total number of samples tested is indicated in the bottom.

[2687] As is evident from FIG. 45, the expression of AA5315457 transcripts detectable by the above amplicon in cancer samples was significantly higher than in the non-cancerous samples (Sample Nos. 41, 52, 62-67, 69-71, Table 1 above, “Tissue samples in testing panel”). Notably an over-expression of at least 3 fold was found in 10 out of 37 adenocarcinoma samples,

[2688] Statistical analysis was applied to verify the significance of these results, as described below.

[2689] The P value for the difference in the expression levels of AA5315457 transcripts detectable by the above amplicon in colon cancer samples versus the normal tissue samples was determined by T test as 1.66E-05.

[2690] Threshold of 3 fold overexpression was found to differentiate between cancer and normal samples with P value of 5.33E-02 as checked by exact fisher test. The above values demonstrate statistical significance of the results.

[2691] Primer pairs are also optionally and preferably encompassed within the present invention; for example, for the above experiment, the following primer pair was used as a non-limiting illustrative example only of a suitable primer pair: AA5315457F forward primer (SEQ ID NO: 1328); and AA5315457R reverse primer (SEQ ID NO: 1329).

[2692] The present invention also preferably encompasses any amplicon obtained through the use of any suitable primer pair; for example, for the above experiment, the following amplicon was obtained as a non-limiting illustrative example only of a suitable amplicon: AA5315457.

Forward primer (SEQ ID NO: 1328):
CATGGACCCCAGGCAAGTC
Reversr primer (SEQ ID NO: 1329):
CTGTTTAGGGTCGAGGCTGTG
Amplicon (SEQ ID NO: 1330):
CATGGACCCCAGGCAAGTCCCCCCACCCACGCATTTCTAATCATCTGCCC
TGGTTTTGCCTCCTGAGTCTGTTAAGGCTGTGTGCCCCTCATCGAGGCCC
GTCACAGCCTCGACCCTAAACAG

### Description for Cluster HUMCACH1A

[2693] Cluster HUMCACH1A features 18 transcript(s) and 67 segment(s) of interest, the names for which are given in Tables 1 and 2, respectively, the sequences themselves are given at the end of the application. The selected protein variants are given in table 3.

TABLE 1
Transcripts of interest

| Transcript Name | SEQ ID NO: |
|---|---|
| HUMCACH1A_PEA_1_T0 | 705 |
| HUMCACH1A_PEA_1_T1 | 706 |
| HUMCACH1A_PEA_1_T2 | 707 |
| HUMCACH1A_PEA_1_T3 | 708 |
| HUMCACH1A_PEA_1_T4 | 709 |
| HUMCACH1A_PEA_1_T6 | 710 |
| HUMCACH1A_PEA_1_T7 | 711 |
| HUMCACH1A_PEA_1_T8 | 712 |
| HUMCACH1A_PEA_1_T12 | 713 |
| HUMCACH1A_PEA_1_T13 | 714 |
| HUMCACH1A_PEA_1_T14 | 715 |
| HUMCACH1A_PEA_1_T15 | 716 |
| HUMCACH1A_PEA_1_T16 | 717 |
| HUMCACH1A_PEA_1_T17 | 718 |
| HUMCACH1A_PEA_1_T18 | 719 |
| HUMCACH1A_PEA_1_T19 | 720 |
| HUMCACH1A_PEA_1_T20 | 721 |
| HUMCACH1A_PEA_1_T22 | 722 |

TABLE 2
Segments of interest

| Segment Name | SEQ ID NO: |
|---|---|
| HUMCACH1A_PEA_1_node_2 | 723 |
| HUMCACH1A_PEA_1_node_5 | 724 |
| HUMCACH1A_PEA_1_node_9 | 725 |
| HUMCACH1A_PEA_1_node_11 | 726 |
| HUMCACH1A_PEA_1_node_14 | 727 |
| HUMCACH1A_PEA_1_node_16 | 728 |
| HUMCACH1A_PEA_1_node_27 | 729 |
| HUMCACH1A_PEA_1_node_30 | 730 |
| HUMCACH1A_PEA_1_node_33 | 731 |
| HUMCACH1A_PEA_1_node_41 | 732 |
| HUMCACH1A_PEA_1_node_43 | 733 |
| HUMCACH1A_PEA_1_node_45 | 734 |
| HUMCACH1A_PEA_1_node_47 | 735 |
| HUMCACH1A_PEA_1_node_55 | 736 |
| HUMCACH1A_PEA_1_node_57 | 737 |
| HUMCACH1A_PEA_1_node_70 | 738 |
| HUMCACH1A_PEA_1_node_72 | 739 |
| HUMCACH1A_PEA_1_node_74 | 740 |
| HUMCACH1A_PEA_1_node_86 | 741 |
| HUMCACH1A_PEA_1_node_92 | 742 |
| HUMCACH1A_PEA_1_node_94 | 743 |
| HUMCACH1A_PEA_1_node_103 | 744 |
| HUMCACH1A_PEA_1_node_104 | 745 |
| HUMCACH1A_PEA_1_node_106 | 746 |
| HUMCACH1A_PEA_1_node_109 | 747 |
| HUMCACH1A_PEA_1_node_113 | 748 |
| HUMCACH1A_PEA_1_node_114 | 749 |
| HUMCACH1A_PEA_1_node_116 | 750 |
| HUMCACH1A_PEA_1_node_119 | 751 |
| HUMCACH1A_PEA_1_node_121 | 752 |
| HUMCACH1A_PEA_1_node_123 | 753 |
| HUMCACH1A_PEA_1_node_125 | 754 |
| HUMCACH1A_PEA_1_node_128 | 755 |
| HUMCACH1A_PEA_1_node_0 | 756 |
| HUMCACH1A_PEA_1_node_3 | 757 |
| HUMCACH1A_PEA_1_node_7 | 758 |
| HUMCACH1A_PEA_1_node_23 | 759 |
| HUMCACH1A_PEA_1_node_26 | 760 |
| HUMCACH1A_PEA_1_node_32 | 761 |
| HUMCACH1A_PEA_1_node_35 | 762 |
| HUMCACH1A_PEA_1_node_37 | 763 |
| HUMCACH1A_PEA_1_node_39 | 764 |
| HUMCACH1A_PEA_1_node_49 | 765 |
| HUMCACH1A_PEA_1_node_51 | 766 |
| HUMCACH1A_PEA_1_node_53 | 767 |
| HUMCACH1A_PEA_1_node_58 | 768 |
| HUMCACH1A_PEA_1_node_60 | 769 |
| HUMCACH1A_PEA_1_node_62 | 770 |
| HUMCACH1A_PEA_1_node_64 | 771 |
| HUMCACH1A_PEA_1_node_66 | 772 |
| HUMCACH1A_PEA_1_node_68 | 773 |
| HUMCACH1A_PEA_1_node_76 | 774 |
| HUMCACH1A_PEA_1_node_77 | 775 |
| HUMCACH1A_PEA_1_node_79 | 776 |
| HUMCACH1A_PEA_1_node_81 | 777 |
| HUMCACH1A_PEA_1_node_84 | 778 |
| HUMCACH1A_PEA_1_node_88 | 779 |
| HUMCACH1A_PEA_1_node_90 | 780 |
| HUMCACH1A_PEA_1_node_96 | 781 |
| HUMCACH1A_PEA_1_node_98 | 782 |
| HUMCACH1A_PEA_1_node_100 | 783 |
| HUMCACH1A_PEA_1_node_101 | 784 |
| HUMCACH1A_PEA_1_node_107 | 785 |
| HUMCACH1A_PEA_1_node_111 | 786 |
| HUMCACH1A_PEA_1_node_117 | 787 |
| HUMCACH1A_PEA_1_node_124 | 788 |
| HUMCACH1A_PEA_1_node_126 | 789 |

TABLE 3
Proteins of interest

| Protein Name | SEQ ID NO: | Corresponding Transcript(s) |
|---|---|---|
| HUMCACH1A_PEA_1_P2 | 792 | HUMCACH1A_PEA_1_T0 (SEQ ID NO: 705); |
| | | HUMCACH1A_PEA_1_T1 (SEQ ID NO: 706); |
| | | HUMCACH1A_PEA_1_T2 (SEQ ID NO: 707); |
| | | HUMCACH1A_PEA_1_T3 (SEQ ID NO: 708); |
| | | HUMCACH1A_PEA_1_T4 (SEQ ID NO: 709) |
| HUMCACH1A_PEA_1_P3 | 793 | HUMCACH1A_PEA_1_T6 (SEQ ID NO: 710) |
| HUMCACH1A_PEA_1_P4 | 794 | HUMCACH1A_PEA_1_T7 (SEQ ID NO: 711) |
| HUMCACH1A_PEA_1_P5 | 795 | HUMCACH1A_PEA_1_T8 (SEQ ID NO: 712) |
| HUMCACH1A_PEA_1_P7 | 796 | HUMCACH1A_PEA_1_T12 (SEQ ID NO: 713) |
| HUMCACH1A_PEA_1_P8 | 797 | HUMCACH1A_PEA_1_T13 (SEQ ID NO: 714) |
| HUMCACH1A_PEA_1_P9 | 798 | HUMCACH1A_PEA_1_T14 (SEQ ID NO: 715) |
| HUMCACH1A_PEA_1_P10 | 799 | HUMCACH1A_PEA_1_T15 (SEQ ID NO: 716) |
| HUMCACH1A_PEA_1_P11 | 800 | HUMCACH1A_PEA_1_T16 (SEQ ID NO: 717) |
| HUMCACH1A_PEA_1_P12 | 801 | HUMCACH1A_PEA_1_T17 (SEQ ID NO: 718) |
| HUMCACH1A_PEA_1_P13 | 802 | HUMCACH1A_PEA_1_T18 (SEQ ID NO: 719) |
| HUMCACH1A_PEA_1_P14 | 803 | HUMCACH1A_PEA_1_T19 (SEQ ID NO: 720) |
| HUMCACH1A_PEA_1_P15 | 804 | HUMCACH1A_PEA_1_T20 (SEQ ID NO: 721) |
| HUMCACH1A_PEA_1_P17 | 805 | HUMCACH1A_PEA_1_T22 (SEQ ID NO: 722) |

[2694] These sequences are variants of the known protein Voltage-dependent L-type calcium channel alpha-1D subunit (SwissProt accession identifier CCAD_HUMAN; known also according to the synonyms Calcium channel, L type, alpha-1 polypeptide, isoform 2), SEQ ID NO: 790, referred to herein as the previously known protein.

[2695] Protein Voltage-dependent L-type calcium channel alpha-1D subunit (SEQ ID NO:790) is known or believed to have the following function(s): Voltage-sensitive calcium channels (VSCC) mediate the entry of calcium ions into excitable cells and are also involved in a variety of calcium-dependent processes, including muscle contraction, hormone or neurotransmitter release, gene expression, cell motility, cell division and cell death. The isoform alpha-1D gives rise to L-type calcium currents. Long-lasting (L-type) calcium channels belong to the “high-voltage activated” (HVA) group. They are blocked by dihydropyridines (DHP), phenylalkylamines, benzothiazepines, and by omega-agatoxin-IIIA (omega-aga-IIIA). They are however insensitive to omega-conotoxin-GVIA (omega-CTx-GVIA) and omega-agatoxin-IVA (omega-aga-IVA). The sequence for protein Voltage-dependent L-type calcium channel alpha-1D subunit (SEQ ID NO:790) is given at the end of the application, as “Voltage-dependent L-type calcium channel alpha-1D subunit (SEQ ID NO:790) amino acid sequence”. Known polymorphisms for this sequence are as shown in Table 4.

TABLE 4
Amino acid mutations for Known Protein

| SNP position(s) on amino | |
|---|---|
| acid sequence | Comment |
| 1 | M -> MM (in a NIDDM patient). |
| | /FTId = VAR_001497. |
| 576 | S -> T |
| 637 | C -> S |
| 650 | S -> I |
| 918 | I -> T |
| 960 | M -> I |
| 1289-1290 | Missing |
| 1346 | F -> S |
| 1433 | H -> Y |

[2696] Protein Voltage-dependent L-type calcium channel alpha-1D subunit (SEQ ID NO:790) localization is believed to be Integral membrane protein.

[2697] The following GO Annotation(s) apply to the previously known protein. The following annotation(s) were found: transport; cation transport; calcium ion transport, which are annotation(s) related to Biological Process; calcium binding; dihydropyridine-sensitive calcium channel, which are annotation(s) related to Molecular Function; and voltage-gated calcium channel; integral membrane protein, which are annotation(s) related to Cellular Component.

[2698] The GO assignment relies on information from one or more of the SwissProt/TremB1 Protein knowledgebase, available from <http://www.expasy.ch/sprot/>; or Locuslink, available from <http://www.ncbi.nlm.nih.gov/projects/LocusLink/>.

[2699] Cluster HUMCACH1A can be used as a diagnostic marker according to overexpression of transcripts of this cluster in cancer. Expression of such transcripts in normal tissues is also given according to the previously described methods. The term “number” in the left hand column of the table and the numbers on the y-axis of the figure below refer to weighted expression of ESTs in each category, as “parts per million” (ratio of the expression of ESTs for a particular cluster to the expression of all ESTs in that category, according to parts per million).

[2700] Overall, the following results were obtained as shown with regard to the histograms in FIG. 46 and Table 5. This cluster is overexpressed (at least at a minimum level) in the following pathological conditions: a mixture of malignant tumors from different tissues.

TABLE 5
Normal tissue distribution

| Name of Tissue | Number |
|---|---|
| adrenal | 0 |
| brain | 27 |
| colon | 0 |
| epithelial | 13 |
| general | 13 |
| lung | 51 |
| ovary | 0 |
| pancreas | 32 |
| prostate | 4 |
| skin | 0 |
| stomach | 0 |
| uterus | 0 |

TABLE 6
P values and ratios for expression in cancerous tissue

| Name of Tissue | P1 | P2 | SP1 | R3 | SP2 | R4 |
|---|---|---|---|---|---|---|
| adrenal | 6.1e−01 | 6.6e−01 | 2.1e−01 | 3.4 | 2.9e−01 | 2.7 |
| brain | 8.7e−01 | 8.9e−01 | 9.2e−01 | 0.4 | 9.8e−01 | 0.3 |
| colon | 1.1e−01 | 1.1e−01 | 4.9e−01 | 2.2 | 4.6e−01 | 2.0 |
| epithelial | 2.6e−02 | 2.2e−01 | 8.8e−03 | 2.4 | 2.5e−01 | 1.3 |
| general | 7.1e−03 | 1.7e−01 | 4.3e−03 | 2.0 | 4.0e−01 | 1.0 |
| lung | 8.7e−01 | 9.2e−01 | 9.6e−01 | 0.6 | 1 | 0.3 |
| ovary | 6.2e−01 | 6.5e−01 | 6.8e−01 | 1.5 | 7.7e−01 | 1.3 |
| pancreas | 4.3e−01 | 6.5e−01 | 5.0e−01 | 1.2 | 7.0e−01 | 0.9 |
| prostate | 3.1e−01 | 4.7e−01 | 1.2e−02 | 4.9 | 4.2e−02 | 3.6 |
| skin | 1 | 4.4e−01 | 1 | 1.0 | 6.4e−01 | 1.6 |
| stomach | 3.0e−01 | 6.7e−01 | 1.3e−01 | 3.0 | 5.1e−01 | 1.5 |
| uterus | 4.7e−01 | 6.4e−01 | 6.6e−01 | 1.5 | 8.0e−01 | 1.2 |

[2701] As noted above, cluster HUMCACH1A features 18 transcript(s), which were listed in Table 1 above. These transcript(s) encode for protein(s) which are variant(s) of protein Voltage-dependent L-type calcium channel alpha-1D subunit (SEQ ID NO:790). A description of each variant protein according to the present invention is now provided.

[2702] Variant protein HUMCACH1A_PEA_{—}1_P2 (SEQ ID NO:792) according to the present invention has an amino acid sequence as given at the end of the application; it is encoded by transcript(s) HUMCACH1A_PEA_{—}1_T0 (SEQ ID NO:705), HUMCACH1A_PEA_{—}1_T1 (SEQ ID NO:706), HUMCACH1A_PEA_{—}1_T2 (SEQ ID NO:707), HUMCACH1A_PEA_{—}1_T3 (SEQ ID NO:708) and HUMCACH1A_PEA_{—}1_T4 (SEQ ID NO:709). The location of the variant protein was determined according to results from a number of different software programs and analyses, including analyses from SignalP and other specialized programs. The variant protein is believed to be located as follows with regard to the cell: membrane. The protein localization is believed to be membrane because both trans-membrane region prediction programs predicted a trans-membrane region for this protein.

[2703] Variant protein HUMCACH1A_PEA_{—}1_P2 (SEQ ID NO:792) also has the following non-silent SNPs (Single Nucleotide Polymorphisms) as listed in Table 7, (given according to their position(s) on the amino acid sequence, with the alternative amino acid(s) listed; the last column indicates whether the SNP is known or not; the presence of known SNPs in variant protein HUMCACH1A_PEA_{—}1_P2 (SEQ ID NO:792) sequence provides support for the deduced sequence of this variant protein according to the present invention).

TABLE 7
Amino acid mutations

| SNP Position(s) on amino acid | Alternative | Previously |
|---|---|---|
| sequence | amino acid(s) | known SNP? |
| 577 | I -> M | Yes |
| 809 | N -> | No |
| 1038 | I -> T | No |

[2704] Variant protein HUMCACH1A_PEA_{—}1_P2 (SEQ ID NO:792) is encoded by the following transcript(s): HUMCACH1A_PEA_{—}1_T0 (SEQ ID NO:705), HUMCACH1A_PEA_{—}1_T1 (SEQ ID NO:706), HUMCACH1A_PEA_{—}1_T2 (SEQ ID NO:707), HUMCACH1A_PEA_{—}1_T3 (SEQ ID NO:708) and HUMCACH1A_PEA_{—}1_T4 (SEQ ID NO:709), for which the sequence(s) is/are given at the end of the application.

[2705] The coding portion of transcript HUMCACH1A_PEA_{—}1_T0 (SEQ ID NO:705) is shown in bold; this coding portion starts at position 512 and ends at position 7054. The transcript also has the following SNPs as listed in Table 8 (given according to their position on the nucleotide sequence, with the alternative nucleic acid listed; the last column indicates whether the SNP is known or not; the presence of known SNPs in variant protein HUMCACH1A_PEA_{—}1_P2 (SEQ ID NO:792) sequence provides support for the deduced sequence of this variant protein according to the present invention).

TABLE 8
Nucleic acid SNPs

| SNP Position on uncleotide | Alternative | Previously |
|---|---|---|
| sequence | nucleic acid | known SNP? |
| 331 | T -> A | Yes |
| 422 | C -> T | Yes |
| 458 | T -> C | Yes |
| 970 | T -> C | Yes |
| 1615 | C -> T | Yes |
| 2242 | T -> G | Yes |
| 2296 | C -> T | No |
| 2381 | T -> C | Yes |
| 2937 | A -> | No |
| 3271 | C -> T | Yes |
| 3624 | T -> C | No |
| 3637 | C -> T | Yes |
| 6919 | C -> T | Yes |
| 7383 | A -> G | Yes |
| 7701 | A -> G | Yes |
| 8070 | C -> T | Yes |
| 8117 | T -> A | Yes |
| 8361 | T -> C | Yes |
| 8544 | G -> A | Yes |
| 8632 | A -> C | Yes |
| 8685 | A -> G | Yes |
| 9028 | G -> A | Yes |
| 9375 | G -> | No |
| 9375 | G -> A | No |

[2706] The coding portion of transcript HUMCACH1A_PEA_{—}1_T1 (SEQ ID NO:706) is shown in bold; this coding portion starts at position 89 and ends at position 6631. The transcript also has the following SNPs as listed in Table 9 (given according to their position on the nucleotide sequence, with the alternative nucleic acid listed; the last column indicates whether the SNP is known or not; the presence of known SNPs in variant protein HUMCACH1A_PEA_{—}1_P2 (SEQ ID NO:792) sequence provides support for the deduced sequence of this variant protein according to the present invention).

TABLE 9
Nucleic acid SNPs

| SNP position on nucleotide | Alternative | Previously |
|---|---|---|
| sequence | nucleic acid | known SNP? |
| 547 | T -> C | Yes |
| 1192 | C -> T | Yes |
| 1819 | T -> G | Yes |
| 1873 | C -> T | No |
| 1958 | T -> C | Yes |
| 2514 | A -> | No |
| 2848 | C -> T | Yes |
| 3201 | T -> C | No |
| 3214 | C -> T | Yes |
| 6496 | C -> T | Yes |
| 6960 | A -> G | Yes |
| 7278 | A -> G | Yes |
| 7647 | C -> T | Yes |
| 7694 | T -> A | Yes |
| 7938 | T -> C | Yes |
| 8121 | G -> A | Yes |
| 8209 | A -> C | Yes |
| 8262 | A -> G | Yes |
| 8605 | G -> A | Yes |
| 8952 | G -> | No |
| 8952 | G -> A | No |

[2707] The coding portion of transcript HUMCACH1A_PEA_{—}1_T2 (SEQ ID NO:707) is shown in bold; this coding portion starts at position 512 and ends at position 7054. The transcript also has the following SNPs as listed in Table 10 (given according to their position on the nucleotide sequence, with the alternative nucleic acid listed; the last column indicates whether the SNP is known or not; the presence of known SNPs in variant protein HUMCACH1A_PEA_{—}1_P2 (SEQ ID NO:792) sequence provides support for the deduced sequence of this variant protein according to the present invention).

TABLE 10
Nucleic acid SNPs

| SNP position on nucleotide | Alternative | Previously |
|---|---|---|
| sequence | nucleic acid | known SNP? |
| 331 | T -> A | Yes |
| 422 | C -> T | Yes |
| 458 | T -> C | Yes |
| 970 | T -> C | Yes |
| 1615 | C -> T | Yes |
| 2242 | T -> G | Yes |
| 2296 | C -> T | No |
| 2381 | T -> C | Yes |
| 2937 | A -> | No |
| 3271 | C -> T | Yes |
| 3624 | T -> C | No |
| 3637 | C -> T | Yes |
| 6919 | C -> T | Yes |
| 7383 | A -> G | Yes |
| 7701 | A -> G | Yes |
| 8070 | C -> T | Yes |
| 8117 | T -> A | Yes |
| 8361 | T -> C | Yes |
| 8544 | G -> A | Yes |
| 8632 | A -> C | Yes |
| 8685 | A -> G | Yes |
| 9028 | G -> A | Yes |

[2708] The coding portion of transcript HUMCACH1A_PEA_{—}1_T3 (SEQ ID NO:708) is shown in bold; this coding portion starts at position 512 and ends at position 7054. The transcript also has the following SNPs as listed in Table 11 (given according to their position on the nucleotide sequence, with the alternative nucleic acid listed; the last column indicates whether the SNP is known or not; the presence of known SNPs in variant protein HUMCACH1A_PEA_{—}1_P2 (SEQ ID NO:792) sequence provides support for the deduced sequence of this variant protein according to the present invention).

TABLE 11
Nucleic acid SNPs

| SNP position on nucleotide | Alternative | |
|---|---|---|
| sequence | nucleic acid | Previously known SNP? |
| 331 | T -> A | Yes |
| 422 | C -> T | Yes |
| 458 | T -> C | Yes |
| 970 | T -> C | Yes |
| 1615 | C -> T | Yes |
| 2242 | T -> G | Yes |
| 2296 | C -> T | No |
| 2381 | T -> C | Yes |
| 2937 | A -> | No |
| 3271 | C -> T | Yes |
| 3624 | T -> C | No |
| 3637 | C -> T | Yes |
| 6919 | C -> T | Yes |
| 7383 | A -> G | Yes |
| 7701 | A -> G | Yes |
| 8070 | C -> T | Yes |

[2709] The coding portion of transcript HUMCACH1A_PEA_{—}1_T4 (SEQ ID NO:709) is shown in bold; this coding portion starts at position 512 and ends at position 7054. The transcript also has the following SNPs as listed in Table 12 (given according to their position on the nucleotide sequence, with the alternative nucleic acid listed; the last column indicates whether the SNP is known or not; the presence of known SNPs in variant protein HUMCACH1A_PEA_{—}1_P2 (SEQ ID NO:792) sequence provides support for the deduced sequence of this variant protein according to the present invention).

TABLE 12
Nucleic acid SNPs

| SNP position on nucleotide | Alternative | |
|---|---|---|
| sequence | nucleic acid | Previously known SNP? |
| 331 | T -> A | Yes |
| 422 | C -> T | Yes |
| 458 | T -> C | Yes |
| 970 | T -> C | Yes |
| 1615 | C -> T | Yes |
| 2242 | T -> G | Yes |
| 2296 | C -> T | No |
| 2381 | T -> C | Yes |
| 2937 | A -> | No |
| 3271 | C -> T | Yes |
| 3624 | T -> C | No |
| 3637 | C -> T | Yes |
| 6919 | C -> T | Yes |
| 7383 | A -> G | Yes |
| 7701 | A -> G | Yes |

[2710] Variant protein HUMCACH1A_PEA_{—}1_P3 (SEQ ID NO:793) according to the present invention has an amino acid sequence as given at the end of the application; it is encoded by transcript(s) HUMCACH1A_PEA_{—}1_T6 (SEQ ID NO:710). The location of the variant protein was determined according to results from a number of different software programs and analyses, including analyses from SignalP and other specialized programs. The variant protein is believed to be located as follows with regard to the cell: membrane. The protein localization is believed to be membrane because both trans-membrane region prediction programs predicted a trans-membrane region for this protein.

[2711] Variant protein HUMCACH1A_PEA_{—}1_P3 (SEQ ID NO:793) also has the following non-silent SNPs (Single Nucleotide Polymorphisms) as listed in Table 13, (given according to their position(s) on the amino acid sequence, with the alternative amino acid(s) listed; the last column indicates whether the SNP is known or not; the presence of known SNPs in variant protein HUMCACH1A_PEA_{—}1_P3 (SEQ ID NO:793) sequence provides support for the deduced sequence of this variant protein according to the present invention).

TABLE 13
Amino acid mutations

| SNP position(s) on amino acid | Alternative | |
|---|---|---|
| sequence | amino acid(s) | Previously known SNP? |
| 577 | I -> M | Yes |
| 809 | N -> | No |
| 1038 | I -> T | No |

[2712] Variant protein HUMCACH1A_PEA_{—}1_P3 (SEQ ID NO:793) is encoded by the following transcript(s): HUMCACH1A_PEA_{—}1_T6 (SEQ ID NO:710), for which the sequence(s) is/are given at the end of the application. The coding portion of transcript HUMCACH1A_PEA_{—}1_T6 (SEQ ID NO:710) is shown in bold; this coding portion starts at position 512 and ends at position 6157. The transcript also has the following SNPs as listed in Table 14 (given according to their position on the nucleotide sequence, with the alternative nucleic acid listed; the last column indicates whether the SNP is known or not; the presence of known SNPs in variant protein HUMCACH1A_PEA_{—}1_P3 (SEQ ID NO:793) sequence provides support for the deduced sequence of this variant protein according to the present invention).

TABLE 14
Nucleic acid SNPs

| SNP position on nucleotide | Alternative | |
|---|---|---|
| sequence | nucleic acid | Previously known SNP? |
| 331 | T -> A | Yes |
| 422 | C -> T | Yes |
| 458 | T -> C | Yes |
| 970 | T -> C | Yes |
| 1615 | C -> T | Yes |
| 2242 | T -> G | Yes |
| 2296 | C -> T | No |
| 2381 | T -> C | Yes |
| 2937 | A -> | No |
| 3271 | C -> T | Yes |
| 3624 | T -> C | No |
| 3637 | C -> T | Yes |
| 6312 | G -> A | Yes |
| 7098 | C -> T | Yes |
| 7562 | A -> G | Yes |
| 7880 | A -> G | Yes |
| 8249 | C -> T | Yes |
| 8296 | T -> A | Yes |
| 8540 | T -> C | Yes |
| 8723 | G -> A | Yes |
| 8811 | A -> C | Yes |
| 8864 | A -> G | Yes |
| 9207 | G -> A | Yes |
| 9554 | G -> | No |
| 9554 | G -> A | No |

[2713] Variant protein HUMCACH1A_PEA_{—}1_P4 (SEQ ID NO:794) according to the present invention has an amino acid sequence as given at the end of the application; it is encoded by transcript(s) HUMCACH1A_PEA_{—}1_T7 (SEQ ID NO:711). The location of the variant protein was determined according to results from a number of different software programs and analyses, including analyses from SignalP and other specialized programs. The variant protein is believed to be located as follows with regard to the cell: membrane. The protein localization is believed to be membrane because both trans-membrane region prediction programs predicted a trans-membrane region for this protein.

[2714] Variant protein HUMCACH1A_PEA_{—}1_P4 (SEQ ID NO:794) also has the following non-silent SNPs (Single Nucleotide Polymorphisms) as listed in Table 15, (given according to their position(s) on the amino acid sequence, with the alternative amino acid(s) listed; the last column indicates whether the SNP is known or not; the presence of known SNPs in variant protein HUMCACH1A_PEA_{—}1_P4 (SEQ ID NO:794) sequence provides support for the deduced sequence of this variant protein according to the present invention).

TABLE 15
Amino acid mutations

| SNP position(s) on amino acid | Alternative | |
|---|---|---|
| sequence | amino acid(s) | Previously known SNP? |
| 577 | I -> M | Yes |
| 809 | N -> | No |
| 1038 | I -> T | No |

[2715] Variant protein HUMCACH1A_PEA_{—}1_P4 (SEQ ID NO:794) is encoded by the following transcript(s): HUMCACH1A_PEA_{—}1_T7 (SEQ ID NO:711), for which the sequence(s) is/are given at the end of the application. The coding portion of transcript HUMCACH1A_PEA_{—}1_T7 (SEQ ID NO:711) is shown in bold; this coding portion starts at position 512 and ends at position 7027. The transcript also has the following SNPs as listed in Table 16 (given according to their position on the nucleotide sequence, with the alternative nucleic acid listed; the last column indicates whether the SNP is known or not; the presence of known SNPs in variant protein HUMCACH1A_PEA_{—}1_P4 (SEQ ID NO:794) sequence provides support for the deduced sequence of this variant protein according to the present invention).

TABLE 16
Nucleic acid SNPs

| SNP position on nucleotide | Alternative | |
|---|---|---|
| sequence | nucleic acid | Previously known SNP? |
| 331 | T -> A | Yes |
| 422 | C -> T | Yes |
| 458 | T -> C | Yes |
| 970 | T -> C | Yes |
| 1615 | C -> T | Yes |
| 2242 | T -> G | Yes |
| 2296 | C -> T | No |
| 2381 | T -> C | Yes |
| 2937 | A -> | No |
| 3271 | C -> T | Yes |
| 3624 | T -> C | No |
| 3637 | C -> T | Yes |
| 6892 | C -> T | Yes |
| 7356 | A -> G | Yes |
| 7674 | A -> G | Yes |
| 8043 | C -> T | Yes |
| 8090 | T -> A | Yes |
| 8334 | T -> C | Yes |
| 8517 | G -> A | Yes |
| 8605 | A -> C | Yes |
| 8658 | A -> G | Yes |
| 9001 | G -> A | Yes |
| 9348 | G -> | No |
| 9348 | G -> A | No |

[2716] Variant protein HUMCACH1A_PEA_{—}1_P5 (SEQ ID NO:795) according to the present invention has an amino acid sequence as given at the end of the application; it is encoded by transcript(s) HUMCACH1A_PEA_{—}1_T8 (SEQ ID NO:712). The location of the variant protein was determined according to results from a number of different software programs and analyses, including analyses from SignalP and other specialized programs. The variant protein is believed to be located as follows with regard to the cell: membrane. The protein localization is believed to be membrane because both trans-membrane region prediction programs predicted a trans-membrane region for this protein.

[2717] Variant protein HUMCACH1A_PEA_{—}1_P5 (SEQ ID NO:795) also has the following non-silent SNPs (Single Nucleotide Polymorphisms) as listed in Table 17, (given according to their position(s) on the amino acid sequence, with the alternative amino acid(s) listed; the last column indicates whether the SNP is known or not; the presence of known SNPs in variant protein HUMCACH1A_PEA_{—}1_P5 (SEQ ID NO:795) sequence provides support for the deduced sequence of this variant protein according to the present invention).

TABLE 17
Amino acid mutations

| SNP position(s) on amino acid | Alternative | |
|---|---|---|
| sequence | amino acid(s) | Previously known SNP? |
| 557 | I -> M | Yes |
| 789 | N -> | No |
| 1018 | I -> T | No |

[2718] Variant protein HUMCACH1A_PEA_{—}1_P5 (SEQ ID NO:795) is encoded by the following transcript(s): HUMCACH1A_PEA_{—}1_T8 (SEQ ID NO:712), for which the sequence(s) is/are given at the end of the application. The coding portion of transcript HUMCACH1A_PEA_{—}1_T8 (SEQ ID NO:712) is shown in bold; this coding portion starts at position 512 and ends at position 6994. The transcript also has the following SNPs as listed in Table 18 (given according to their position on the nucleotide sequence, with the alternative nucleic acid listed; the last column indicates whether the SNP is known or not; the presence of known SNPs in variant protein HUMCACH1A_PEA_{—}1_P5 (SEQ ID NO:795) sequence provides support for the deduced sequence of this variant protein according to the present invention).

TABLE 18
Nucleic acid SNPs

| SNP position on nucleotide | Alternative | |
|---|---|---|
| sequence | nucleic acid | Previously known SNP? |
| 331 | T -> A | Yes |
| 422 | C -> T | Yes |
| 458 | T -> C | Yes |
| 970 | T -> C | Yes |
| 1615 | C -> T | Yes |
| 2182 | T -> G | Yes |
| 2236 | C -> T | No |
| 2321 | T -> C | Yes |
| 2877 | A -> | No |
| 3211 | C -> T | Yes |
| 3564 | T -> C | No |
| 3577 | C -> T | Yes |
| 6859 | C -> T | Yes |
| 7323 | A -> G | Yes |
| 7641 | A -> G | Yes |
| 8010 | C -> T | Yes |
| 8057 | T -> A | Yes |
| 8301 | T -> C | Yes |
| 8484 | G -> A | Yes |
| 8572 | A -> C | Yes |
| 8625 | A -> G | Yes |
| 8968 | G -> A | Yes |
| 9315 | G -> | No |
| 9315 | G -> A | No |

[2719] Variant protein HUMCACH1A_PEA_{—}1_P7 (SEQ ID NO:796) according to the present invention has an amino acid sequence as given at the end of the application; it is encoded by transcript(s) HUMCACH1A_PEA_{—}1_T12 (SEQ ID NO:713). An alignment is given to the known protein (Voltage-dependent L-type calcium channel alpha-1D subunit (SEQ ID NO:790)) at the end of the application. One or more alignments to one or more previously published protein sequences are given at the end of the application. A brief description of the relationship of the variant protein according to the present invention to each such aligned protein is as follows:

[2720] Comparison Report Between HUMCACH1A_PEA_{—}1_P7 (SEQ ID NO:796) and CCAD_HUMAN_V3 (SEQ ID NO:791):

[2721] 1. An isolated chimeric polypeptide encoding for HUMCACH1A_PEA_{—}1_P7 (SEQ ID NO:796), comprising a first amino acid sequence being at least 90% homologous to MPTSETESVNTENVSGEGENRGCCGSL corresponding to amino acids 466-492 of CCAD_HUMAN_V3 (SEQ ID NO:791), which also corresponds to amino acids 1-27 of HUMCACH1A_PEA_{—}1_P7 (SEQ ID NO:796), a second amino acid sequence being at least 70%, optionally at least 80%, preferably at least 85%, more preferably at least 90% and most preferably at least 95% homologous to a polypeptide having the sequence WCWWRRRGAAKAGPSGCRRWG (SEQ ID NO:1573) corresponding to amino acids 28-48 of HUMCACH1A_PEA_{—}1_P7 (SEQ ID NO:796), and a third amino acid sequence being at least 90% homologous to QAISKSKLSRRWRRWNRFNRRRCRAAVKSVTFYWLVIVLVFLNTLTISSEHYNQPDWLTQIQDIANKVLL ALFTCEMLVKMYSLGLQAYFVSLFNRFDCFVVCGGITETILVELEIMSPLGISVFRCVRLLRIFKVTRHWTS LSNLVASLLNSMKSIASLLLLLFLFIIIFSLLGMQLFGGKFNFDETQTKRSTFDNFPQALLTVFQILTGEDWN AVMYDGIMAYGGPSSSGMIVCIYFIILFICGNYILLNVFLAIAVDNLADAESLNTAQKEEAEEKERKKIARK ESLENKKNNKPEVNQIANSDNKVTIDDYREEDEDKDPYPPCDVPVGEEEEEEEEDEPEVPAGPRPRRISELN MKEKIAPIPEGSAFFILSKTNPIRVGCHKLINHHIFTNLILVFIMLSSAALAAEDPIRSHSFRNTILGYFDYAFT AIFTVEILLKMTTFGAFLHKGAFCRNYFNLLDMLVVGVSLVSFGIQSSAISVVKILRVLRVLRPLRAINRAK GLKHVVQCVFVAIRTIGNIMIVTTLLQFMFACIGVQLFKGKFYRCTDEAKSNPEECRGLFILYKDGDVDSP VVRERIWQNSDFNFDNVLSAMMALFTVSTFEGWPALLYKAIDSNGENIGPIYNHRVEISIFFIIYIIIVAFFM MNIFVGFVIVTFQEQGEKEYKNCELDKNQRQCVEYALKARPLRRYIPKNPYQYKFWYVVNSSPFEYMMF VLIMLNTLCLAMQHYEQSKMFNDAMDILNMVFTGVFTVEMVLKVIAFKPKGYFSDAWNTFDSLIVIGSIID VALSEADPTESENVPVPTATPGNSEESNRISITFFRLFRVMRLVKLLSRGEGIRTLLWTFIKSFQALPYVALLI AMLFFIYAVIGMQMFGKVAMRDNNQINRNNNFQTFPQAVLLLFRCATGEAWQEIMLACLPGKLCDPESD YNPGEEYTCGSNFAIVYFISFYMLCAFLIINLFVAVIMDNFDYLTRDWSILGPHHLDEFKRIWSEYDPEAKG RIKHLDVVTLLRRIQPPLGFGKLCPHRVACKRLVAMNMPLNSDGTVMFNATLFALVRTALKIKTEGNLEQ ANEELRAVIKKIWKKTSMKLLDQVVPPAGDDEVTVGKFYATFLIQDYFRKFKKRKEQGLVGKYPAKNTTI ALQAGLRTLHDIGPEIRRAISCDLQDDEPEETKREEEDDVFKRNGALLGNHVNHVNSDRRDSLQQTNTTH RPLHVQRPSIPPASDTEKPLFPPAGNSVCHNHHNHNSIGKQVPTSTNANLNNANMSKAAHGKRPSIGNLEH VSENGHHSSHKHDREPQRRSSVKRTRYYETYIRSDSGDEQLPTICREDPEIHGYFRDPHCLGEQEYFSSEEC YEDDSSPTWSRQNYGYYSRYPGRNIDSERPRGYHHPQGFLEDDDSPVCYDSRRSPRRRLLPPTPASHRRSS FNFECLRRQSSQEEVPSSPIFPHRTALPLHLMQQQIMAVAGLDSSKAQKYSPSHSTRSWATPPATPPYRDW TPCYTPLIQVEQSEALDQVNGSLPSLHRSSWYTDEPDISYRTFTPASLTVPSSFRNKNSDKQRSADSLVEAV LISEGLGRYARDPKFVSATKHEIADACDLTIDEMESAASTLLNGNVRPRANGDVGPLSHRQDYELQDFGPG YSDEEPDPGRDEEDLADEMICITTL corresponding to amino acids 494-2161 of CCAD_HUMAN_V3 (SEQ ID NO:791), which also corresponds to amino acids 49-1716 of HUMCACH1A_PEA_{—}1_P7 (SEQ ID NO:796), wherein said first amino acid sequence, second amino acid sequence and third amino acid sequence are contiguous and in a sequential order.

[2722] 2. An isolated polypeptide encoding for an edge portion of HUMCACH1A_PEA_{—}1_P7 (SEQ ID NO:796), comprising an amino acid sequence being at least 70%, optionally at least about 80%, preferably at least about 85%, more preferably at least about 90% and most preferably at least about 95% homologous to the sequence encoding for WCWWRRRGAAKAGPSGCRRWG (SEQ ID NO:1573), corresponding to HUMCACH1A_PEA_{—}1_P7 (SEQ ID NO:796).

[2723] 3. A bridge portion of HUMCACH1A_PEA_{—}1_P7 (SEQ ID NO:796), comprising a polypeptide having a length “n”, wherein n is at least about 10 amino acids in length, optionally at least about 20 amino acids in length, preferably at least about 30 amino acids in length, more preferably at least about 40 amino acids in length and most preferably at least about 50 amino acids in length, wherein at least two amino acids comprise L, having a structure as follows (numbering according to HUMCACH1A_PEA_{—}1_P7 (SEQ ID NO:796)): a sequence starting from any of amino acid numbers 492−x to 492; and ending at any of amino acid numbers 28+((n−2)−x), in which x varies from 0 to n−2.

[2724] It should be noted that the known protein sequence (CCAD_HUMAN (SEQ ID NO:790)) has one or more changes than the sequence given at the end of the application and named as being the amino acid sequence for CCAD_HUMAN_V3 (SEQ ID NO:791). These changes were previously known to occur and are listed in the table below.

TABLE 19
Changes to CCAD_HUMAN_V3 (SEQ ID NO: 791)

| SNP position(s) on amino | |
|---|---|
| acid sequence | Type of change |
| 638 | conflict |
| 651 | conflict |
| 1347 | conflict |
| 1434 | conflict |

[2725] The location or the variant protein was determined according to results from a number of different software programs and analyses, including analyses from SignalP and other specialized programs. The variant protein is believed to be located as follows with regard to the cell: membrane. The protein localization is believed to be membrane because both trans-membrane region prediction programs predicted a trans-membrane region for this protein.

[2726] Variant protein HUMCACH1A_PEA_{—}1_P7 (SEQ ID NO:796) also has the following non-silent SNPs (Single Nucleotide Polymorphisms) as listed in Table 20, (given according to their position(s) on the amino acid sequence, with the alternative amino acid(s) listed; the last column indicates whether the SNP is known or not; the presence of known SNPs in variant protein HUMCACH1A_PEA_{—}1_P7 (SEQ ID NO:796) sequence provides support for the deduced sequence of this variant protein according to the present invention).

TABLE 20
Amino acid mutations

| SNP position(s) on amino acid | Alternative | |
|---|---|---|
| sequence | amino acid(s) | Previously known SNP? |
| 112 | I -> M | Yes |
| 344 | N -> | No |
| 573 | I -> T | No |

[2727] Variant protein HUMCACH1A_PEA_{—}1_P7 (SEQ ID NO:796) is encoded by the following transcript(s): HUMCACH1A_PEA_{—}1_T12 (SEQ ID NO:713), for which the sequence(s) is/are given at the end of the application. The coding portion of transcript HUMCACH1A_PEA_{—}1_T12 (SEQ ID NO:713) is shown in bold; this coding portion starts at position 240 and ends at position 5387. The transcript also has the following SNPs as listed in Table 21 (given according to their position on the nucleotide sequence, with the alternative nucleic acid listed; the last column indicates whether the SNP is known or not; the presence of known SNPs in variant protein HUMCACH1A_PEA_{—}1_P7 (SEQ ID NO:796) sequence provides support for the deduced sequence of this variant protein according to the present invention).

TABLE 21
Nucleic acid SNPs

| SNP position on nucleotide | Alternative | |
|---|---|---|
| sequence | nucleic acid | Previously known SNP? |
| 575 | T -> G | Yes |
| 629 | C -> T | No |
| 714 | T -> C | Yes |
| 1270 | A -> | No |
| 1604 | C -> T | Yes |
| 1957 | T -> C | No |
| 1970 | C -> T | Yes |
| 5252 | C -> T | Yes |
| 5716 | A -> G | Yes |
| 6034 | A -> G | Yes |
| 6403 | C -> T | Yes |
| 6450 | T -> A | Yes |
| 6694 | T -> C | Yes |
| 6877 | G -> A | Yes |
| 6965 | A -> C | Yes |
| 7018 | A -> G | Yes |
| 7361 | G -> A | Yes |
| 7708 | G -> | No |
| 7708 | G -> A | No |

[2728] Variant protein HUMCACH1A_PEA_{—}1_P8 (SEQ ID NO:797) according to the present invention has an amino acid sequence as given at the end of the application; it is encoded by transcript(s) HUMCACH1A_PEA_{—}1_T13 (SEQ ID NO:714). The location of the variant protein was determined according to results from a number of different software programs and analyses, including analyses from SignalP and other specialized programs. The variant protein is believed to be located as follows with regard to the cell: membrane. The protein localization is believed to be membrane because both trans-membrane region prediction programs predicted a trans-membrane region for this protein.

[2729] Variant protein HUMCACH1A_PEA_{—}1_P8 (SEQ ID NO:797) also has the following non-silent SNPs (Single Nucleotide Polymorphisms) as listed in Table 22, (given according to their position(s) on the amino acid sequence, with the alternative amino acid(s) listed; the last column indicates whether the SNP is known or not; the presence of known SNPs in variant protein HUMCACH1A_PEA_{—}1_P8 (SEQ ID NO:797) sequence provides support for the deduced sequence of this variant protein according to the present invention).

TABLE 22
Amino acid mutations

| SNP position(s) on amino acid | Alternative | |
|---|---|---|
| sequence | amino acid(s) | Previously known SNP? |
| 577 | I -> M | Yes |
| 809 | N -> | No |
| 1038 | I -> T | No |

[2730] Variant protein HUMCACH1A_PEA_{—}1_P8 (SEQ ID NO:797) is encoded by the following transcript(s): HUMCACH1A_PEA_{—}1_T13 (SEQ ID NO:714), for which the sequence(s) is/are given at the end of the application. The coding portion of transcript HUMCACH1A_PEA_{—}1_T13 (SEQ ID NO:714) is shown in bold; this coding portion starts at position 512 and ends at position 88889. The transcript also has the following SNPs as listed in Table 23 (given according to their position on the nucleotide sequence, with the alternative nucleic acid listed; the last column indicates whether the SNP is known or not; the presence of known SNPs in variant protein HUMCACH1A_PEA_{—}1_P8 (SEQ ID NO:797) sequence provides support for the deduced sequence of this variant protein according to the present invention).

TABLE 23
Nucleic acid SNPs

| SNP position on nucleotide | Alternative | |
|---|---|---|
| sequence | nucleic acid | Previously known SNP? |
| 331 | T -> A | Yes |
| 422 | C -> T | Yes |
| 458 | T -> C | Yes |
| 970 | T -> C | Yes |
| 1615 | C -> T | Yes |
| 2242 | T -> G | Yes |
| 2296 | C -> T | No |
| 2381 | T -> C | Yes |
| 2937 | A -> | No |
| 3271 | C -> T | Yes |
| 3624 | T -> C | No |
| 3637 | C -> T | Yes |

[2731] Variant protein HUMCACH1A_PEA_{—}1_P9 (SEQ ID NO:798) according to the present invention has an amino acid sequence as given at the end of the application; it is encoded by transcript(s) HUMCACH1A_PEA_{—}1_T14 (SEQ ID NO:715). The location of the variant protein was determined according to results from a number of different software programs and analyses, including analyses from SignalP and other specialized programs. The variant protein is believed to be located as follows with regard to the cell: membrane. The protein localization is believed to be membrane because both trans-membrane region prediction programs predicted a trans-membrane region for this protein.

[2732] Variant protein HUMCACH1A_PEA_{—}1_P9 (SEQ ID NO:798) also has the following non-silent SNPs (Single Nucleotide Polymorphisms) as listed in Table 24, (given according to their position(s) on the amino acid sequence, with the alternative amino acid(s) listed; the last column indicates whether the SNP is known or not; the presence of known SNPs in variant protein HUMCACH1A_PEA_{—}1_P9 (SEQ ID NO:798) sequence provides support for the deduced sequence of this variant protein according to the present invention).

TABLE 24
Amino acid mutations

| SNP position(s) on amino acid | Alternative | |
|---|---|---|
| sequence | amino acid(s) | Previously known SNP? |
| 577 | I -> M | Yes |
| 809 | N -> | No |
| 1038 | I -> T | No |

[2733] Variant protein HUMCACH1A_PEA_{—}1_P9 (SEQ ID NO:798) is encoded by the following transcript(s): HUMCACH1A_PEA_{—}1_T14 (SEQ ID NO:715), for which the sequence(s) is/are given at the end of the application. The coding portion of transcript HUMCACH1A_PEA_{—}1_T14 (SEQ ID NO:715) is shown in bold; this coding portion starts at position 512 and ends at position 5386. The transcript also has the following SNPs as listed in Table 25 (given according to their position on the nucleotide sequence, with the alternative nucleic acid listed; the last column indicates whether the SNP is known or not; the presence of known SNPs in variant protein HUMCACH1A_PEA_{—}1_P9 (SEQ ID NO:798) sequence provides support for the deduced sequence of this variant protein according to the present invention).

TABLE 25
Nucleic acid SNPs

| SNP position on nucleotide | Alternative | |
|---|---|---|
| sequence | nucleic acid | Previously known SNP? |
| 331 | T -> A | Yes |
| 422 | C -> T | Yes |
| 458 | T -> C | Yes |
| 970 | T -> C | Yes |
| 1615 | C -> T | Yes |
| 2242 | T -> G | Yes |
| 2296 | C -> T | No |
| 2381 | T -> C | Yes |
| 2937 | A -> | No |
| 3271 | C -> T | Yes |
| 3624 | T -> C | No |
| 3637 | C -> T | Yes |

[2734] Variant protein HUMCACH1A_PEA_{—}1_P10 (SEQ ID NO:799) according to the present invention has an amino acid sequence as given at the end of the application; it is encoded by transcript(s) HUMCACH1A_PEA_{—}1_T15 (SEQ ID NO:716). The location of the variant protein was determined according to results from a number of different software programs and analyses, including analyses from SignalP and other specialized programs. The variant protein is believed to be located as follows with regard to the cell: membrane. The protein localization is believed to be membrane because both trans-membrane region prediction programs predicted a trans-membrane region for this protein.

[2735] Variant protein HUMCACH1A_PEA_{—}1_P10 (SEQ ID NO:799) also has the following non-silent SNPs (Single Nucleotide Polymorphisms) as listed in Table 26, (given according to their position(s) on the amino acid sequence, with the alternative amino acid(s) listed; the last column indicates whether the SNP is known or not; the presence of known SNPs in variant protein HUMCACH1A_PEA_{—}1_P10 (SEQ ID NO:799) sequence provides support for the deduced sequence of this variant protein according to the present invention).

TABLE 26
Amino acid mutations

| SNP position(s) | | |
|---|---|---|
| on amino acid | Alternative | Previously |
| sequence | amino acid(s) | known SNP? |
| 577 | I -> M | Yes |
| 809 | N -> | No |
| 1038 | I -> T | No |

[2736] Variant protein HUMCACH1A_PEA_{—}1_P10 (SEQ ID NO:799) is encoded by the following transcript(s): HUMCACH1A_PEA_{—}1_T15 (SEQ ID NO:716), for which the sequence(s) is/are given at the end of the application. The coding portion of transcript HUMCACH1A_PEA_{—}1_T15 (SEQ ID NO:716) is shown in bold; this coding portion starts at position 512 and ends at position 88889. The transcript also has the following SNPs as listed in Table 27 (given according to their position on the nucleotide sequence, with the alternative nucleic acid listed; the last column indicates whether the SNP is known or not; the presence of known SNPs in variant protein HUMCACH1A_PEA_{—}1_P10 (SEQ ID NO:799) sequence provides support for the deduced sequence of this variant protein according to the present invention).

TABLE 27
Nucleic acid SNPs

| SNP position | | |
|---|---|---|
| on nucleotide | Alternative | Previously |
| sequence | nucleic acid | known SNP? |
| 331 | T -> A | Yes |
| 422 | C -> T | Yes |
| 458 | T -> C | Yes |
| 970 | T -> C | Yes |
| 1615 | C -> T | Yes |
| 2242 | T -> G | Yes |
| 2296 | C -> T | No |
| 2381 | T -> C | Yes |
| 2937 | A -> | No |
| 3271 | C -> T | Yes |
| 3624 | T -> C | No |
| 3637 | C -> T | Yes |

[2737] Variant protein HUMCACH1A_PEA_{—}1_P11 (SEQ ID NO:800) according to the present invention has an amino acid sequence as given at the end of the application; it is encoded by transcript(s) HUMCACH1A_PEA_{—}1_T16 (SEQ ID NO:717). The location of the variant protein was determined according to results from a number of different software programs and analyses, including analyses from SignalP and other specialized programs. The variant protein is believed to be located as follows with regard to the cell: membrane. The protein localization is believed to be membrane because both trans-membrane region prediction programs predicted a trans-membrane region for this protein.

[2738] Variant protein HUMCACH1A_PEA_{—}1_P11 (SEQ ID NO:800) also has the following non-silent SNPs (Single Nucleotide Polymorphisms) as listed in Table 28, (given according to their position(s) on the amino acid sequence, with the alternative amino acid(s) listed; the last column indicates whether the SNP is known or not; the presence of known SNPs in variant protein HUMCACH1A_PEA_{—}1_P11 (SEQ ID NO:800) sequence provides support for the deduced sequence of this variant protein according to the present invention).

TABLE 28
Amino acid mutations

| SNP position(s) | | |
|---|---|---|
| on amino acid | Alternative | Previously |
| sequence | amino acid(s) | known SNP? |
| 577 | I -> M | Yes |
| 809 | N -> | No |

[2739] Variant protein HUMCACH1A_PEA_{—}1_P11 (SEQ ID NO:800) is encoded by the following transcript(s): HUMCACH1A_PEA_{—}1_T16 (SEQ ID NO:717), for which the sequence(s) is/are given at the end of the application. The coding portion of transcript HUMCACH1A_PEA_{—}1_T16 (SEQ ID NO:717) is shown in bold; this coding portion starts at position 512 and ends at position 88889. The transcript also has the following SNPs as listed in Table 29 (given according to their position on the nucleotide sequence, with the alternative nucleic acid listed; the last column indicates whether the SNP is known or not; the presence of known SNPs in variant protein HUMCACH1A_PEA_{—}1_P11 (SEQ ID NO:800) sequence provides support for the deduced sequence of this variant protein according to the present invention).

TABLE 29
Nucleic acid SNPs

| SNP position | | |
|---|---|---|
| on nucleotide | Alternative | Previously |
| sequence | nucleic acid | known SNP? |
| 331 | T -> A | Yes |
| 422 | C -> T | Yes |
| 458 | T -> C | Yes |
| 970 | T -> C | Yes |
| 1615 | C -> T | Yes |
| 2242 | T -> G | Yes |
| 2296 | C -> T | No |
| 2381 | T -> C | Yes |
| 2937 | A -> | No |
| 3271 | C -> T | Yes |

[2740] Variant protein HUMCACH1A_PEA_{—}1_P12 (SEQ ID NO:801) according to the present invention has an amino acid sequence as given at the end of the application; it is encoded by transcript(s) HUMCACH1A_PEA_{—}1_T17 (SEQ ID NO:718). The location of the variant protein was determined according to results from a number of different software programs and analyses, including analyses from SignalP and other specialized programs. The variant protein is believed to be located as follows with regard to the cell: membrane. The protein localization is believed to be membrane because both trans-membrane region prediction programs predicted a trans-membrane region for this protein.

[2741] Variant protein HUMCACH1A_PEA_{—}1_P12 (SEQ ID NO:801) is encoded by the following transcript(s): HUMCACH1A_PEA_{—}1_T17 (SEQ ID NO:718), for which the sequence(s) is/are given at the end of the application. The coding portion of transcript HUMCACH1A_PEA_{—}1_T17 (SEQ ID NO:718) is shown in bold; this coding portion starts at position 1 and ends at position 2644. The transcript also has the following SNPs as listed in Table 30 (given according to their position on the nucleotide sequence, with the alternative nucleic acid listed; the last column indicates whether the SNP is known or not; the presence of known SNPs in variant protein HUMCACH1A_PEA_{—}1_P12 (SEQ ID NO:801) sequence provides support for the deduced sequence of this variant protein according to the present invention).

TABLE 30
Nucleic acid SNPs

| SNP position | | |
|---|---|---|
| on nucleotide | Alternative | Previously |
| sequence | nucleic acid | known SNP? |
| 2509 | C -> T | Yes |
| 2973 | A -> G | Yes |
| 3291 | A -> G | Yes |
| 3660 | C -> T | Yes |
| 3707 | T -> A | Yes |
| 3951 | T -> C | Yes |
| 4134 | G -> A | Yes |
| 4222 | A -> C | Yes |
| 4275 | A -> G | Yes |
| 4618 | G -> A | Yes |
| 4965 | G -> | No |
| 4965 | G -> A | No |

[2742] Variant protein HUMCACH1A_PEA_{—}1_P13 (SEQ ID NO:802) according to the present invention has an amino acid sequence as given at the end of the application; it is encoded by transcript(s) HUMCACH1A_PEA_{—}1_T18 (SEQ ID NO:719). An alignment is given to the known protein (Voltage-dependent L-type calcium channel alpha-1D subunit (SEQ ID NO:790)) at the end of the application. One or more alignments to one or more previously published protein sequences are given at the end of the application. A brief description of the relationship of the variant protein according to the present invention to each such aligned protein is as follows:

[2743] Comparison Report Between HUMCACH1A_PEA_{—}1_P13 (SEQ ID NO:802) and CCAD_HUMAN (SEQ ID NO:790):

[2744] 1. An isolated chimeric polypeptide encoding for HUMCACH1A_PEA_{—}1_P13 (SEQ ID NO:802), comprising a first amino acid sequence being at least 70%, optionally at least 80%, preferably at least 85%, more preferably at least 90% and most preferably at least 95% homologous to a polypeptide having the sequence MLRPRCLLRRTAHPPHSAPAPAPARSKCLGSWSNVLIRESSVWSLRL (SEQ ID NO:1477) corresponding to amino acids 1-47 of HUMCACH1A_PEA_{—}1_P13 (SEQ ID NO:802), and a second amino acid sequence being at least 90% homologous to DDEVTVGKFYATFLIQDYFRKFKKRKEQGLVGKYPAKNTTIALQAGLRTLHDIGPEIRRAISCDLQDDEPE ETKREEEDDVFKRNGALLGNHVNHVNSDRRDSLQQTNTTHRPLHVQRPSIPPASDTEKPLFPPAGNSVCH NHHNHNSIGKQVPTSTNANLNNANMSKAAHGKRPSIGNLEHVSENGHHSSHKHDREPQRRSSVKRTRYY ETYIRSDSGDEQLPTICREDPEIHGYFRDPHCLGEQEYFSSEECYEDDSSPTWSRQNYGYYSRYPGRNIDSE RPRGYHHPQGFLEDDDSPVCYDSRRSPRRRLLPPTPASHRRSSFNFECLRRQSSQEEVPSSPIFPHRTALPLH LMQQQIMAVAGLDSSKAQKYSPSHSTRSWATPPATPPYRDWTPCYTPLIQVEQSEALDQVNGSLPSLHRSS WYTDEPDISYRTFTPASLTVPSSFRNKNSDKQRSADSLVEAVLISEGLGRYARDPKFVSATKHEIADACDLT IDEMESAASTLLNGNVRPRANGDVGPLSHRQDYELQDFGPGYSDEEPDPGRDEEDLADEMICITTL corresponding to amino acids 1598-2161 of CCAD_HUMAN (SEQ ID NO:790), which also corresponds to amino acids 48-611 of HUMCACH1A_PEA_{—}1_P13 (SEQ ID NO:802), wherein said first amino acid sequence and second amino acid sequence are contiguous and in a sequential order.

[2745] 2. An isolated polypeptide encoding for a head of HUMCACH1A_PEA_{—}1_P13 (SEQ ID NO:802), comprising a polypeptide being at least 70%, optionally at least about 80%, preferably at least about 85%, more preferably at least about 90% and most preferably at least about 95% homologous to the sequence MLRPRCLLRRTAHPPHSAPAPAPARSKCLGSWSNVLIRESSVWSLRL (SEQ ID NO:1477) of HUMCACH1A_PEA_{—}1_P13 (SEQ ID NO:802).

[2746] The location of the variant protein was determined according to results from a number of different software programs and analyses, including analyses from SignalP and other specialized programs. The variant protein is believed to be located as follows with regard to the cell: intracellularly. The protein localization is believed to be intracellularly because neither of the trans-membrane region prediction programs predicted a trans-membrane region for this protein. In addition both signal-peptide prediction programs predict that this protein is a non-secreted protein.

[2747] The glycosylation sites of variant protein HUMCACH1A_PEA_{—}1_P13 (SEQ ID NO:802), as compared to the known protein Voltage-dependent L-type calcium channel alpha-1D subunit (SEQ ID NO:790), are described in Table 31 (given according to their position(s) on the amino acid sequence in the first column; the second column indicates whether the glycosylation site is present in the variant protein; and the last column indicates whether the position is different on the variant protein).

TABLE 31
Glycosylation site(s)

| Position(s) on | | |
|---|---|---|
| known amino acid | Present in | Position in |
| sequence | variant protein? | variant protein? |
| 225 | no | |
| 155 | no | |
| 329 | no | |

[2748] The phosphorilation sites of variant protein HUMCACH1A_PEA_{—}1_P13 (SEQ ID NO:802), as compared to the known protein Voltage-dependent L-type calcium channel alpha-1D subunit (SEQ ID NO:790), are described in Table 32 (given according to their position(s) on the amino acid sequence in the first column; the second column indicates whether the phosphorilation site is present in the variant protein; and the last column indicates whether the position is different on the variant protein).

TABLE 32
Phosphorilation site(s)

| Position(s) on | | |
|---|---|---|
| known amino acid | Present in | Position in |
| sequence | variant protein? | variant protein? |
| 1475 | no | |

[2749] Variant protein HUMCACH1A_PEA_{—}1_P13 (SEQ ID NO:802) is encoded by the following transcript(s): HUMCACH1A_PEA_{—}1_T18 (SEQ ID NO:719), for which the sequence(s) is/are given at the end of the application. The coding portion of transcript HUMCACH1A_PEA_{—}1_T18 (SEQ ID NO:719) is shown in bold; this coding portion starts at position 63 and ends at position 1895. The transcript also has the following SNPs as listed in Table 33 (given according to their position on the nucleotide sequence, with the alternative nucleic acid listed; the last column indicates whether the SNP is known or not; the presence of known SNPs in variant protein HUMCACH1A_PEA_{—}1_P13 (SEQ ID NO:802) sequence provides support for the deduced sequence of this variant protein according to the present invention).

TABLE 33
Nucleic acid SNPs

| SNP position on | | |
|---|---|---|
| nucleotide | Alternative | Previously |
| sequence | nucleic acid | known SNP? |
| 1760 | C -> T | Yes |
| 2224 | A -> G | Yes |
| 2542 | A -> G | Yes |
| 2911 | C -> T | Yes |
| 2958 | T -> A | Yes |
| 3202 | T -> C | Yes |
| 3385 | G -> A | Yes |
| 3473 | A -> C | Yes |
| 3526 | A -> G | Yes |
| 3869 | G -> A | Yes |
| 4216 | G -> | No |
| 4216 | G -> A | No |

[2750] Variant protein HUMCACH1A_PEA_{—}1_P14 (SEQ ID NO:803) according to the present invention has an amino acid sequence as given at the end of the application; it is encoded by transcript(s) HUMCACH1A_PEA_{—}1_T19 (SEQ ID NO:720). An alignment is given to the known protein (Voltage-dependent L-type calcium channel alpha-1D subunit (SEQ ID NO:790)) at the end of the application. One or more alignments to one or more previously published protein sequences are given at the end of the application. A brief description of the relationship of the variant protein according to the present invention to each such aligned protein is as follows:

[2751] Comparison Report Between HUMCACH1A_PEA_{—}1_P14 (SEQ ID NO:803) and CCAD_HUMAN (SEQ ID NO:790):

[2752] 1. An isolated chimeric polypeptide encoding for HUMCACH1A_PEA_{—}1_P14 (SEQ ID NO:803), comprising a first amino acid sequence being at least 90% homologous to MSKAAHGKRPSIGNLEHVSENGHHSSHKHDREPQRRSSVKRTRYYETYIRSDSGDEQLPTICREDPEIHGYF RDPHCLGEQEYFSSEECYEDDSSPTWSRQNYGYYSRYPGRNIDSERPRGYHHPQGFLEDDDSPVCYDSRRS PRRRLLPPTPASHRRSSFNFECLRRQSSQEEVPSSPIFPHRTALPLHLMQQQIMAVAGLDSSKAQKYSPSHST RSWATPPATPPYRDWTPCYTPLIQVEQSEALDQVNGSLPSLHRSSWYTDEPDISYRTFTPASLTVPSSFRNK NSDKQRSADSLVEAVLISEGLGRYARDPKFVSATKHEIADACDLTIDEMESAASTLLNGNVRPRANGDVG PLSHRQDYELQDFGPGYSDEEPDPGRDEEDLADEMICITTL corresponding to amino acids 1763-2161 of CCAD_HUMAN (SEQ ID NO:790), which also corresponds to amino acids 1-399 of HUMCACH1A_PEA_{—}1_P14 (SEQ ID NO:803).

[2753] The location of the variant protein was determined according to results from a number of different software programs and analyses, including analyses from SignalP and other specialized programs. The variant protein is believed to be located as follows with regard to the cell: intracellularly. The protein localization is believed to be intracellularly because neither of the trans-membrane region prediction programs predicted a trans-membrane region for this protein. In addition both signal-peptide prediction programs predict that this protein is a non-secreted protein.

[2754] The glycosylation sites of variant protein HUMCACH1A_PEA_{—}1_P14 (SEQ ID NO:803), as compared to the known protein Voltage-dependent L-type calcium channel alpha-1D subunit (SEQ ID NO:790), are described in Table 34 (given according to their position(s) on the amino acid sequence in the first column; the second column indicates whether the glycosylation site is present in the variant protein; and the last column indicates whether the position is different on the variant protein).

TABLE 34
Glycosylation site(s)

| Position(s) on | | |
|---|---|---|
| known amino acid | Present in | Position in |
| sequence | variant protein? | variant protein? |
| 225 | no | |
| 155 | no | |
| 329 | no | |

[2755] The phosphorilation sites of variant protein HUMCACH1A_PEA_{—}1_P14 (SEQ ID NO:803), as compared to the known protein Voltage-dependent L-type calcium channel alpha-1D subunit (SEQ ID NO:790), are described in Table 35 (given according to their position(s) on the amino acid sequence in the first column; the second column indicates whether the phosphorilation site is present in the variant protein; and the last column indicates whether the position is different on the variant protein).

TABLE 35
Phosphorilation site(s)

| Position(s) on | | |
|---|---|---|
| known amino acid | Present in | Position in |
| sequence | variant protein? | variant protein? |
| 1475 | no | |

[2756] Variant protein HUMCACH1A_PEA_{—}1_P14 (SEQ ID NO:803) is encoded by the following transcript(s): HUMCACH1A_PEA_{—}1_T19 (SEQ ID NO:720), for which the sequence(s) is/are given at the end of the application. The coding portion of transcript HUMCACH1A_PEA_{—}1_T19 (SEQ ID NO:720) is shown in bold; this coding portion starts at position 1820 and ends at position 3016. The transcript also has the following SNPs as listed in Table 36 (given according to their position on the nucleotide sequence, with the alternative nucleic acid listed; the last column indicates whether the SNP is known or not; the presence of known SNPs in variant protein HUMCACH1A_PEA_{—}1_P14 (SEQ ID NO:803) sequence provides support for the deduced sequence of this variant protein according to the present invention).

TABLE 36
Nucleic acid SNPs

| SNP position | | |
|---|---|---|
| on nucleotide | Alternative | Previously |
| sequence | nucleic acid | known SNP? |
| 84 | G -> T | Yes |
| 542 | G -> A | Yes |
| 579 | G -> A | Yes |
| 690 | A -> G | Yes |
| 890 | C -> T | Yes |
| 2881 | C -> T | Yes |
| 3345 | A -> G | Yes |
| 3663 | A -> G | Yes |
| 4032 | C -> T | Yes |
| 4079 | T -> A | Yes |
| 4323 | T -> C | Yes |
| 4506 | G -> A | Yes |
| 4594 | A -> C | Yes |
| 4647 | A -> G | Yes |
| 4990 | G -> A | Yes |
| 5337 | G -> | No |
| 5337 | G -> A | No |

[2757] Variant protein HUMCACH1A_PEA_{—}1_P15 (SEQ ID NO:804) according to the present invention has an amino acid sequence as given at the end of the application; it is encoded by transcript(s) HUMCACH1A_PEA_{—}1_T20 (SEQ ID NO:721). The location of the variant protein was determined according to results from a number of different software programs and analyses, including analyses from SignalP and other specialized programs. The variant protein is believed to be located as follows with regard to the cell: membrane. The protein localization is believed to be membrane because both trans-membrane region prediction programs predicted a trans-membrane region for this protein.

[2758] Variant protein HUMCACH1A_PEA_{—}1_P15 (SEQ ID NO:804) is encoded by the following transcript(s): HUMCACH1A_PEA_{—}1_T20 (SEQ ID NO:721), for which the sequence(s) is/are given at the end of the application. The coding portion of transcript HUMCACH1A_PEA_{—}1_T20 (SEQ ID NO:721) is shown in bold; this coding portion starts at position 512 and ends at position 1732. The transcript also has the following SNPs as listed in Table 37 (given according to their position on the nucleotide sequence, with the alternative nucleic acid listed; the last column indicates whether the SNP is known or not; the presence of known SNPs in variant protein HUMCACH1A_PEA_{—}1_P15 (SEQ ID NO:804) sequence provides support for the deduced sequence of this variant protein according to the present invention).

TABLE 37
Nucleic acid SNPs

| SNP position | | |
|---|---|---|
| on nucleotide | Alternative | Previously |
| sequence | nucleic acid | known SNP? |
| 331 | T -> A | Yes |
| 422 | C -> T | Yes |
| 458 | T -> C | Yes |
| 970 | T -> C | Yes |
| 1615 | C -> T | Yes |

[2759] Variant protein HUMCACH1A_PEA_{—}1_P17 (SEQ ID NO:805) according to the present invention has an amino acid sequence as given at the end of the application; it is encoded by transcript(s) HUMCACH1A_PEA_{—}1_T22 (SEQ ID NO:722). An alignment is given to the known protein (Voltage-dependent L-type calcium channel alpha-1D subunit (SEQ ID NO:790)) at the end of the application. One or more alignments to one or more previously published protein sequences are given at the end of the application. A brief description of the relationship of the variant protein according to the present invention to each such aligned protein is as follows:

[2760] Comparison Report Between HUMCACH1A_PEA_{—}1_P17 (SEQ ID NO:805) and CCAD_HUMAN (SEQ ID NO:790):

[2761] 1. An isolated chimeric polypeptide encoding for HUMCACH1A_PEA_{—}1_P17 (SEQ ID NO:805), comprising a first amino acid sequence being at least 90% homologous to MMMMMMMKKMQHQRQQQADHANEANYARGTRLPLSGEGPTSQPNSSKQTVLSWQAAIDAARQAKAA QTMSTSAPPPVGSLSQRKRQQYAKSKKQGNSSNSRPARALFCLSLNNPIRRACISIVEWKPFDIFILLAIFAN CVALAIYIPFPEDDSNSTNHNLEKVEYAFLIIFTVETFLKIIAYGLLLHPNAYVRNGWNLLDFVIVIVGLFSVI LEQLTKETEGGNHSSGKSGGFDVKALRAFRVLRPLRLVSGVPSLQVVLNSIIKAMVPLLHIALLVLFVIIIYA IIGLELFIGKMHKTCFFADSDIVAEEDPAPCAFSGNGRQCTANGTECRSGWVGPNGGITNFDNFAFAMLTV FQCITMEGWTDVLYWMNDAMGFELPWVYFVSLVIFGSFFVLNLVLGVLSG corresponding to amino acids 1-407 of CCAD_HUMAN (SEQ ID NO:790), which also corresponds to amino acids 1-407 of HUMCACH1A_PEA_{—}1_P17 (SEQ ID NO:805), and a second amino acid sequence being at least 70%, optionally at least 80%, preferably at least 85%, more preferably at least 90% and most preferably at least 95% homologous to a polypeptide having the sequence HGGSRL (SEQ ID NO:1478) corresponding to amino acids 408-413 of HUMCACH1A_PEA_{—}1_P17 (SEQ ID NO:805), wherein said first amino acid sequence and second amino acid sequence are contiguous and in a sequential order.

[2762] 2. An isolated polypeptide encoding for a tail of HUMCACH1A_PEA_{—}1_P17 (SEQ ID NO:805), comprising a polypeptide being at least 70%, optionally at least about 80%, preferably at least about 85%, more preferably at least about 90% and most preferably at least about 95% homologous to the sequence HGGSRL (SEQ ID NO:1478) in HUMCACH1A_PEA_{—}1_P17 (SEQ ID NO:805).

[2763] The location of the variant protein was determined according to results from a number of different software programs and analyses, including analyses from SignalP and other specialized programs. The variant protein is believed to be located as follows with regard to the cell: membrane. The protein localization is believed to be membrane because both trans-membrane region prediction programs predicted a trans-membrane region for this protein.

[2764] Variant protein HUMCACH1A_PEA_{—}1_P17 (SEQ ID NO:805) also has the following non-silent SNPs (Single Nucleotide Polymorphisms) as listed in Table 38, (given according to their position(s) on the amino acid sequence, with the alternative amino acid(s) listed; the last column indicates whether the SNP is known or not; the presence of known SNPs in variant protein HUMCACH1A_PEA_{—}1_P17 (SEQ ID NO:805) sequence provides support for the deduced sequence of this variant protein according to the present invention).

TABLE 38
Amino acid mutations

| SNP position(s) | | |
|---|---|---|
| on amino acid | Alternative | Previously |
| sequence | amino acid(s) | known SNP? |
| 409 | G -> S | No |

[2765] The glycosylation sites or variant protein HUMCACH1A_PEA_{—}1_P17 (SEQ ID NO:805), as compared to the known protein Voltage-dependent L-type calcium channel alpha-1D subunit (SEQ ID NO:790), are described in Table 39 (given according to their position(s) on the amino acid sequence in the first column; the second column indicates whether the glycosylation site is present in the variant protein; and the last column indicates whether the position is different on the variant protein).

TABLE 39
Glycosylation site(s)

| Position(s) on | | |
|---|---|---|
| known amino acid | Present in | Position in |
| sequence | variant protein? | variant protein? |
| 225 | yes | 225 |
| 155 | yes | 155 |
| 329 | yes | 329 |

[2766] The phosphorilation sites of variant protein HUMCACH1A_PEA_{—}1_P17 (SEQ ID NO:805), as compared to the known protein Voltage-dependent L-type calcium channel alpha-1D subunit (SEQ ID NO:790), are described in Table 40 (given according to their position(s) on the amino acid sequence in the first column; the second column indicates whether the phosphorilation site is present in the variant protein; and the last column indicates whether the position is different on the variant protein).

TABLE 40
Phosphorilation site(s)

| Position(s) on | | |
|---|---|---|
| known amino acid | Present in | Position in |
| sequence | variant protein? | variant protein? |
| 1475 | no | |

[2767] Variant protein HUMCACH1A_PEA_{—}1_P17 (SEQ ID NO:805) is encoded by the following transcript(s): HUMCACH1A_PEA_{—}1_T22 (SEQ ID NO:722), for which the sequence(s) is/are given at the end of the application. The coding portion of transcript HUMCACH1A_PEA_{—}1_T22 (SEQ ID NO:722) is shown in bold; this coding portion starts at position 512 and ends at position 1750. The transcript also has the following SNPs as listed in Table 41 (given according to their position on the nucleotide sequence, with the alternative nucleic acid listed; the last column indicates whether the SNP is known or not; the presence of known SNPs in variant protein HUMCACH1A_PEA_{—}1_P17 (SEQ ID NO:805) sequence provides support for the deduced sequence of this variant protein according to the present invention).

TABLE 41
Nucleic acid SNPs

| SNP position on nucleotide | Alternative | |
|---|---|---|
| sequence | nucleic acid | Previously known SNP? |
| 331 | T -> A | Yes |
| 422 | C -> T | Yes |
| 458 | T -> C | Yes |
| 970 | T -> C | Yes |
| 1615 | C -> T | Yes |
| 1736 | G -> A | No |
| 1848 | G -> A | No |
| 2004 | A -> T | Yes |
| 2006 | C -> T | Yes |
| 2020 | A -> | Yes |
| 2045 | A -> G | Yes |
| 2235 | G -> A | Yes |
| 2432 | C -> A | Yes |
| 2565 | T -> A | Yes |
| 2749 | C -> T | Yes |
| 2887 | C -> T | Yes |
| 3099 | A -> G | Yes |
| 3319 | C -> T | Yes |

[2768] As noted above, cluster HUMCACH1A features 67 segment(s), which were listed in Table 2 above and for which the sequence(s) are given at the end of the application. These segment(s) are portions of nucleic acid sequence(s) which are described herein separately because they are of particular interest. A description of each segment according to the present invention is now provided.

[2769] Segment cluster HUMCACH1A_PEA_{—}1_node_{—}2 (SEQ ID NO:723) according to the present invention is supported by 1 libraries. The number of libraries was determined as previously described. This segment can be found in the following transcript(s): HUMCACH1A_PEA_{—}1_T0 (SEQ ID NO:705), HUMCACH1A_PEA_{—}1_T2 (SEQ ID NO:707), HUMCACH1A_PEA_{—}1_T3 (SEQ ID NO:708), HUMCACH1A_PEA_{—}1_T4 (SEQ ID NO:709), HUMCACH1A_PEA_{—}1_T6 (SEQ ID NO:710), HUMCACH1A_PEA_{—}1_T7 (SEQ ID NO:711), HUMCACH1A_PEA_{—}1_T8 (SEQ ID NO:712), HUMCACH1A_PEA_{—}1_T13 (SEQ ID NO:714), HUMCACH1A_PEA_{—}1_T14 (SEQ ID NO:715), HUMCACH1A_PEA_{—}1_T15 (SEQ ID NO:716), HUMCACH1A_PEA_{—}1_T16 (SEQ ID NO:717), HUMCACH1A_PEA_{—}1_T20 (SEQ ID NO:721) and HUMCACH1A_PEA_{—}1_T22 (SEQ ID NO:722). Table 42 below describes the starting and ending position of this segment on each transcript.

TABLE 42
Segment location on transcripts

| | Segment | Segment |
|---|---|---|
| | starting | ending |
| Transcript name | position | position |
| HUMCACH1A_PEA_1_T0 (SEQ ID NO: 705) | 1 | 468 |
| HUMCACH1A_PEA_1_T2 (SEQ ID NO: 707) | 1 | 468 |
| HUMCACH1A_PEA_1_T3 (SEQ ID NO: 708) | 1 | 468 |
| HUMCACH1A_PEA_1_T4 (SEQ ID NO: 709) | 1 | 468 |
| HUMCACH1A_PEA_1_T6 (SEQ ID NO: 710) | 1 | 468 |
| HUMCACH1A_PEA_1_T7 (SEQ ID NO: 711) | 1 | 468 |
| HUMCACH1A_PEA_1_T8 (SEQ ID NO: 712) | 1 | 468 |
| HUMCACH1A_PEA_1_T13 (SEQ ID NO: | 1 | 468 |
| 714) | | |
| HUMCACH1A_PEA_1_T14 (SEQ ID NO: | 1 | 468 |
| 715) | | |
| HUMCACH1A_PEA_1_T15 (SEQ ID NO: | 1 | 468 |
| 716) | | |
| HUMCACH1A_PEA_1_T16 (SEQ ID NO: | 1 | 468 |
| 717) | | |
| HUMCACH1A_PEA_1_T20 (SEQ ID NO: | 1 | 468 |
| 721) | | |
| HUMCACH1A_PEA_1_T22 (SEQ ID NO: | 1 | 468 |
| 722) | | |

[2770] Segment cluster HUMCACH1A_PEA_{—}1_node_{—}5 (SEQ ID NO:724) according to the present invention is supported by 3 libraries. The number of libraries was determined as previously described. This segment can be found in the following transcript(s): HUMCACH1A_PEA_{—}1_T0 (SEQ ID NO:705), HUMCACH1A_PEA_{—}1_T1 (SEQ ID NO:706), HUMCACH1A_PEA_{—}1_T2 (SEQ ID NO:707), HUMCACH1A_PEA_{—}1_T3 (SEQ ID NO:708), HUMCACH1A_PEA_{—}1_T4 (SEQ ID NO:709), HUMCACH1A_PEA_{—}1_T6 (SEQ ID NO:710), HUMCACH1A_PEA_{—}1_T7 (SEQ ID NO:711), HUMCACH1A_PEA_{—}1_T8 (SEQ ID NO:712), HUMCACH1A_PEA_{—}1_T13 (SEQ ID NO:714), HUMCACH1A_PEA_{—}1_T14 (SEQ ID NO:715), HUMCACH1A_PEA_{—}1_T15 (SEQ ID NO:716), HUMCACH1A_PEA_{—}1_T16 (SEQ ID NO:717), HUMCACH1A_PEA_{—}1_T20 (SEQ ID NO:721) and HUMCACH1A_PEA_{—}1_T22 (SEQ ID NO:722). Table 43 below describes the starting and ending position of this segment on each transcript.

TABLE 43
Segment location on transcripts

| | Segment | Segment |
|---|---|---|
| | starting | ending |
| Transcript name | position | position |
| HUMCACH1A_PEA_1_T0 (SEQ ID NO: 705) | 579 | 888 |
| HUMCACH1A_PEA_1_T1 (SEQ ID NO: 706) | 156 | 465 |
| HUMCACH1A_PEA_1_T2 (SEQ ID NO: 707) | 579 | 888 |
| HUMCACH1A_PEA_1_T3 (SEQ ID NO: 708) | 579 | 888 |
| HUMCACH1A_PEA_1_T4 (SEQ ID NO: 709) | 579 | 888 |
| HUMCACH1A_PEA_1_T6 (SEQ ID NO: 710) | 579 | 888 |
| HUMCACH1A_PEA_1_T7 (SEQ ID NO: 711) | 579 | 888 |
| HUMCACH1A_PEA_1_T8 (SEQ ID NO: 712) | 579 | 888 |
| HUMCACH1A_PEA_1_T13 (SEQ ID NO: | 579 | 888 |
| 714) | | |
| HUMCACH1A_PEA_1_T14 (SEQ ID NO: | 579 | 888 |
| 715) | | |
| HUMCACH1A_PEA_1_T15 (SEQ ID NO: | 579 | 888 |
| 716) | | |
| HUMCACH1A_PEA_1_T16 (SEQ ID NO: | 579 | 888 |
| 717) | | |
| HUMCACH1A_PEA_1_T20 (SEQ ID NO: | 579 | 888 |
| 721) | | |
| HUMCACH1A_PEA_1_T22 (SEQ ID NO: | 579 | 888 |
| 722) | | |

[2771] Segment cluster HUMCACH1A_PEA_{—}1_node_{—}9 (SEQ ID NO:725) according to the present invention is supported by 0 libraries. The number of libraries was determined as previously described. This segment can be found in the following transcript(s): HUMCACH1A_PEA_{—}1_T0 (SEQ ID NO:705), HUMCACH1A_PEA_{—}1_T1 (SEQ ID NO:706), HUMCACH1A_PEA_{—}1_T2 (SEQ ID NO:707), HUMCACH1A_PEA_{—}1_T3 (SEQ ID NO:708), HUMCACH1A_PEA_{—}1_T4 (SEQ ID NO:709), HUMCACH1A_PEA_{—}1_T6 (SEQ ID NO:710), HUMCACH1A_PEA_{—}1_T7 (SEQ ID NO:711), HUMCACH1A_PEA_{—}1_T8 (SEQ ID NO:712), HUMCACH1A_PEA_{—}1_T13 (SEQ ID NO:714), HUMCACH1A_PEA_{—}1_T14 (SEQ ID NO:715), HUMCACH1A_PEA_{—}1_T15 (SEQ ID NO:716), HUMCACH1A_PEA_{—}1_T16 (SEQ ID NO:717), HUMCACH1A_PEA_{—}1_T20 (SEQ ID NO:721) and HUMCACH1A_PEA_{—}1_T22 (SEQ ID NO:722). Table 44 below describes the starting and ending position of this segment on each transcript.

TABLE 44
Segment location on transcripts

| | Segment | Segment |
|---|---|---|
| | starting | ending |
| Transcript name | position | position |
| HUMCACH1A_PEA_1_T0 (SEQ ID NO: 705) | 995 | 1134 |
| HUMCACH1A_PEA_1_T1 (SEQ ID NO: 706) | 572 | 711 |
| HUMCACH1A_PEA_1_T2 (SEQ ID NO: 707) | 995 | 1134 |
| HUMCACH1A_PEA_1_T3 (SEQ ID NO: 708) | 995 | 1134 |
| HUMCACH1A_PEA_1_T4 (SEQ ID NO: 709) | 995 | 1134 |
| HUMCACH1A_PEA_1_T6 (SEQ ID NO: 710) | 995 | 1134 |
| HUMCACH1A_PEA_1_T7 (SEQ ID NO: 711) | 995 | 1134 |
| HUMCACH1A_PEA_1_T8 (SEQ ID NO: 712) | 995 | 1134 |
| HUMCACH1A_PEA_1_T13 (SEQ ID NO: | 995 | 1134 |
| 714) | | |
| HUMCACH1A_PEA_1_T14 (SEQ ID NO: | 995 | 1134 |
| 715) | | |
| HUMCACH1A_PEA_1_T15 (SEQ ID NO: | 995 | 1134 |
| 716) | | |
| HUMCACH1A_PEA_1_T16 (SEQ ID NO: | 995 | 1134 |
| 717) | | |
| HUMCACH1A_PEA_1_T20 (SEQ ID NO: | 995 | 1134 |
| 721) | | |
| HUMCACH1A_PEA_1_T22 (SEQ ID NO: | 995 | 1134 |
| 722) | | |

[2772] Segment cluster HUMCACH1A_PEA_{—}1_node_{—}11 (SEQ ID NO:726) according to the present invention is supported by 4 libraries. The number of libraries was determined as previously described. This segment can be found in the following transcript(s): HUMCACH1A_PEA_{—}1_T0 (SEQ ID NO:705), HUMCACH1A_PEA_{—}1_T1 (SEQ ID NO:706), HUMCACH1A_PEA_{—}1_T2 (SEQ ID NO:707), HUMCACH1A_PEA_{—}1_T3 (SEQ ID NO:708), HUMCACH1A_PEA_{—}1_T4 (SEQ ID NO:709), HUMCACH1A_PEA_{—}1_T6 (SEQ ID NO:710), HUMCACH1A_PEA_{—}1_T7 (SEQ ID NO:711), HUMCACH1A_PEA_{—}1_T8 (SEQ ID NO:712), HUMCACH1A_PEA_{—}1_T13 (SEQ ID NO:714), HUMCACH1A_PEA_{—}1_T14 (SEQ ID NO:715), HUMCACH1A_PEA_{—}1_T15 (SEQ ID NO:716), HUMCACH1A_PEA_{—}1_T16 (SEQ ID NO:717), HUMCACH1A_PEA_{—}1_T20 (SEQ ID NO:721) and HUMCACH1A_PEA_{—}1_T22 (SEQ ID NO:722). Table 45 below describes the starting and ending position of this segment on each transcript.

TABLE 45
Segment location on transcripts

| | Segment | Segment |
|---|---|---|
| | starting | ending |
| Transcript name | position | position |
| HUMCACH1A_PEA_1_T0 (SEQ ID NO: 705) | 1135 | 1277 |
| HUMCACH1A_PEA_1_T1 (SEQ ID NO: 706) | 712 | 854 |
| HUMCACH1A_PEA_1_T2 (SEQ ID NO: 707) | 1135 | 1277 |
| HUMCACH1A_PEA_1_T3 (SEQ ID NO: 708) | 1135 | 1277 |
| HUMCACH1A_PEA_1_T4 (SEQ ID NO: 709) | 1135 | 1277 |
| HUMCACH1A_PEA_1_T6 (SEQ ID NO: 710) | 1135 | 1277 |
| HUMCACH1A_PEA_1_T7 (SEQ ID NO: 711) | 1135 | 1277 |
| HUMCACH1A_PEA_1_T8 (SEQ ID NO: 712) | 1135 | 1277 |
| HUMCACH1A_PEA_1_T13 (SEQ ID NO: | 1135 | 1277 |
| 714) | | |
| HUMCACH1A_PEA_1_T14 (SEQ ID NO: | 1135 | 1277 |
| 715) | | |
| HUMCACH1A_PEA_1_T15 (SEQ ID NO: | 1135 | 1277 |
| 716) | | |
| HUMCACH1A_PEA_1_T16 (SEQ ID NO: | 1135 | 1277 |
| 717) | | |
| HUMCACH1A_PEA_1_T20 (SEQ ID NO: | 1135 | 1277 |
| 721) | | |
| HUMCACH1A_PEA_1_T22 (SEQ ID NO: | 1135 | 1277 |
| 722) | | |

[2773] Segment cluster HUMCACH1A_PEA_{—}1_node_{—}14 (SEQ ID NO:727) according to the present invention is supported by 2 libraries. The number of libraries was determined as previously described. This segment can be found in the following transcript(s): HUMCACH1A_PEA_{—}1_T0 (SEQ ID NO:705), HUMCACH1A_PEA_{—}1_T1 (SEQ ID NO:706), HUMCACH1A_PEA_{—}1_T2 (SEQ ID NO:707), HUMCACH1A_PEA_{—}1_T3 (SEQ ID NO:708), HUMCACH1A_PEA_{—}1_T4 (SEQ ID NO:709), HUMCACH1A_PEA_{—}1_T6 (SEQ ID NO:710), HUMCACH1A_PEA_{—}1_T7 (SEQ ID NO:711), HUMCACH1A_PEA_{—}1_T8 (SEQ ID NO:712), HUMCACH1A_PEA_{—}1_T13 (SEQ ID NO:714), HUMCACH1A_PEA_{—}1_T14 (SEQ ID NO:715), HUMCACH1A_PEA_{—}1_T15 (SEQ ID NO:716), HUMCACH1A_PEA_{—}1_T16 (SEQ ID NO:717), HUMCACH1A_PEA_{—}1_T20 (SEQ ID NO:721) and HUMCACH1A_PEA_{—}1_T22 (SEQ ID NO:722). Table 46 below describes the starting and ending position of this segment on each transcript.

TABLE 46
Segment location on transcripts

| | Segment | Segment |
|---|---|---|
| | starting | ending |
| Transcript name | position | position |
| HUMCACH1A_PEA_1_T0 (SEQ ID NO: 705) | 1278 | 1430 |
| HUMCACH1A_PEA_1_T1 (SEQ ID NO: 706) | 855 | 1007 |
| HUMCACH1A_PEA_1_T2 (SEQ ID NO: 707) | 1278 | 1430 |
| HUMCACH1A_PEA_1_T3 (SEQ ID NO: 708) | 1278 | 1430 |
| HUMCACH1A_PEA_1_T4 (SEQ ID NO: 709) | 1278 | 1430 |
| HUMCACH1A_PEA_1_T6 (SEQ ID NO: 710) | 1278 | 1430 |
| HUMCACH1A_PEA_1_T7 (SEQ ID NO: 711) | 1278 | 1430 |
| HUMCACH1A_PEA_1_T8 (SEQ ID NO: 712) | 1278 | 1430 |
| HUMCACH1A_PEA_1_T13 (SEQ ID NO: | 1278 | 1430 |
| 714) | | |
| HUMCACH1A_PEA_1_T14 (SEQ ID NO: | 1278 | 1430 |
| 715) | | |
| HUMCACH1A_PEA_1_T15 (SEQ ID NO: | 1278 | 1430 |
| 716) | | |
| HUMCACH1A_PEA_1_T16 (SEQ ID NO: | 1278 | 1430 |
| 717) | | |
| HUMCACH1A_PEA_1_T20 (SEQ ID NO: | 1278 | 1430 |
| 721) | | |
| HUMCACH1A_PEA_1_T22 (SEQ ID NO: | 1278 | 1430 |
| 722) | | |

[2774] Segment cluster HUMCACH1A_PEA_{—}1_node_{—}16 (SEQ ID NO:728) according to the present invention is supported by 2 libraries. The number of libraries was determined as previously described. This segment can be found in the following transcript(s): HUMCACH1A_PEA_{—}1_T0 (SEQ ID NO:705), HUMCACH1A_PEA_{—}1_T1 (SEQ ID NO:706), HUMCACH1A_PEA_{—}1_T2 (SEQ ID NO:707), HUMCACH1A_PEA_{—}1_T3 (SEQ ID NO:708), HUMCACH1A_PEA_{—}1_T4 (SEQ ID NO:709), HUMCACH1A_PEA_{—}1_T6 (SEQ ID NO:710), HUMCACH1A_PEA_{—}1_T7 (SEQ ID NO:711), HUMCACH1A_PEA_{—}1_T8 (SEQ ID NO:712), HUMCACH1A_PEA_{—}1_T13 (SEQ ID NO:714), HUMCACH1A_PEA_{—}1_T14 (SEQ ID NO:715), HUMCACH1A_PEA_{—}1_T15 (SEQ ID NO:716), HUMCACH1A_PEA_{—}1_T16 (SEQ ID NO:717), HUMCACH1A_PEA_{—}1_T20 (SEQ ID NO:721) and HUMCACH1A_PEA_{—}1_T22 (SEQ ID NO:722). Table 47 below describes the starting and ending position of this segment on each transcript.

TABLE 47
Segment location on transcripts

| | Segment | Segment |
|---|---|---|
| | starting | ending |
| Transcript name | position | position |
| HUMCACH1A_PEA_1_T0 (SEQ ID NO: 705) | 1431 | 1627 |
| HUMCACH1A_PEA_1_T1 (SEQ ID NO: 706) | 1008 | 1204 |
| HUMCACH1A_PEA_1_T2 (SEQ ID NO: 707) | 1431 | 1627 |
| HUMCACH1A_PEA_1_T3 (SEQ ID NO: 708) | 1431 | 1627 |
| HUMCACH1A_PEA_1_T4 (SEQ ID NO: 709) | 1431 | 1627 |
| HUMCACH1A_PEA_1_T6 (SEQ ID NO: 710) | 1431 | 1627 |
| HUMCACH1A_PEA_1_T7 (SEQ ID NO: 711) | 1431 | 1627 |
| HUMCACH1A_PEA_1_T8 (SEQ ID NO: 712) | 1431 | 1627 |
| HUMCACH1A_PEA_1_T13 (SEQ ID NO: | 1431 | 1627 |
| 714) | | |
| HUMCACH1A_PEA_1_T14 (SEQ ID NO: | 1431 | 1627 |
| 715) | | |
| HUMCACH1A_PEA_1_T15 (SEQ ID NO: | 1431 | 1627 |
| 716) | | |
| HUMCACH1A_PEA_1_T16 (SEQ ID NO: | 1431 | 1627 |
| 717) | | |
| HUMCACH1A_PEA_1_T20 (SEQ ID NO: | 1431 | 1627 |
| 721) | | |
| HUMCACH1A_PEA_1_T22 (SEQ ID NO: | 1431 | 1627 |
| 722) | | |

[2775] Segment cluster HUMCACH1A_PEA_{—}1_node_{—}27 (SEQ ID NO:729) according to the present invention is supported by 1 libraries. The number of libraries was determined as previously described. This segment can be found in the following transcript(s): HUMCACH1A_PEA_{—}1_T20 (SEQ ID NO:721). Table 48 below describes the starting and ending position of this segment on each transcript.

TABLE 48
Segment location on transcripts

| | Segment | Segment |
|---|---|---|
| Transcript name | starting position | ending position |
| HUMCACH1A_PEA_1_T20 (SEQ | 1732 | 1973 |
| ID NO: 721) | | |

[2776] Segment cluster HUMCACH1A_PEA_{—}1_node_{—}30 (SEQ ID NO:730) according to the present invention is supported by 8 libraries. The number of libraries was determined as previously described. This segment can be found in the following transcript(s): HUMCACH1A_PEA_{—}1_T22 (SEQ ID NO:722). Table 49 below describes the starting and ending position of this segment on each transcript.

TABLE 49
Segment location on transcripts

| | Segment | Segment |
|---|---|---|
| Transcript name | starting position | ending position |
| HUMCACH1A_PEA_1_T22 (SEQ | 1732 | 3379 |
| ID NO: 722) | | |

[2777] Segment cluster HUMCACH1A_PEA_{—}1_node_{—}33 (SEQ ID NO:731) according to the present invention is supported by 3 libraries. The number of libraries was determined as previously described. This segment can be found in the following transcript(s): HUMCACH1A_PEA_{—}1_T0 (SEQ ID NO:705), HUMCACH1A_PEA_{—}1_T1 (SEQ ID NO:706), HUMCACH1A_PEA_{—}1_T2 (SEQ ID NO:707), HUMCACH1A_PEA_{—}1_T3 (SEQ ID NO:708), HUMCACH1A_PEA_{—}1_T4 (SEQ ID NO:709), HUMCACH1A_PEA_{—}1_T6 (SEQ ID NO:710), HUMCACH1A_PEA_{—}1_T7 (SEQ ID NO:711), HUMCACH1A_PEA_{—}1_T8 (SEQ ID NO:712), HUMCACH1A_PEA_{—}1_T12 (SEQ ID NO:713), HUMCACH1A_PEA_{—}1_T13 (SEQ ID NO:714), HUMCACH1A_PEA_{—}1_T14 (SEQ ID NO:715), HUMCACH1A_PEA_{—}1_T15 (SEQ ID NO:716) and HUMCACH1A_PEA_{—}1_T16 (SEQ ID NO:717). Table 50 below describes the starting and ending position of this segment on each transcript.

TABLE 50
Segment location on transcripts

| | Segment | Segment |
|---|---|---|
| | starting | ending |
| Transcript name | position | position |
| HUMCACH1A_PEA_1_T0 (SEQ ID NO: 705) | 1732 | 1901 |
| HUMCACH1A_PEA_1_T1 (SEQ ID NO: 706) | 1309 | 1478 |
| HUMCACH1A_PEA_1_T2 (SEQ ID NO: 707) | 1732 | 1901 |
| HUMCACH1A_PEA_1_T3 (SEQ ID NO: 708) | 1732 | 1901 |
| HUMCACH1A_PEA_1_T4 (SEQ ID NO: 709) | 1732 | 1901 |
| HUMCACH1A_PEA_1_T6 (SEQ ID NO: 710) | 1732 | 1901 |
| HUMCACH1A_PEA_1_T7 (SEQ ID NO: 711) | 1732 | 1901 |
| HUMCACH1A_PEA_1_T8 (SEQ ID NO: 712) | 1732 | 1901 |
| HUMCACH1A_PEA_1_T12 (SEQ ID NO: | 65 | 234 |
| 713) | | |
| HUMCACH1A_PEA_1_T13 (SEQ ID NO: | 1732 | 1901 |
| 714) | | |
| HUMCACH1A_PEA_1_T14 (SEQ ID NO: | 1732 | 1901 |
| 715) | | |
| HUMCACH1A_PEA_1_T15 (SEQ ID NO: | 1732 | 1901 |
| 716) | | |
| HUMCACH1A_PEA_1_T16 (SEQ ID NO: | 1732 | 1901 |
| 717) | | |

[2778] Segment cluster HUMCACH1A_PEA_{—}1_node_{—}41 (SEQ ID NO:732) according to the present invention is supported by 5 libraries. The number of libraries was determined as previously described. This segment can be found in the following transcript(s): HUMCACH1A_PEA_{—}1_T0 (SEQ ID NO:705), HUMCACH1A_PEA_{—}1_T1 (SEQ ID NO:706), HUMCACH1A_PEA_{—}1_T2 (SEQ ID NO:707), HUMCACH1A_PEA_{—}1_T3 (SEQ ID NO:708), HUMCACH1A_PEA_{—}1_T4 (SEQ ID NO:709), HUMCACH1A_PEA_{—}1_T6 (SEQ ID NO:710), HUMCACH1A_PEA_{—}1_T7 (SEQ ID NO:711), HUMCACH1A_PEA_{—}1_T8 (SEQ ID NO:712), HUMCACH1A_PEA_{—}1_T12 (SEQ ID NO:713), HUMCACH1A_PEA_{—}1_T13 (SEQ ID NO:714), HUMCACH1A_PEA_{—}1_T14 (SEQ ID NO:715), HUMCACH1A_PEA_{—}1_T15 (SEQ ID NO:716) and HUMCACH1A_PEA_{—}1_T16 (SEQ ID NO:717). Table 51 below describes the starting and ending position of this segment on each transcript.

TABLE 51
Segment location on transcripts

| | Segment | Segment |
|---|---|---|
| | starting | ending |
| Transcript name | position | position |
| HUMCACH1A_PEA_1_T0 (SEQ ID NO: 705) | 2077 | 2237 |
| HUMCACH1A_PEA_1_T1 (SEQ ID NO: 706) | 1654 | 1814 |
| HUMCACH1A_PEA_1_T2 (SEQ ID NO: 707) | 2077 | 2237 |
| HUMCACH1A_PEA_1_T3 (SEQ ID NO: 708) | 2077 | 2237 |
| HUMCACH1A_PEA_1_T4 (SEQ ID NO: 709) | 2077 | 2237 |
| HUMCACH1A_PEA_1_T6 (SEQ ID NO: 710) | 2077 | 2237 |
| HUMCACH1A_PEA_1_T7 (SEQ ID NO: 711) | 2077 | 2237 |
| HUMCACH1A_PEA_1_T8 (SEQ ID NO: 712) | 2017 | 2177 |
| HUMCACH1A_PEA_1_T12 (SEQ ID NO: | 410 | 570 |
| 713) | | |
| HUMCACH1A_PEA_1_T13 (SEQ ID NO: | 2077 | 2237 |
| 714) | | |
| HUMCACH1A_PEA_1_T14 (SEQ ID NO: | 2077 | 2237 |
| 715) | | |
| HUMCACH1A_PEA_1_T15 (SEQ ID NO: | 2077 | 2237 |
| 716) | | |
| HUMCACH1A_PEA_1_T16 (SEQ ID NO: | 2077 | 2237 |
| 717) | | |

[2779] Segment cluster HUMCACH1A_PEA_{—}1_node_{—}43 (SEQ ID NO:733) according to the present invention is supported by 5 libraries. The number of libraries was determined as previously described. This segment can be found in the following transcript(s): HUMCACH1A_PEA_{—}1_T0 (SEQ ID NO:705), HUMCACH1A_PEA_{—}1_T1 (SEQ ID NO:706), HUMCACH1A_PEA_{—}1_T2 (SEQ ID NO:707), HUMCACH1A_PEA_{—}1_T3 (SEQ ID NO:708), HUMCACH1A_PEA_{—}1_T4 (SEQ ID NO:709), HUMCACH1A_PEA_{—}1_T6 (SEQ ID NO:710), HUMCACH1A_PEA_{—}1_T7 (SEQ ID NO:711), HUMCACH1A_PEA_{—}1_T8 (SEQ ID NO:712), HUMCACH1A_PEA_{—}1_T12 (SEQ ID NO:713), HUMCACH1A_PEA_{—}1_T13 (SEQ ID NO:714), HUMCACH1A_PEA_{—}1_T14 (SEQ ID NO:715), HUMCACH1A_PEA_{—}1_T15 (SEQ ID NO:716) and HUMCACH1A_PEA_{—}1_T16 (SEQ ID NO:717). Table 52 below describes the starting and ending position of this segment on each transcript.

TABLE 52
Segment location on transcripts

| | Segment | Segment |
|---|---|---|
| | starting | ending |
| Transcript name | position | position |
| HUMCACH1A_PEA_1_T0 (SEQ ID NO: 705) | 2238 | 2463 |
| HUMCACH1A_PEA_1_T1 (SEQ ID NO: 706) | 1815 | 2040 |
| HUMCACH1A_PEA_1_T2 (SEQ ID NO: 707) | 2238 | 2463 |
| HUMCACH1A_PEA_1_T3 (SEQ ID NO: 708) | 2238 | 2463 |
| HUMCACH1A_PEA_1_T4 (SEQ ID NO: 709) | 2238 | 2463 |
| HUMCACH1A_PEA_1_T6 (SEQ ID NO: 710) | 2238 | 2463 |
| HUMCACH1A_PEA_1_T7 (SEQ ID NO: 711) | 2238 | 2463 |
| HUMCACH1A_PEA_1_T8 (SEQ ID NO: 712) | 2178 | 2403 |
| HUMCACH1A_PEA_1_T12 (SEQ ID NO: | 571 | 796 |
| 713) | | |
| HUMCACH1A_PEA_1_T13 (SEQ ID NO: | 2238 | 2463 |
| 714) | | |
| HUMCACH1A_PEA_1_T14 (SEQ ID NO: | 2238 | 2463 |
| 715) | | |
| HUMCACH1A_PEA_1_T15 (SEQ ID NO: | 2238 | 2463 |
| 716) | | |
| HUMCACH1A_PEA_1_T16 (SEQ ID NO: | 2238 | 2463 |
| 717) | | |

[2780] Segment cluster HUMCACH1A_PEA_{—}1_node_{—}45 (SEQ ID NO:734) according to the present invention is supported by 4 libraries. The number of libraries was determined as previously described. This segment can be found in the following transcript(s): HUMCACH1A_PEA_{—}1_T0 (SEQ ID NO:705), HUMCACH1A_PEA_{—}1_T1 (SEQ ID NO:706), HUMCACH1A_PEA_{—}1_T2 (SEQ ID NO:707), HUMCACH1A_PEA_{—}1_T3 (SEQ ID NO:708), HUMCACH1A_PEA_{—}1_T4 (SEQ ID NO:709), HUMCACH1A_PEA_{—}1_T6 (SEQ ID NO:710), HUMCACH1A_PEA_{—}1_T7 (SEQ ID NO:711), HUMCACH1A_PEA_{—}1_T8 (SEQ ID NO:712), HUMCACH1A_PEA_{—}1_T12 (SEQ ID NO:713), HUMCACH1A_PEA_{—}1_T13 (SEQ ID NO:714), HUMCACH1A_PEA_{—}1_T14 (SEQ ID NO:715), HUMCACH1A_PEA_{—}1_T15 (SEQ ID NO:716) and HUMCACH1A_PEA_{—}1_T16 (SEQ ID NO:717). Table 53 below describes the starting and ending position of this segment on each transcript.

TABLE 53
Segment location on transcripts

| | Segment | Segment |
|---|---|---|
| | starting | ending |
| Transcript name | position | position |
| HUMCACH1A_PEA_1_T0 (SEQ ID NO: 705) | 2464 | 2671 |
| HUMCACH1A_PEA_1_T1 (SEQ ID NO: 706) | 2041 | 2248 |
| HUMCACH1A_PEA_1_T2 (SEQ ID NO: 707) | 2464 | 2671 |
| HUMCACH1A_PEA_1_T3 (SEQ ID NO: 708) | 2464 | 2671 |
| HUMCACH1A_PEA_1_T4 (SEQ ID NO: 709) | 2464 | 2671 |
| HUMCACH1A_PEA_1_T6 (SEQ ID NO: 710) | 2464 | 2671 |
| HUMCACH1A_PEA_1_T7 (SEQ ID NO: 711) | 2464 | 2671 |
| HUMCACH1A_PEA_1_T8 (SEQ ID NO: 712) | 2404 | 2611 |
| HUMCACH1A_PEA_1_T12 (SEQ ID NO: | 797 | 1004 |
| 713) | | |
| HUMCACH1A_PEA_1_T13 (SEQ ID NO: | 2464 | 2671 |
| 714) | | |
| HUMCACH1A_PEA_1_T14 (SEQ ID NO: | 2464 | 2671 |
| 715) | | |
| HUMCACH1A_PEA_1_T15 (SEQ ID NO: | 2464 | 2671 |
| 716) | | |
| HUMCACH1A_PEA_1_T16 (SEQ ID NO: | 2464 | 2671 |
| 717) | | |

[2781] Segment cluster HUMCACH1A_PEA_{—}1_node_{—}47 (SEQ ID NO:735) according to the present invention is supported by 3 libraries. The number of libraries was determined as previously described. This segment can be found in the following transcript(s): HUMCACH1A_PEA_{—}1_T0 (SEQ ID NO:705), HUMCACH1A_PEA_{—}1_T1 (SEQ ID NO:706), HUMCACH1A_PEA_{—}1_T2 (SEQ ID NO:707), HUMCACH1A_PEA_{—}1_T3 (SEQ ID NO:708), HUMCACH1A_PEA_{—}1_T4 (SEQ ID NO:709), HUMCACH1A_PEA_{—}1_T6 (SEQ ID NO:710), HUMCACH1A_PEA_{—}1_T7 (SEQ ID NO:711), HUMCACH1A_PEA_{—}1_T8 (SEQ ID NO:712), HUMCACH1A_PEA_{—}1_T12 (SEQ ID NO:713), HUMCACH1A_PEA_{—}1_T13 (SEQ ID NO:714), HUMCACH1A_PEA_{—}1_T14 (SEQ ID NO:715), HUMCACH1A_PEA_{—}1_T15 (SEQ ID NO:716) and HUMCACH1A_PEA_{—}1_T16 (SEQ ID NO:717). Table 54 below describes the starting and ending position of this segment on each transcript.

TABLE 54
Segment location on transcripts

| | Segment | Segment |
|---|---|---|
| | starting | ending |
| Transcript name | position | position |
| HUMCACH1A_PEA_1_T0 (SEQ ID NO: 705) | 2672 | 2792 |
| HUMCACH1A_PEA_1_T1 (SEQ ID NO: 706) | 2249 | 2369 |
| HUMCACH1A_PEA_1_T2 (SEQ ID NO: 707) | 2672 | 2792 |
| HUMCACH1A_PEA_1_T3 (SEQ ID NO: 708) | 2672 | 2792 |
| HUMCACH1A_PEA_1_T4 (SEQ ID NO: 709) | 2672 | 2792 |
| HUMCACH1A_PEA_1_T6 (SEQ ID NO: 710) | 2672 | 2792 |
| HUMCACH1A_PEA_1_T7 (SEQ ID NO: 711) | 2672 | 2792 |
| HUMCACH1A_PEA_1_T8 (SEQ ID NO: 712) | 2612 | 2732 |
| HUMCACH1A_PEA_1_T12 (SEQ ID NO: | 1005 | 1125 |
| 713) | | |
| HUMCACH1A_PEA_1_T13 (SEQ ID NO: | 2672 | 2792 |
| 714) | | |
| HUMCACH1A_PEA_1_T14 (SEQ ID NO: | 2672 | 2792 |
| 715) | | |
| HUMCACH1A_PEA_1_T15 (SEQ ID NO: | 2672 | 2792 |
| 716) | | |
| HUMCACH1A_PEA_1_T16 (SEQ ID NO: | 2672 | 2792 |
| 717) | | |

[2782] Segment cluster HUMCACH1A_PEA_{—}1_node_{—}55 (SEQ ID NO:736) according to the present invention is supported by 6 libraries. The number of libraries was determined as previously described. This segment can be found in the following transcript(s): HUMCACH1A_PEA_{—}1_T0 (SEQ ID NO:705), HUMCACH1A_PEA_{—}1_T1 (SEQ ID NO:706), HUMCACH1A_PEA_{—}1_T2 (SEQ ID NO:707), HUMCACH1A_PEA_{—}1_T3 (SEQ ID NO:708), HUMCACH1A_PEA_{—}1_T4 (SEQ ID NO:709), HUMCACH1A_PEA_{—}1_T6 (SEQ ID NO:710), HUMCACH1A_PEA_{—}1_T7 (SEQ ID NO:711), HUMCACH1A_PEA_{—}1_T8 (SEQ ID NO:712), HUMCACH1A_PEA_{—}1_T12 (SEQ ID NO:713), HUMCACH1A_PEA_{—}1_T13 (SEQ ID NO:714), HUMCACH1A_PEA_{—}1_T14 (SEQ ID NO:715), HUMCACH1A_PEA_{—}1_T15 (SEQ ID NO:716) and HUMCACH1A_PEA_{—}1_T16 (SEQ ID NO:717). Table 55 below describes the starting and ending position of this segment on each transcript.

TABLE 55
Segment location on transcripts

| | Segment | Segment |
|---|---|---|
| | starting | ending |
| Transcript name | position | position |
| HUMCACH1A_PEA_1_T0 (SEQ ID NO: 705) | 3045 | 3192 |
| HUMCACH1A_PEA_1_T1 (SEQ ID NO: 706) | 2622 | 2769 |
| HUMCACH1A_PEA_1_T2 (SEQ ID NO: 707) | 3045 | 3192 |
| HUMCACH1A_PEA_1_T3 (SEQ ID NO: 708) | 3045 | 3192 |
| HUMCACH1A_PEA_1_T4 (SEQ ID NO: 709) | 3045 | 3192 |
| HUMCACH1A_PEA_1_T6 (SEQ ID NO: 710) | 3045 | 3192 |
| HUMCACH1A_PEA_1_T7 (SEQ ID NO: 711) | 3045 | 3192 |
| HUMCACH1A_PEA_1_T8 (SEQ ID NO: 712) | 2985 | 3132 |
| HUMCACH1A_PEA_1_T12 (SEQ ID NO: | 1378 | 1525 |
| 713) | | |
| HUMCACH1A_PEA_1_T13 (SEQ ID NO: | 3045 | 3192 |
| 714) | | |
| HUMCACH1A_PEA_1_T14 (SEQ ID NO: | 3045 | 3192 |
| 715) | | |
| HUMCACH1A_PEA_1_T15 (SEQ ID NO: | 3045 | 3192 |
| 716) | | |
| HUMCACH1A_PEA_1_T16 (SEQ ID NO: | 3045 | 3192 |
| 717) | | |

[2783] Segment cluster HUMCACH1A_PEA_{—}1_node_{—}57 (SEQ ID NO:737) according to the present invention is supported by 7 libraries. The number of libraries was determined as previously described. This segment can be found in the following transcript(s): HUMCACH1A_PEA_{—}1_T0 (SEQ ID NO:705), HUMCACH1A_PEA_{—}1_T1 (SEQ ID NO:706), HUMCACH1A_PEA_{—}1_T2 (SEQ ID NO:707), HUMCACH1A_PEA_{—}1_T3 (SEQ ID NO:708), HUMCACH1A_PEA_{—}1_T4 (SEQ ID NO:709), HUMCACH1A_PEA_{—}1_T6 (SEQ ID NO:710), HUMCACH1A_PEA_{—}1_T7 (SEQ ID NO:711), HUMCACH1A_PEA_{—}1_T8 (SEQ ID NO:712), HUMCACH1A_PEA_{—}1_T12 (SEQ ID NO:713), HUMCACH1A_PEA_{—}1_T13 (SEQ ID NO:714), HUMCACH1A_PEA_{—}1_T14 (SEQ ID NO:715), HUMCACH1A_PEA_{—}1_T15 (SEQ ID NO:716) and HUMCACH1A_PEA_{—}1_T16 (SEQ ID NO:717). Table 56 below describes the starting and ending position of this segment on each transcript.

TABLE 56
Segment location on transcripts

| | Seg- | |
|---|---|---|
| | ment | Segment |
| | starting | ending |
| Transcript name | position | position |
| HUMCACH1A_PEA_1_T0 (SEQ ID NO: 705) | 3193 | 3322 |
| HUMCACH1A_PEA_1_T1 (SEQ ID NO: 706) | 2770 | 2899 |
| HUMCACH1A_PEA_1_T2 (SEQ ID NO: 707) | 3193 | 3322 |
| HUMCACH1A_PEA_1_T3 (SEQ ID NO: 708) | 3193 | 3322 |
| HUMCACH1A_PEA_1_T4 (SEQ ID NO: 709) | 3193 | 3322 |
| HUMCACH1A_PEA_1_T6 (SEQ ID NO: 710) | 3193 | 3322 |
| HUMCACH1A_PEA_1_T7 (SEQ ID NO: 711) | 3193 | 3322 |
| HUMCACH1A_PEA_1_T8 (SEQ ID NO: 712) | 3133 | 3262 |
| HUMCACH1A_PEA_1_T12 (SEQ ID NO: 713) | 1526 | 1655 |
| HUMCACH1A_PEA_1_T13 (SEQ ID NO: 714) | 3193 | 3322 |
| HUMCACH1A_PEA_1_T14 (SEQ ID NO: 715) | 3193 | 3322 |
| HUMCACH1A_PEA_1_T15 (SEQ ID NO: 716) | 3193 | 3322 |
| HUMCACH1A_PEA_1_T16 (SEQ ID NO: 717) | 3193 | 3322 |

[2784] Segment cluster HUMCACH1A_PEA_{—}1_node_{—}70 (SEQ ID NO:738) according to the present invention is supported by 3 libraries. The number of libraries was determined as previously described. This segment can be found in the following transcript(s): HUMCACH1A_PEA_{—}1_T0 (SEQ ID NO:705), HUMCACH1A_PEA_{—}1_T1 (SEQ ID NO:706), HUMCACH1A_PEA_{—}1_T2 (SEQ ID NO:707), HUMCACH1A_PEA_{—}1_T3 (SEQ ID NO:708), HUMCACH1A_PEA_{—}1_T4 (SEQ ID NO:709), HUMCACH1A_PEA_{—}1_T6 (SEQ ID NO:710), HUMCACH1A_PEA_{—}1_T7 (SEQ ID NO:711), HUMCACH1A_PEA_{—}1_T8 (SEQ ID NO:712), HUMCACH1A_PEA_{—}1_T12 (SEQ ID NO:713), HUMCACH1A_PEA_{—}1_T13 (SEQ ID NO:714), HUMCACH1A_PEA_{—}1_T14 (SEQ ID NO:715) and HUMCACH1A_PEA_{—}1_T15 (SEQ ID NO:716). Table 57 below describes the starting and ending position of this segment on each transcript.

TABLE 57
Segment location on transcripts

| | Seg- | |
|---|---|---|
| | ment | Segment |
| | starting | ending |
| Transcript name | position | position |
| HUMCACH1A_PEA_1_T0 (SEQ ID NO: 705) | 3739 | 3885 |
| HUMCACH1A_PEA_1_T1 (SEQ ID NO: 706) | 3316 | 3462 |
| HUMCACH1A_PEA_1_T2 (SEQ ID NO: 707) | 3739 | 3885 |
| HUMCACH1A_PEA_1_T3 (SEQ ID NO: 708) | 3739 | 3885 |
| HUMCACH1A_PEA_1_T4 (SEQ ID NO: 709) | 3739 | 3885 |
| HUMCACH1A_PEA_1_T6 (SEQ ID NO: 710) | 3739 | 3885 |
| HUMCACH1A_PEA_1_T7 (SEQ ID NO: 711) | 3739 | 3885 |
| HUMCACH1A_PEA_1_T8 (SEQ ID NO: 712) | 3679 | 3825 |
| HUMCACH1A_PEA_1_T12 (SEQ ID NO: 713) | 2072 | 2218 |
| HUMCACH1A_PEA_1_T13 (SEQ ID NO: 714) | 3739 | 3885 |
| HUMCACH1A_PEA_1_T14 (SEQ ID NO: 715) | 3739 | 3885 |
| HUMCACH1A_PEA_1_T15 (SEQ ID NO: 716) | 3739 | 3885 |

[2785] Segment cluster HUMCACH1A_PEA_{—}1_node_{—}72 (SEQ ID NO:739) according to the present invention is supported by 2 libraries. The number of libraries was determined as previously described. This segment can be found in the following transcript(s): HUMCACH1A_PEA_{—}1_T0 (SEQ ID NO:705), HUMCACH1A_PEA_{—}1_T1 (SEQ ID NO:706), HUMCACH1A_PEA_{—}1_T2 (SEQ ID NO:707), HUMCACH1A_PEA_{—}1_T3 (SEQ ID NO:708), HUMCACH1A_PEA_{—}1_T4 (SEQ ID NO:709), HUMCACH1A_PEA_{—}1_T6 (SEQ ID NO:710), HUMCACH1A_PEA_{—}1_T7 (SEQ ID NO:711), HUMCACH1A_PEA_{—}1_T8 (SEQ ID NO:712), HUMCACH1A_PEA_{—}1_T12 (SEQ ID NO:713), HUMCACH1A_PEA_{—}1_T13 (SEQ ID NO:714), HUMCACH1A_PEA_{—}1_T14 (SEQ ID NO:715) and HUMCACH1A_PEA_{—}1_T15 (SEQ ID NO:716). Table 58 below describes the starting and ending position of this segment on each transcript.

TABLE 58
Segment location on transcripts

| | Seg- | |
|---|---|---|
| | ment | Segment |
| | starting | ending |
| Transcript name | position | position |
| HUMCACH1A_PEA_1_T0 (SEQ ID NO: 705) | 3886 | 4087 |
| HUMCACH1A_PEA_1_T1 (SEQ ID NO: 706) | 3463 | 3664 |
| HUMCACH1A_PEA_1_T2 (SEQ ID NO: 707) | 3886 | 4087 |
| HUMCACH1A_PEA_1_T3 (SEQ ID NO: 708) | 3886 | 4087 |
| HUMCACH1A_PEA_1_T4 (SEQ ID NO: 709) | 3886 | 4087 |
| HUMCACH1A_PEA_1_T6 (SEQ ID NO: 710) | 3886 | 4087 |
| HUMCACH1A_PEA_1_T7 (SEQ ID NO: 711) | 3886 | 4087 |
| HUMCACH1A_PEA_1_T8 (SEQ ID NO: 712) | 3826 | 4027 |
| HUMCACH1A_PEA_1_T12 (SEQ ID NO: 713) | 2219 | 2420 |
| HUMCACH1A_PEA_1_T13 (SEQ ID NO: 714) | 3886 | 4087 |
| HUMCACH1A_PEA_1_T14 (SEQ ID NO: 715) | 3886 | 4087 |
| HUMCACH1A_PEA_1_T15 (SEQ ID NO: 716) | 3886 | 4087 |

[2786] Segment cluster HUMCACH1A_PEA_{—}1_node_{—}74 (SEQ ID NO:740) according to the present invention is supported by 2 libraries. The number of libraries was determined as previously described. This segment can be found in the following transcript(s): HUMCACH1A_PEA_{—}1_T0 (SEQ ID NO:705), HUMCACH1A_PEA_{—}1_T1 (SEQ ID NO:706), HUMCACH1A_PEA_{—}1_T2 (SEQ ID NO:707), HUMCACH1A_PEA_{—}1_T3 (SEQ ID NO:708), HUMCACH1A_PEA_{—}1_T4 (SEQ ID NO:709), HUMCACH1A_PEA_{—}1_T6 (SEQ ID NO:710), HUMCACH1A_PEA_{—}1_T7 (SEQ ID NO:711), HUMCACH1A_PEA_{—}1_T8 (SEQ ID NO:712), HUMCACH1A_PEA_{—}1_T12 (SEQ ID NO:713), HUMCACH1A_PEA_{—}1_T13 (SEQ ID NO:714), HUMCACH1A_PEA_{—}1_T14 (SEQ ID NO:715) and HUMCACH1A_PEA_{—}1_T15 (SEQ ID NO:716). Table 59 below describes the starting and ending position of this segment on each transcript.

TABLE 59
Segment location on transcripts

| | Seg- | |
|---|---|---|
| | ment | Segment |
| | starting | ending |
| Transcript name | position | position |
| HUMCACH1A_PEA_1_T0 (SEQ ID NO: 705) | 4088 | 4246 |
| HUMCACH1A_PEA_1_T1 (SEQ ID NO: 706) | 3665 | 3823 |
| HUMCACH1A_PEA_1_T2 (SEQ ID NO: 707) | 4088 | 4246 |
| HUMCACH1A_PEA_1_T3 (SEQ ID NO: 708) | 4088 | 4246 |
| HUMCACH1A_PEA_1_T4 (SEQ ID NO: 709) | 4088 | 4246 |
| HUMCACH1A_PEA_1_T6 (SEQ ID NO: 710) | 4088 | 4246 |
| HUMCACH1A_PEA_1_T7 (SEQ ID NO: 711) | 4088 | 4246 |
| HUMCACH1A_PEA_1_T8 (SEQ ID NO: 712) | 4028 | 4186 |
| HUMCACH1A_PEA_1_T12 (SEQ ID NO: 713) | 2421 | 2579 |
| HUMCACH1A_PEA_1_T13 (SEQ ID NO: 714) | 4088 | 4246 |
| HUMCACH1A_PEA_1_T14 (SEQ ID NO: 715) | 4088 | 4246 |
| HUMCACH1A_PEA_1_T15 (SEQ ID NO: 716) | 4088 | 4246 |

[2787] Segment cluster HUMCACH1A_PEA_{—}1_node_{—}86 (SEQ ID NO:741) according to the present invention is supported by 1 libraries. The number of libraries was determined as previously described. This segment can be found in the following transcript(s): HUMCACH1A_PEA_{—}1_T0 (SEQ ID NO:705), HUMCACH1A_PEA_{—}1_T1 (SEQ ID NO:706), HUMCACH1A_PEA_{—}1_T2 (SEQ ID NO:707), HUMCACH1A_PEA_{—}1_T3 (SEQ ID NO:708), HUMCACH1A_PEA_{—}1_T4 (SEQ ID NO:709), HUMCACH1A_PEA_{—}1_T6 (SEQ ID NO:710), HUMCACH1A_PEA_{—}1_T7 (SEQ ID NO:711), HUMCACH1A_PEA_{—}1_T8 (SEQ ID NO:712), HUMCACH1A_PEA_{—}1_T12 (SEQ ID NO:713), HUMCACH1A_PEA_{—}1_T13 (SEQ ID NO:714), HUMCACH1A_PEA_{—}1_T14 (SEQ ID NO:715) and HUMCACH1A_PEA_{—}1_T17 (SEQ ID NO:718). Table 60 below describes the starting and ending position of this segment on each transcript.

TABLE 60
Segment location on transcripts

| | Seg- | |
|---|---|---|
| | ment | Segment |
| | starting | ending |
| Transcript name | position | position |
| HUMCACH1A_PEA_1_T0 (SEQ ID NO: 705) | 4487 | 4615 |
| HUMCACH1A_PEA_1_T1 (SEQ ID NO: 706) | 4064 | 4192 |
| HUMCACH1A_PEA_1_T2 (SEQ ID NO: 707) | 4487 | 4615 |
| HUMCACH1A_PEA_1_T3 (SEQ ID NO: 708) | 4487 | 4615 |
| HUMCACH1A_PEA_1_T4 (SEQ ID NO: 709) | 4487 | 4615 |
| HUMCACH1A_PEA_1_T6 (SEQ ID NO: 710) | 4487 | 4615 |
| HUMCACH1A_PEA_1_T7 (SEQ ID NO: 711) | 4487 | 4615 |
| HUMCACH1A_PEA_1_T8 (SEQ ID NO: 712) | 4427 | 4555 |
| HUMCACH1A_PEA_1_T12 (SEQ ID NO: 713) | 2820 | 2948 |
| HUMCACH1A_PEA_1_T13 (SEQ ID NO: 714) | 4487 | 4615 |
| HUMCACH1A_PEA_1_T14 (SEQ ID NO: 715) | 4487 | 4615 |
| HUMCACH1A_PEA_1_T17 (SEQ ID NO: 718) | 77 | 205 |

[2788] Segment cluster HUMCACH1A_PEA_{—}1_node_{—}92 (SEQ ID NO:742) according to the present invention is supported by 2 libraries. The number of libraries was determined as previously described. This segment can be found in the following transcript(s): HUMCACH1A_PEA_{—}1_T0 (SEQ ID NO:705), HUMCACH1A_PEA_{—}1_T1 (SEQ ID NO:706), HUMCACH1A_PEA_{—}1_T2 (SEQ ID NO:707), HUMCACH1A_PEA_{—}1_T3 (SEQ ID NO:708), HUMCACH1A_PEA_{—}1_T4 (SEQ ID NO:709), HUMCACH1A_PEA_{—}1_T6 (SEQ ID NO:710), HUMCACH1A_PEA_{—}1_T7 (SEQ ID NO:711), HUMCACH1A_PEA_{—}1_T8 (SEQ ID NO:712), HUMCACH1A_PEA_{—}1_T12 (SEQ ID NO:713), HUMCACH1A_PEA_{—}1_T13 (SEQ ID NO:714), HUMCACH1A_PEA_{—}1_T14 (SEQ ID NO:715) and HUMCACH1A_PEA_{—}1_T17 (SEQ ID NO:718). Table 61 below describes the starting and ending position of this segment on each transcript.

TABLE 61
Segment location on transcripts

| | Seg- | |
|---|---|---|
| | ment | Segment |
| | starting | ending |
| Transcript name | position | position |
| HUMCACH1A_PEA_1_T0 (SEQ ID NO: 705) | 4774 | 4933 |
| HUMCACH1A_PEA_1_T1 (SEQ ID NO: 706) | 4351 | 4510 |
| HUMCACH1A_PEA_1_T2 (SEQ ID NO: 707) | 4774 | 4933 |
| HUMCACH1A_PEA_1_T3 (SEQ ID NO: 708) | 4774 | 4933 |
| HUMCACH1A_PEA_1_T4 (SEQ ID NO: 709) | 4774 | 4933 |
| HUMCACH1A_PEA_1_T6 (SEQ ID NO: 710) | 4774 | 4933 |
| HUMCACH1A_PEA_1_T7 (SEQ ID NO: 711) | 4774 | 4933 |
| HUMCACH1A_PEA_1_T8 (SEQ ID NO: 712) | 4714 | 4873 |
| HUMCACH1A_PEA_1_T12 (SEQ ID NO: 713) | 3107 | 3266 |
| HUMCACH1A_PEA_1_T13 (SEQ ID NO: 714) | 4774 | 4933 |
| HUMCACH1A_PEA_1_T14 (SEQ ID NO: 715) | 4774 | 4933 |
| HUMCACH1A_PEA_1_T17 (SEQ ID NO: 718) | 364 | 523 |

[2789] Segment cluster HUMCACH1A_PEA_{—}1_node_{—}94 (SEQ ID NO:743) according to the present invention is supported by 4 libraries. The number of libraries was determined as previously described. This segment can be found in the following transcript(s): HUMCACH1A_PEA_{—}1_T0 (SEQ ID NO:705), HUMCACH1A_PEA_{—}1_T1 (SEQ ID NO:706), HUMCACH1A_PEA_{—}1_T2 (SEQ ID NO:707), HUMCACH1A_PEA_{—}1_T3 (SEQ ID NO:708), HUMCACH1A_PEA_{—}1_T4 (SEQ ID NO:709), HUMCACH1A_PEA_{—}1_T6 (SEQ ID NO:710), HUMCACH1A_PEA_{—}1_T7 (SEQ ID NO:711), HUMCACH1A_PEA_{—}1_T8 (SEQ ID NO:712), HUMCACH1A_PEA_{—}1_T12 (SEQ ID NO:713), HUMCACH1A_PEA_{—}1_T13 (SEQ ID NO:714), HUMCACH1A_PEA_{—}1_T14 (SEQ ID NO:715) and HUMCACH1A_PEA_{—}1_T17 (SEQ ID NO:718). Table 62 below describes the starting and ending position of this segment on each transcript.

TABLE 62
Segment location on transcripts

| | Seg- | |
|---|---|---|
| | ment | Segment |
| | starting | ending |
| Transcript name | position | position |
| HUMCACH1A_PEA_1_T0 (SEQ ID NO: 705) | 4934 | 5061 |
| HUMCACH1A_PEA_1_T1 (SEQ ID NO: 706) | 4511 | 4638 |
| HUMCACH1A_PEA_1_T2 (SEQ ID NO: 707) | 4934 | 5061 |
| HUMCACH1A_PEA_1_T3 (SEQ ID NO: 708) | 4934 | 5061 |
| HUMCACH1A_PEA_1_T4 (SEQ ID NO: 709) | 4934 | 5061 |
| HUMCACH1A_PEA_1_T6 (SEQ ID NO: 710) | 4934 | 5061 |
| HUMCACH1A_PEA_1_T7 (SEQ ID NO: 711) | 4934 | 5061 |
| HUMCACH1A_PEA_1_T8 (SEQ ID NO: 712) | 4874 | 5001 |
| HUMCACH1A_PEA_1_T12 (SEQ ID NO: 713) | 3267 | 3394 |
| HUMCACH1A_PEA_1_T13 (SEQ ID NO: 714) | 4934 | 5061 |
| HUMCACH1A_PEA_1_T14 (SEQ ID NO: 715) | 4934 | 5061 |
| HUMCACH1A_PEA_1_T17 (SEQ ID NO: 718) | 524 | 651 |

[2790] Segment cluster HUMCACH1A_PEA_{—}1_node_{—}103 (SEQ ID NO:744) according to the present invention is supported by 2 libraries. The number of libraries was determined as previously described. This segment can be found in the following transcript(s): HUMCACH1A_PEA_{—}1_T18 (SEQ ID NO:719). Table 63 below describes the starting and ending position of this segment on each transcript.

TABLE 63
Segment locationon transcripts

| | Segment | Segment |
|---|---|---|
| | starting | ending |
| Transcript name | position | position |
| HUMCACH1A_PEA_1_T18 | 1 | 204 |
| (SEQ ID NO: 719) | | |

[2791] Segment cluster HUMCACH1A_PEA_{—}1_node_{—}104 (SEQ ID NO:745) according to the present invention is supported by 3 libraries. The number of libraries was determined as previously described. This segment can be found in the following transcript(s): HUMCACH1A_PEA_{—}1_T0 (SEQ ID NO:705), HUMCACH1A_PEA_{—}1_T1 (SEQ ID NO:706), HUMCACH1A_PEA_{—}1_T2 (SEQ ID NO:707), HUMCACH1A_PEA_{—}1_T3 (SEQ ID NO:708), HUMCACH1A_PEA_{—}1_T4 (SEQ ID NO:709), HUMCACH1A_PEA_{—}1_T6 (SEQ ID NO:710), HUMCACH1A_PEA_{—}1_T7 (SEQ ID NO:711), HUMCACH1A_PEA_{—}1_T8 (SEQ ID NO:712), HUMCACH1A_PEA_{—}1_T12 (SEQ ID NO:713), HUMCACH1A_PEA_{—}1_T13 (SEQ ID NO:714), HUMCACH1A_PEA_{—}1_T17 (SEQ ID NO:718) and HUMCACH1A_PEA_{—}1_T18 (SEQ ID NO:719). Table 64 below describes the starting and ending position of this segment on each transcript.

TABLE 64
Segment location on transcripts

| | Seg- | |
|---|---|---|
| | ment | Segment |
| | starting | ending |
| Transcript name | position | position |
| HUMCACH1A_PEA_1_T0 (SEQ ID NO: 705) | 5364 | 5494 |
| HUMCACH1A_PEA_1_T1 (SEQ ID NO: 706) | 4941 | 5071 |
| HUMCACH1A_PEA_1_T2 (SEQ ID NO: 707) | 5364 | 5494 |
| HUMCACH1A_PEA_1_T3 (SEQ ID NO: 708) | 5364 | 5494 |
| HUMCACH1A_PEA_1_T4 (SEQ ID NO: 709) | 5364 | 5494 |
| HUMCACH1A_PEA_1_T6 (SEQ ID NO: 710) | 5364 | 5494 |
| HUMCACH1A_PEA_1_T7 (SEQ ID NO: 711) | 5364 | 5494 |
| HUMCACH1A_PEA_1_T8 (SEQ ID NO: 712) | 5304 | 5434 |
| HUMCACH1A_PEA_1_T12 (SEQ ID NO: 713) | 3697 | 3827 |
| HUMCACH1A_PEA_1_T13 (SEQ ID NO: 714) | 5364 | 5494 |
| HUMCACH1A_PEA_1_T17 (SEQ ID NO: 718) | 954 | 1084 |
| HUMCACH1A_PEA_1_T18 (SEQ ID NO: 719) | 205 | 335 |

[2792] Segment cluster HUMCACH1A_PEA_{—}1_node_{—}106 (SEQ ID NO:746) according to the present invention is supported by 4 libraries. The number of libraries was determined as previously described. This segment can be found in the following transcript(s): HUMCACH1A_PEA_{—}1_T19 (SEQ ID NO:720). Table 65 below describes the starting and ending position of this segment on each transcript.

TABLE 65
Segment location on transcripts

| | Segment | Segment |
|---|---|---|
| | starting | ending |
| Transcript name | position | position |
| HUMCACH1A_PEA_1_T19 | 1 | 1456 |
| (SEQ ID NO: 720) | | |

[2793] Segment cluster HUMCACH1A_PEA_{—}1_node_{—}109 (SEQ ID NO:747) according to the present invention is supported by 6 libraries. The number of libraries was determined as previously described. This segment can be found in the following transcript(s): HUMCACH1A_PEA_{—}1_T0 (SEQ ID NO:705), HUMCACH1A_PEA_{—}1_T1 (SEQ ID NO:706), HUMCACH1A_PEA_{—}1_T2 (SEQ ID NO:707), HUMCACH1A_PEA_{—}1_T3 (SEQ ID NO:708), HUMCACH1A_PEA_{—}1_T4 (SEQ ID NO:709), HUMCACH1A_PEA_{—}1_T6 (SEQ ID NO:710), HUMCACH1A_PEA_{—}1_T7 (SEQ ID NO:711), HUMCACH1A_PEA_{—}1_T8 (SEQ ID NO:712), HUMCACH1A_PEA_{—}1_T12 (SEQ ID NO:713), HUMCACH1A_PEA_{—}1_T13 (SEQ ID NO:714), HUMCACH1A_PEA_{—}1_T17 (SEQ ID NO:718), HUMCACH1A_PEA_{—}1_T18 (SEQ ID NO:719) and HUMCACH1A_PEA_{—}1_T19 (SEQ ID NO:720). Table 66 below describes the starting and ending position of this segment on each transcript.

TABLE 66
Segment location on transcripts

| | Seg- | |
|---|---|---|
| | ment | Segment |
| | starting | ending |
| Transcript name | position | position |
| HUMCACH1A_PEA_1_T0 (SEQ ID NO: 705) | 5612 | 5979 |
| HUMCACH1A_PEA_1_T1 (SEQ ID NO: 706) | 5189 | 5556 |
| HUMCACH1A_PEA_1_T2 (SEQ ID NO: 707) | 5612 | 5979 |
| HUMCACH1A_PEA_1_T3 (SEQ ID NO: 708) | 5612 | 5979 |
| HUMCACH1A_PEA_1_T4 (SEQ ID NO: 709) | 5612 | 5979 |
| HUMCACH1A_PEA_1_T6 (SEQ ID NO: 710) | 5612 | 5979 |
| HUMCACH1A_PEA_1_T7 (SEQ ID NO: 711) | 5612 | 5979 |
| HUMCACH1A_PEA_1_T8 (SEQ ID NO: 712) | 5552 | 5919 |
| HUMCACH1A_PEA_1_T12 (SEQ ID NO: 713) | 3945 | 4312 |
| HUMCACH1A_PEA_1_T13 (SEQ ID NO: 714) | 5612 | 5979 |
| HUMCACH1A_PEA_1_T17 (SEQ ID NO: 718) | 1202 | 1569 |
| HUMCACH1A_PEA_1_T18 (SEQ ID NO: 719) | 453 | 820 |
| HUMCACH1A_PEA_1_T19 (SEQ ID NO: 720) | 1574 | 1941 |

[2794] Segment cluster HUMCACH1A_PEA_{—}1_node_{—}113 (SEQ ID NO:748) according to the present invention is supported by 4 libraries. The number of libraries was determined as previously described. This segment can be found in the following transcript(s): HUMCACH1A_PEA_{—}1_T0 (SEQ ID NO:705), HUMCACH1A_PEA_{—}1_T1 (SEQ ID NO:706), HUMCACH1A_PEA_{—}1_T2 (SEQ ID NO:707), HUMCACH1A_PEA_{—}1_T3 (SEQ ID NO:708), HUMCACH1A_PEA_{—}1_T4 (SEQ ID NO:709), HUMCACH1A_PEA_{—}1_T6 (SEQ ID NO:710), HUMCACH1A_PEA_{—}1_T7 (SEQ ID NO:711), HUMCACH1A_PEA_{—}1_T8 (SEQ ID NO:712), HUMCACH1A_PEA_{—}1_T12 (SEQ ID NO:713), HUMCACH1A_PEA_{—}1_T13 (SEQ ID NO:714), HUMCACH1A_PEA_{—}1_T17 (SEQ ID NO:718), HUMCACH1A_PEA_{—}1_T18 (SEQ ID NO:719) and HUMCACH1A_PEA_{—}1_T19 (SEQ ID NO:720). Table 67 below describes the starting and ending position of this segment on each transcript.

TABLE 67
Segment location on transcripts

| | Seg- | |
|---|---|---|
| | ment | Segment |
| | starting | ending |
| Transcript name | position | position |
| HUMCACH1A_PEA_1_T0 (SEQ ID NO: 705) | 6007 | 6156 |
| HUMCACH1A_PEA_1_T1 (SEQ ID NO: 706) | 5584 | 5733 |
| HUMCACH1A_PEA_1_T2 (SEQ ID NO: 707) | 6007 | 6156 |
| HUMCACH1A_PEA_1_T3 (SEQ ID NO: 708) | 6007 | 6156 |
| HUMCACH1A_PEA_1_T4 (SEQ ID NO: 709) | 6007 | 6156 |
| HUMCACH1A_PEA_1_T6 (SEQ ID NO: 710) | 6007 | 6156 |
| HUMCACH1A_PEA_1_T7 (SEQ ID NO: 711) | 5980 | 6129 |
| HUMCACH1A_PEA_1_T8 (SEQ ID NO: 712) | 5947 | 6096 |
| HUMCACH1A_PEA_1_T12 (SEQ ID NO: 713) | 4340 | 4489 |
| HUMCACH1A_PEA_1_T13 (SEQ ID NO: 714) | 5980 | 6129 |
| HUMCACH1A_PEA_1_T17 (SEQ ID NO: 718) | 1597 | 1746 |
| HUMCACH1A_PEA_1_T18 (SEQ ID NO: 719) | 848 | 997 |
| HUMCACH1A_PEA_1_T19 (SEQ ID NO: 720) | 1969 | 2118 |

[2795] Segment cluster HUMCACH1A_PEA_{—}1_node_{—}114 (SEQ ID NO:749) according to the present invention is supported by 1 libraries. The number of libraries was determined as previously described. This segment can be found in the following transcript(s): HUMCACH1A_PEA_{—}1_T6 (SEQ ID NO:710). Table 68 below describes the starting and ending position of this segment on each transcript.

TABLE 68
Segment location on transcripts

| | Segment | Segment |
|---|---|---|
| | starting | ending |
| Transcript name | position | position |
| HUMCACH1A_PEA_1_T6 | 6157 | 6335 |
| (SEQ ID NO: 710) | | |

[2796] Segment cluster HUMCACH1A_PEA_{—}1_node_{—}116 (SEQ ID NO:750) according to the present invention is supported by 4 libraries. The number of libraries was determined as previously described. This segment can be found in the following transcript(s): HUMCACH1A_PEA_{—}1_T0 (SEQ ID NO:705), HUMCACH1A_PEA_{—}1_T1 (SEQ ID NO:706), HUMCACH1A_PEA_{—}1_T2 (SEQ ID NO:707), HUMCACH1A_PEA_{—}1_T3 (SEQ ID NO:708), HUMCACH1A_PEA_{—}1_T4 (SEQ ID NO:709), HUMCACH1A_PEA_{—}1_T6 (SEQ ID NO:710), HUMCACH1A_PEA_{—}1_T7 (SEQ ID NO:711), HUMCACH1A_PEA_{—}1_T8 (SEQ ID NO:712), HUMCACH1A_PEA_{—}1_T12 (SEQ ID NO:713), HUMCACH1A_PEA_{—}1_T13 (SEQ ID NO:714), HUMCACH1A_PEA_{—}1_T17 (SEQ ID NO:718), HUMCACH1A_PEA_{—}1_T18 (SEQ ID NO:719) and HUMCACH1A_PEA_{—}1_T19 (SEQ ID NO:720). Table 69 below describes the starting and ending position of this segment on each transcript.

TABLE 69
Segment location on transcripts

| | Seg- | |
|---|---|---|
| | ment | Segment |
| | starting | ending |
| Transcript name | position | position |
| HUMCACH1A_PEA_1_T0 (SEQ ID NO: 705) | 6157 | 6320 |
| HUMCACH1A_PEA_1_T1 (SEQ ID NO: 706) | 5734 | 5897 |
| HUMCACH1A_PEA_1_T2 (SEQ ID NO: 707) | 6157 | 6320 |
| HUMCACH1A_PEA_1_T3 (SEQ ID NO: 708) | 6157 | 6320 |
| HUMCACH1A_PEA_1_T4 (SEQ ID NO: 709) | 6157 | 6320 |
| HUMCACH1A_PEA_1_T6 (SEQ ID NO: 710) | 6336 | 6499 |
| HUMCACH1A_PEA_1_T7 (SEQ ID NO: 711) | 6130 | 6293 |
| HUMCACH1A_PEA_1_T8 (SEQ ID NO: 712) | 6097 | 6260 |
| HUMCACH1A_PEA_1_T12 (SEQ ID NO: 713) | 4490 | 4653 |
| HUMCACH1A_PEA_1_T13 (SEQ ID NO: 714) | 6130 | 6293 |
| HUMCACH1A_PEA_1_T17 (SEQ ID NO: 718) | 1747 | 1910 |
| HUMCACH1A_PEA_1_T18 (SEQ ID NO: 719) | 998 | 1161 |
| HUMCACH1A_PEA_1_T19 (SEQ ID NO: 720) | 2119 | 2282 |

[2797] Segment cluster HUMCACH1A_PEA_{—}1_node_{—}119 (SEQ ID NO:751) according to the present invention is supported by 4 libraries. The number of libraries was determined as previously described. This segment can be found in the following transcript(s): HUMCACH1A_PEA_{—}1_T0 (SEQ ID NO:705), HUMCACH1A_PEA_{—}1_T1 (SEQ ID NO:706), HUMCACH1A_PEA_{—}1_T2 (SEQ ID NO:707), HUMCACH1A_PEA_{—}1_T3 (SEQ ID NO:708), HUMCACH1A_PEA_{—}1_T4 (SEQ ID NO:709), HUMCACH1A_PEA_{—}1_T6 (SEQ ID NO:710), HUMCACH1A_PEA_{—}1_T7 (SEQ ID NO:711), HUMCACH1A_PEA_{—}1_T8 (SEQ ID NO:712), HUMCACH1A_PEA_{—}1_T12 (SEQ ID NO:713), HUMCACH1A_PEA_{—}1_T17 (SEQ ID NO:718), HUMCACH1A_PEA_{—}1_T18 (SEQ ID NO:719) and HUMCACH1A_PEA_{—}1_T19 (SEQ ID NO:720). Table 70 below describes the starting and ending position of this segment on each transcript.

TABLE 70
Segment location on transcripts

| | Seg- | |
|---|---|---|
| | ment | Segment |
| | starting | ending |
| Transcript name | position | position |
| HUMCACH1A_PEA_1_T0 (SEQ ID NO: 705) | 6321 | 6442 |
| HUMCACH1A_PEA_1_T1 (SEQ ID NO: 706) | 5898 | 6019 |
| HUMCACH1A_PEA_1_T2 (SEQ ID NO: 707) | 6321 | 6442 |
| HUMCACH1A_PEA_1_T3 (SEQ ID NO: 708) | 6321 | 6442 |
| HUMCACH1A_PEA_1_T4 (SEQ ID NO: 709) | 6321 | 6442 |
| HUMCACH1A_PEA_1_T6 (SEQ ID NO: 710) | 6500 | 6621 |
| HUMCACH1A_PEA_1_T7 (SEQ ID NO: 711) | 6294 | 6415 |
| HUMCACH1A_PEA_1_T8 (SEQ ID NO: 712) | 6261 | 6382 |
| HUMCACH1A_PEA_1_T12 (SEQ ID NO: 713) | 4654 | 4775 |
| HUMCACH1A_PEA_1_T17 (SEQ ID NO: 718) | 1911 | 2032 |
| HUMCACH1A_PEA_1_T18 (SEQ ID NO: 719) | 1162 | 1283 |
| HUMCACH1A_PEA_1_T19 (SEQ ID NO: 720) | 2283 | 2404 |

[2798] Segment cluster HUMCACH1A_PEA_{—}1_node_{—}12 (SEQ ID NO:752) according to the present invention is supported by 15 libraries. The number of libraries was determined as previously described. This segment can be found in the following transcript(s): HUMCACH1A_PEA_{—}1_T0 (SEQ ID NO:705), HUMCACH1A_PEA_{—}1_T1 (SEQ ID NO:706), HUMCACH1A_PEA_{—}1_T2 (SEQ ID NO:707), HUMCACH1A_PEA_{—}1_T3 (SEQ ID NO:708), HUMCACH1A_PEA_{—}1_T4 (SEQ ID NO:709), HUMCACH1A_PEA_{—}1_T6 (SEQ ID NO:710), HUMCACH1A_PEA_{—}1_T7 (SEQ ID NO:711), HUMCACH1A_PEA_{—}1_T8 (SEQ ID NO:712), HUMCACH1A_PEA_{—}1_T12 (SEQ ID NO:713), HUMCACH1A_PEA_{—}1_T17 (SEQ ID NO:718), HUMCACH1A_PEA_{—}1_T18 (SEQ ID NO:719) and HUMCACH1A_PEA_{—}1_T19 (SEQ ID NO:720). Table 71 below describes the starting and ending position of this segment on each transcript.

TABLE 71
Segment location on transcripts

| | | Seg- |
|---|---|---|
| | Segment | ment |
| | starting | ending |
| Transcript name | position | position |
| HUMCACH1A_PEA_1_T0 (SEQ ID NO: 705) | 6443 | 6763 |
| HUMCACH1A_PEA_1_T1 (SEQ ID NO: 706) | 6020 | 6340 |
| HUMCACH1A_PEA_1_T2 (SEQ ID NO: 707) | 6443 | 6763 |
| HUMCACH1A_PEA_1_T3 (SEQ ID NO: 708) | 6443 | 6763 |
| HUMCACH1A_PEA_1_T4 (SEQ ID NO: 709) | 6443 | 6763 |
| HUMCACH1A_PEA_1_T6 (SEQ ID NO: 710) | 6622 | 6942 |
| HUMCACH1A_PEA_1_T7 (SEQ ID NO: 711) | 6416 | 6736 |
| HUMCACH1A_PEA_1_T8 (SEQ ID NO: 712) | 6383 | 6703 |
| HUMCACH1A_PEA_1_T12 (SEQ ID NO: 713) | 4776 | 5096 |
| HUMCACH1A_PEA_1_T17 (SEQ ID NO: 718) | 2033 | 2353 |
| HUMCACH1A_PEA_1_T18 (SEQ ID NO: 719) | 1284 | 1604 |
| HUMCACH1A_PEA_1_T19 (SEQ ID NO: 720) | 2405 | 2725 |

[2799] Segment cluster HUMCACH1A_PEA_{—}1_node_{—}123 (SEQ ID NO:753) according to the present invention is supported by 28 libraries. The number of libraries was determined as previously described. This segment can be found in the following transcript(s): HUMCACH1A_PEA_{—}1_T0 (SEQ ID NO:705), HUMCACH1A_PEA_{—}1_T1 (SEQ ID NO:706), HUMCACH1A_PEA_{—}1_T2 (SEQ ID NO:707), HUMCACH1A_PEA_{—}1_T3 (SEQ ID NO:708), HUMCACH1A_PEA_{—}1_T4 (SEQ ID NO:709), HUMCACH1A_PEA_{—}1_T6 (SEQ ID NO:710), HUMCACH1A_PEA_{—}1_T7 (SEQ ID NO:711), HUMCACH1A_PEA_{—}1_T8 (SEQ ID NO:712), HUMCACH1A_PEA_{—}1_T12 (SEQ ID NO:713), HUMCACH1A_PEA_{—}1_T17 (SEQ ID NO:718), HUMCACH1A_PEA_{—}1_T18 (SEQ ID NO:719) and HUMCACH1A_PEA_{—}1_T19 (SEQ ID NO:720). Table 72 below describes the starting and ending position of this segment on each transcript.

TABLE 72
Segment location on transcripts

| | | Seg- |
|---|---|---|
| | Segment | ment |
| | starting | ending |
| Transcript name | position | position |
| HUMCACH1A_PEA_1_T0 (SEQ ID NO: 705) | 6764 | 7550 |
| HUMCACH1A_PEA_1_T1 (SEQ ID NO: 706) | 6341 | 7127 |
| HUMCACH1A_PEA_1_T2 (SEQ ID NO: 707) | 6764 | 7550 |
| HUMCACH1A_PEA_1_T3 (SEQ ID NO: 708) | 6764 | 7550 |
| HUMCACH1A_PEA_1_T4 (SEQ ID NO: 709) | 6764 | 7550 |
| HUMCACH1A_PEA_1_T6 (SEQ ID NO: 710) | 6943 | 7729 |
| HUMCACH1A_PEA_1_T7 (SEQ ID NO: 711) | 6737 | 7523 |
| HUMCACH1A_PEA_1_T8 (SEQ ID NO: 712) | 6704 | 7490 |
| HUMCACH1A_PEA_1_T12 (SEQ ID NO: 713) | 5097 | 5883 |
| HUMCACH1A_PEA_1_T17 (SEQ ID NO: 718) | 2354 | 3140 |
| HUMCACH1A_PEA_1_T18 (SEQ ID NO: 719) | 1605 | 2391 |
| HUMCACH1A_PEA_1_T19 (SEQ ID NO: 720) | 2726 | 3512 |

[2800] Segment cluster HUMCACH1A_PEA_{—}1_node_{—}125 (SEQ ID NO:754) according to the present invention is supported by 48 libraries. The number of libraries was determined as previously described. This segment can be found in the following transcript(s): HUMCACH1A_PEA_{—}1_T0 (SEQ ID NO:705), HUMCACH1A_PEA_{—}1_T1 (SEQ ID NO:706), HUMCACH1A_PEA_{—}1_T2 (SEQ ID NO:707), HUMCACH1A_PEA_{—}1_T3 (SEQ ID NO:708), HUMCACH1A_PEA_{—}1_T4 (SEQ ID NO:709), HUMCACH1A_PEA_{—}1_T6 (SEQ ID NO:710), HUMCACH1A_PEA_{—}1_T7 (SEQ ID NO:711), HUMCACH1A_PEA_{—}1_T8 (SEQ ID NO:712), HUMCACH1A_PEA_{—}1_T12 (SEQ ID NO:713), HUMCACH1A_PEA_{—}1_T17 (SEQ ID NO:718), HUMCACH1A_PEA_{—}1_T18 (SEQ ID NO:719) and HUMCACH1A_PEA_{—}1_T19 (SEQ ID NO:720). Table 73 below describes the starting and ending position of this segment on each transcript.

TABLE 73
Segment location on transcripts

| | | Seg- |
|---|---|---|
| | Segment | ment |
| | starting | ending |
| Transcript name | position | position |
| HUMCACH1A_PEA_1_T0 (SEQ ID NO: 705) | 7650 | 9310 |
| HUMCACH1A_PEA_1_T1 (SEQ ID NO: 706) | 7227 | 8887 |
| HUMCACH1A_PEA_1_T2 (SEQ ID NO: 707) | 7650 | 9310 |
| HUMCACH1A_PEA_1_T3 (SEQ ID NO: 708) | 7650 | 8114 |
| HUMCACH1A_PEA_1_T4 (SEQ ID NO: 709) | 7650 | 7850 |
| HUMCACH1A_PEA_1_T6 (SEQ ID NO: 710) | 7829 | 9489 |
| HUMCACH1A_PEA_1_T7 (SEQ ID NO: 711) | 7623 | 9283 |
| HUMCACH1A_PEA_1_T8 (SEQ ID NO: 712) | 7590 | 9250 |
| HUMCACH1A_PEA_1_T12 (SEQ ID NO: 713) | 5983 | 7643 |
| HUMCACH1A_PEA_1_T17 (SEQ ID NO: 718) | 3240 | 4900 |
| HUMCACH1A_PEA_1_T18 (SEQ ID NO: 719) | 2491 | 4151 |
| HUMCACH1A_PEA_1_T19 (SEQ ID NO: 720) | 3612 | 5272 |

[2801] Segment cluster HUMCACH1A_PEA_{—}1_node_{—}128 (SEQ ID NO:755) according to the present invention is supported by 1 libraries. The number of libraries was determined as previously described. This segment can be found in the following transcript(s): HUMCACH1A_PEA_{—}1_T2 (SEQ ID NO:707). Table 74 below describes the starting and ending position of this segment on each transcript.

TABLE 74
Segment location on transcripts

| | Segment | Segment |
|---|---|---|
| Transcript name | starting position | ending position |
| HUMCACH1A_PEA_1_T2 | 9311 | 9458 |
| (SEQ ID NO: 707) | | |

[2802] According to an optional embodiment of the present invention, short segments related to the above cluster are also provided. These segments are up to about 120 bp in length, and so are included in a separate description.

[2803] Segment cluster HUMCACH1A_PEA_{—}1_node_{—}0 (SEQ ID NO:756) according to the present invention is supported by 1 libraries. The number of libraries was determined as previously described. This segment can be found in the following transcript(s): HUMCACH1A_PEA_{—}1_T1 (SEQ ID NO:706). Table 75 below describes the starting and ending position of this segment on each transcript.

TABLE 75
Segment location on transcripts

| | Segment | Segment |
|---|---|---|
| Transcript name | starting position | ending position |
| HUMCACH1A_PEA_1_T1 | 1 | 45 |
| (SEQ ID NO: 706) | | |

[2804] Segment cluster HUMCACH1A_PEA_{—}1_node_{—}3 (SEQ ID NO:757) according to the present invention is supported by 2 libraries. The number of libraries was determined as previously described. This segment can be found in the following transcript(s): HUMCACH1A_PEA_{—}1_T0 (SEQ ID NO:705), HUMCACH1A_PEA_{—}1_T1 (SEQ ID NO:706), HUMCACH1A_PEA_{—}1_T2 (SEQ ID NO:707), HUMCACH1A_PEA_{—}1_T3 (SEQ ID NO:708), HUMCACH1A_PEA_{—}1_T4 (SEQ ID NO:709), HUMCACH1A_PEA_{—}1_T6 (SEQ ID NO:710), HUMCACH1A_PEA_{—}1_T7 (SEQ ID NO:711), HUMCACH1A_PEA_{—}1_T8 (SEQ ID NO:712), HUMCACH1A_PEA_{—}1_T13 (SEQ ID NO:714), HUMCACH1A_PEA_{—}1_T14 (SEQ ID NO:715), HUMCACH1A_PEA_{—}1_T15 (SEQ ID NO:716), HUMCACH1A_PEA_{—}1_T16 (SEQ ID NO:717), HUMCACH1A_PEA_{—}1_T20 (SEQ ID NO:721) and HUMCACH1A_PEA_{—}1_T22 (SEQ ID NO:722). Table 76 below describes the starting and ending position of this segment on each transcript.

TABLE 76
Segment location on transcripts

| | | Seg- |
|---|---|---|
| | Segment | ment |
| | starting | ending |
| Transcript name | position | position |
| HUMCACH1A_PEA_1_T0 (SEQ ID NO: 705) | 469 | 578 |
| HUMCACH1A_PEA_1_T1 (SEQ ID NO: 706) | 46 | 155 |
| HUMCACH1A_PEA_1_T2 (SEQ ID NO: 707) | 469 | 578 |
| HUMCACH1A_PEA_1_T3 (SEQ ID NO: 708) | 469 | 578 |
| HUMCACH1A_PEA_1_T4 (SEQ ID NO: 709) | 469 | 578 |
| HUMCACH1A_PEA_1_T6 (SEQ ID NO: 710) | 469 | 578 |
| HUMCACH1A_PEA_1_T7 (SEQ ID NO: 711) | 469 | 578 |
| HUMCACH1A_PEA_1_T8 (SEQ ID NO: 712) | 469 | 578 |
| HUMCACH1A_PEA_1_T13 (SEQ ID NO: 714) | 469 | 578 |
| HUMCACH1A_PEA_1_T14 (SEQ ID NO: 715) | 469 | 578 |
| HUMCACH1A_PEA_1_T15 (SEQ ID NO: 716) | 469 | 578 |
| HUMCACH1A_PEA_1_T16 (SEQ ID NO: 717) | 469 | 578 |
| HUMCACH1A_PEA_1_T20 (SEQ ID NO: 721) | 469 | 578 |
| HUMCACH1A_PEA_1_T22 (SEQ ID NO: 722) | 469 | 578 |

[2805] Segment cluster HUMCACH1A_PEA_{—}1_node_{—}7 (SEQ ID NO:758) according to the present invention is supported by 2 libraries. The number of libraries was determined as previously described. This segment can be found in the following transcript(s): HUMCACH1A_PEA_{—}1_T0 (SEQ ID NO:705), HUMCACH1A_PEA_{—}1_T1 (SEQ ID NO:706), HUMCACH1A_PEA_{—}1_T2 (SEQ ID NO:707), HUMCACH1A_PEA_{—}1_T3 (SEQ ID NO:708), HUMCACH1A_PEA_{—}1_T4 (SEQ ID NO:709), HUMCACH1A_PEA_{—}1_T6 (SEQ ID NO:710), HUMCACH1A_PEA_{—}1_T7 (SEQ ID NO:711), HUMCACH1A_PEA_{—}1_T8 (SEQ ID NO:712), HUMCACH1A_PEA_{—}1_T13 (SEQ ID NO:714), HUMCACH1A_PEA_{—}1_T14 (SEQ ID NO:715), HUMCACH1A_PEA_{—}1_T15 (SEQ ID NO:716), HUMCACH1A_PEA_{—}1_T16 (SEQ ID NO:717), HUMCACH1A_PEA_{—}1_T20 (SEQ ID NO:721) and HUMCACH1A_PEA_{—}1_T22 (SEQ ID NO:722). Table 77 below describes the starting and ending position of this segment on each transcript.

TABLE 77
Segment location on transcripts

| | | Seg- |
|---|---|---|
| | Segment | ment |
| | starting | ending |
| Transcript name | position | position |
| HUMCACH1A_PEA_1_T0 (SEQ ID NO: 705) | 889 | 994 |
| HUMCACH1A_PEA_1_T1 (SEQ ID NO: 706) | 466 | 571 |
| HUMCACH1A_PEA_1_T2 (SEQ ID NO: 707) | 889 | 994 |
| HUMCACH1A_PEA_1_T3 (SEQ ID NO: 708) | 889 | 994 |
| HUMCACH1A_PEA_1_T4 (SEQ ID NO: 709) | 889 | 994 |
| HUMCACH1A_PEA_1_T6 (SEQ ID NO: 710) | 889 | 994 |
| HUMCACH1A_PEA_1_T7 (SEQ ID NO: 711) | 889 | 994 |
| HUMCACH1A_PEA_1_T8 (SEQ ID NO: 712) | 889 | 994 |
| HUMCACH1A_PEA_1_T13 (SEQ ID NO: 714) | 889 | 994 |
| HUMCACH1A_PEA_1_T14 (SEQ ID NO: 715) | 889 | 994 |
| HUMCACH1A_PEA_1_T15 (SEQ ID NO: 716) | 889 | 994 |
| HUMCACH1A_PEA_1_T16 (SEQ ID NO: 717) | 889 | 994 |
| HUMCACH1A_PEA_1_T20 (SEQ ID NO: 721) | 889 | 994 |
| HUMCACH1A_PEA_1_T22 (SEQ ID NO: 722) | 889 | 994 |

[2806] Segment cluster HUMCACH1A_PEA_{—}1_node_{—}23 (SEQ ID NO:759) according to the present invention is supported by 5 libraries. The number of libraries was determined as previously described. This segment can be found in the following transcript(s): HUMCACH1A_PEA_{—}1_T8 (SEQ ID NO:712) and HUMCACH1A_PEA_{—}1_T22 (SEQ ID NO:722). Table 78 below describes the starting and ending position of this segment on each transcript.

TABLE 78
Segment location on transcripts

| | Segment | Segment |
|---|---|---|
| Transcript name | starting position | ending position |
| HUMCACH1A_PEA_1_T8 | 1628 | 1731 |
| (SEQ ID NO: 712) | | |
| HUMCACH1A_PEA_1_T22 | 1628 | 1731 |
| (SEQ ID NO: 722) | | |

[2807] Segment cluster HUMCACH1A_PEA_{—}1_node_{—}26 (SEQ ID NO:760) according to the present invention is supported by 2 libraries. The number of libraries was determined as previously described. This segment can be found in the following transcript(s): HUMCACH1A_PEA_{—}1_T0 (SEQ ID NO:705), HUMCACH1A_PEA_{—}1_T1 (SEQ ID NO:706), HUMCACH1A_PEA_{—}1_T2 (SEQ ID NO:707), HUMCACH1A_PEA_{—}1_T3 (SEQ ID NO:708), HUMCACH1A_PEA_{—}1_T4 (SEQ ID NO:709), HUMCACH1A_PEA_{—}1_T6 (SEQ ID NO:710), HUMCACH1A_PEA_{—}1_T7 (SEQ ID NO:711), HUMCACH1A_PEA_{—}1_T13 (SEQ ID NO:714), HUMCACH1A_PEA_{—}1_T14 (SEQ ID NO:715), HUMCACH1A_PEA_{—}1_T15 (SEQ ID NO:716), HUMCACH1A_PEA_{—}1_T16 (SEQ ID NO:717) and HUMCACH1A_PEA_{—}1_T20 (SEQ ID NO:721). Table 79 below describes the starting and ending position of this segment on each transcript.

TABLE 79
Segment location on transcripts

| | | Seg- |
|---|---|---|
| | Segment | ment |
| | starting | ending |
| Transcript name | position | position |
| HUMCACH1A_PEA_1_T0 (SEQ ID NO: 705) | 1628 | 1731 |
| HUMCACH1A_PEA_1_T1 (SEQ ID NO: 706) | 1205 | 1308 |
| HUMCACH1A_PEA_1_T2 (SEQ ID NO: 707) | 1628 | 1731 |
| HUMCACH1A_PEA_1_T3 (SEQ ID NO: 708) | 1628 | 1731 |
| HUMCACH1A_PEA_1_T4 (SEQ ID NO: 709) | 1628 | 1731 |
| HUMCACH1A_PEA_1_T6 (SEQ ID NO: 710) | 1628 | 1731 |
| HUMCACH1A_PEA_1_T7 (SEQ ID NO: 711) | 1628 | 1731 |
| HUMCACH1A_PEA_1_T13 (SEQ ID NO: 714) | 1628 | 1731 |
| HUMCACH1A_PEA_1_T14 (SEQ ID NO: 715) | 1628 | 1731 |
| HUMCACH1A_PEA_1_T15 (SEQ ID NO: 716) | 1628 | 1731 |
| HUMCACH1A_PEA_1_T16 (SEQ ID NO: 717) | 1628 | 1731 |
| HUMCACH1A_PEA_1_T20 (SEQ ID NO: 721) | 1628 | 1731 |

[2808] Segment cluster HUMCACH1A_PEA_{—}1_node_{—}32 (SEQ ID NO:761) according to the present invention is supported by 2 libraries. The number of libraries was determined as previously described. This segment can be found in the following transcript(s): HUMCACH1A_PEA_{—}1_T12 (SEQ ID NO:713). Table 80 below describes the starting and ending position of this segment on each transcript.

TABLE 80
Segment location on transcripts

| | Segment | Segment |
|---|---|---|
| Transcript name | starting position | ending position |
| HUMCACH1A_PEA_1_T12 | 1 | 64 |
| (SEQ ID NO: 713) | | |

[2809] Segment cluster HUMCACH1A_PEA_{—}1_node_{—}35 (SEQ ID NO:762) according to the present invention is supported by 1 libraries. The number of libraries was determined as previously described. This segment can be found in the following transcript(s): HUMCACH1A_PEA_{—}1_T0 (SEQ ID NO:705), HUMCACH1A_PEA_{—}1_T1 (SEQ ID NO:706), HUMCACH1A_PEA_{—}1_T2 (SEQ ID NO:707), HUMCACH1A_PEA_{—}1_T3 (SEQ ID NO:708), HUMCACH1A_PEA_{—}1_T4 (SEQ ID NO:709), HUMCACH1A_PEA_{—}1_T6 (SEQ ID NO:710), HUMCACH1A_PEA_{—}1_T7 (SEQ ID NO:711), HUMCACH1A_PEA_{—}1_T8 (SEQ ID NO:712), HUMCACH1A_PEA_{—}1_T12 (SEQ ID NO:713), HUMCACH1A_PEA_{—}1_T13 (SEQ ID NO:714), HUMCACH1A_PEA_{—}1_T14 (SEQ ID NO:715), HUMCACH1A_PEA_{—}1_T15 (SEQ ID NO:716) and HUMCACH1A_PEA_{—}1_T16 (SEQ ID NO:717). Table 81 below describes the starting and ending position of this segment on each transcript.

TABLE 81
Segment location on transcripts

| | | Seg- |
|---|---|---|
| | Segment | ment |
| | starting | ending |
| Transcript name | position | position |
| HUMCACH1A_PEA_1_T0 (SEQ ID NO: 705) | 1902 | 1989 |
| HUMCACH1A_PEA_1_T1 (SEQ ID NO: 706) | 1479 | 1566 |
| HUMCACH1A_PEA_1_T2 (SEQ ID NO: 707) | 1902 | 1989 |
| HUMCACH1A_PEA_1_T3 (SEQ ID NO: 708) | 1902 | 1989 |
| HUMCACH1A_PEA_1_T4 (SEQ ID NO: 709) | 1902 | 1989 |
| HUMCACH1A_PEA_1_T6 (SEQ ID NO: 710) | 1902 | 1989 |
| HUMCACH1A_PEA_1_T7 (SEQ ID NO: 711) | 1902 | 1989 |
| HUMCACH1A_PEA_1_T8 (SEQ ID NO: 712) | 1902 | 1989 |
| HUMCACH1A_PEA_1_T12 (SEQ ID NO: 713) | 235 | 322 |
| HUMCACH1A_PEA_1_T13 (SEQ ID NO: 714) | 1902 | 1989 |
| HUMCACH1A_PEA_1_T14 (SEQ ID NO: 715) | 1902 | 1989 |
| HUMCACH1A_PEA_1_T15 (SEQ ID NO: 716) | 1902 | 1989 |
| HUMCACH1A_PEA_1_T16 (SEQ ID NO: 717) | 1902 | 1989 |

[2810] Segment cluster HUMCACH1A_PEA_{—}1_node_{—}37 (SEQ ID NO:763) according to the present invention is supported by 1 libraries. The number of libraries was determined as previously described. This segment can be found in the following transcript(s): HUMCACH1A_PEA_{—}1_T0 (SEQ ID NO:705), HUMCACH1A_PEA_{—}1_T1 (SEQ ID NO:706), HUMCACH1A_PEA_{—}1_T2 (SEQ ID NO:707), HUMCACH1A_PEA_{—}1_T3 (SEQ ID NO:708), HUMCACH1A_PEA_{—}1_T4 (SEQ ID NO:709), HUMCACH1A_PEA_{—}1_T6 (SEQ ID NO:710), HUMCACH1A_PEA_{—}1_T7 (SEQ ID NO:711), HUMCACH1A_PEA_{—}1_T12 (SEQ ID NO:713), HUMCACH1A_PEA_{—}1_T13 (SEQ ID NO:714), HUMCACH1A_PEA_{—}1_T14 (SEQ ID NO:715), HUMCACH1A_PEA_{—}1_T15 (SEQ ID NO:716) and HUMCACH1A_PEA_{—}1_T16 (SEQ ID NO:717). Table 82 below describes the starting and ending position of this segment on each transcript.

TABLE 82
Segment location on transcripts

| | | Seg- |
|---|---|---|
| | Segment | ment |
| | starting | ending |
| Transcript name | position | position |
| HUMCACH1A_PEA_1_T0 (SEQ ID NO: 705) | 1990 | 2049 |
| HUMCACH1A_PEA_1_T1 (SEQ ID NO: 706) | 1567 | 1626 |
| HUMCACH1A_PEA_1_T2 (SEQ ID NO: 707) | 1990 | 2049 |
| HUMCACH1A_PEA_1_T3 (SEQ ID NO: 708) | 1990 | 2049 |
| HUMCACH1A_PEA_1_T4 (SEQ ID NO: 709) | 1990 | 2049 |
| HUMCACH1A_PEA_1_T6 (SEQ ID NO: 710) | 1990 | 2049 |
| HUMCACH1A_PEA_1_T7 (SEQ ID NO: 711) | 1990 | 2049 |
| HUMCACH1A_PEA_1_T12 (SEQ ID NO: 713) | 323 | 382 |
| HUMCACH1A_PEA_1_T13 (SEQ ID NO: 714) | 1990 | 2049 |
| HUMCACH1A_PEA_1_T14 (SEQ ID NO: 715) | 1990 | 2049 |
| HUMCACH1A_PEA_1_T15 (SEQ ID NO: 716) | 1990 | 2049 |
| HUMCACH1A_PEA_1_T16 (SEQ ID NO: 717) | 1990 | 2049 |

[2811] Segment cluster HUMCACH1A_PEA_{—}1_node_{—}39 (SEQ ID NO:764) according to the present invention is supported by 4 libraries. The number of libraries was determined as previously described. This segment can be found in the following transcript(s): HUMCACH1A_PEA_{—}1_T0 (SEQ ID NO:705), HUMCACH1A_PEA_{—}1_T1 (SEQ ID NO:706), HUMCACH1A_PEA_{—}1_T2 (SEQ ID NO:707), HUMCACH1A_PEA_{—}1_T3 (SEQ ID NO:708), HUMCACH1A_PEA_{—}1_T4 (SEQ ID NO:709), HUMCACH1A_PEA_{—}1_T6 (SEQ ID NO:710), HUMCACH1A_PEA_{—}1_T7 (SEQ ID NO:711), HUMCACH1A_PEA_{—}1_T8 (SEQ ID NO:712), HUMCACH1A_PEA_{—}1_T12 (SEQ ID NO:713), HUMCACH1A_PEA_{—}1_T13 (SEQ ID NO:714), HUMCACH1A_PEA_{—}1_T14 (SEQ ID NO:715), HUMCACH1A_PEA_{—}1_T15 (SEQ ID NO:716) and HUMCACH1A_PEA_{—}1_T16 (SEQ ID NO:717). Table 83 below describes the starting and ending position of this segment on each transcript.

TABLE 83
Segment location on transcripts

| | | Seg- |
|---|---|---|
| | Segment | ment |
| | starting | ending |
| Transcript name | position | position |
| HUMCACH1A_PEA_1_T0 (SEQ ID NO: 705) | 2050 | 2076 |
| HUMCACH1A_PEA_1_T1 (SEQ ID NO: 706) | 1627 | 1653 |
| HUMCACH1A_PEA_1_T2 (SEQ ID NO: 707) | 2050 | 2076 |
| HUMCACH1A_PEA_1_T3 (SEQ ID NO: 708) | 2050 | 2076 |
| HUMCACH1A_PEA_1_T4 (SEQ ID NO: 709) | 2050 | 2076 |
| HUMCACH1A_PEA_1_T6 (SEQ ID NO: 710) | 2050 | 2076 |
| HUMCACH1A_PEA_1_T7 (SEQ ID NO: 711) | 2050 | 2076 |
| HUMCACH1A_PEA_1_T8 (SEQ ID NO: 712) | 1990 | 2016 |
| HUMCACH1A_PEA_1_T12 (SEQ ID NO: 713) | 383 | 409 |
| HUMCACH1A_PEA_1_T13 (SEQ ID NO: 714) | 2050 | 2076 |
| HUMCACH1A_PEA_1_T14 (SEQ ID NO: 715) | 2050 | 2076 |
| HUMCACH1A_PEA_1_T15 (SEQ ID NO: 716) | 2050 | 2076 |
| HUMCACH1A_PEA_1_T16 (SEQ ID NO: 717) | 2050 | 2076 |

[2812] Segment cluster HUMCACH1A_PEA_{—}1_node_{—}49 (SEQ ID NO:765) according to the present invention is supported by 4 libraries. The number of libraries was determined as previously described. This segment can be found in the following transcript(s): HUMCACH1A_PEA_{—}1_T0 (SEQ ID NO:705), HUMCACH1A_PEA_{—}1_T1 (SEQ ID NO:706), HUMCACH1A_PEA_{—}1_T2 (SEQ ID NO:707), HUMCACH1A_PEA_{—}1_T3 (SEQ ID NO:708), HUMCACH1A_PEA_{—}1_T4 (SEQ ID NO:709), HUMCACH1A_PEA_{—}1_T6 (SEQ ID NO:710), HUMCACH1A_PEA_{—}1_T7 (SEQ ID NO:711), HUMCACH1A_PEA_{—}1_T8 (SEQ ID NO:712), HUMCACH1A_PEA_{—}1_T12 (SEQ ID NO:713), HUMCACH1A_PEA_{—}1_T13 (SEQ ID NO:714), HUMCACH1A_PEA_{—}1_T14 (SEQ ID NO:715), HUMCACH1A_PEA_{—}1_T15 (SEQ ID NO:716) and HUMCACH1A_PEA_{—}1_T16 (SEQ ID NO:717). Table 84 below describes the starting and ending position of this segment on each transcript.

TABLE 84
Segment location on transcripts

| | | Seg- |
|---|---|---|
| | Segment | ment |
| | starting | ending |
| Transcript name | position | position |
| HUMCACH1A_PEA_1_T0 (SEQ ID NO: 705) | 2793 | 2907 |
| HUMCACH1A_PEA_1_T1 (SEQ ID NO: 706) | 2370 | 2484 |
| HUMCACH1A_PEA_1_T2 (SEQ ID NO: 707) | 2793 | 2907 |
| HUMCACH1A_PEA_1_T3 (SEQ ID NO: 708) | 2793 | 2907 |
| HUMCACH1A_PEA_1_T4 (SEQ ID NO: 709) | 2793 | 2907 |
| HUMCACH1A_PEA_1_T6 (SEQ ID NO: 710) | 2793 | 2907 |
| HUMCACH1A_PEA_1_T7 (SEQ ID NO: 711) | 2793 | 2907 |
| HUMCACH1A_PEA_1_T8 (SEQ ID NO: 712) | 2733 | 2847 |
| HUMCACH1A_PEA_1_T12 (SEQ ID NO: 713) | 1126 | 1240 |
| HUMCACH1A_PEA_1_T13 (SEQ ID NO: 714) | 2793 | 2907 |
| HUMCACH1A_PEA_1_T14 (SEQ ID NO: 715) | 2793 | 2907 |
| HUMCACH1A_PEA_1_T15 (SEQ ID NO: 716) | 2793 | 2907 |
| HUMCACH1A_PEA_1_T16 (SEQ ID NO: 717) | 2793 | 2907 |

[2813] Segment cluster HUMCACH1A_PEA_{—}1_node_{—}51 (SEQ ID NO:766) according to the present invention is supported by 4 libraries. The number of libraries was determined as previously described. This segment can be found in the following transcript(s): HUMCACH1A_PEA_{—}1_T0 (SEQ ID NO:705), HUMCACH1A_PEA_{—}1_T1 (SEQ ID NO:706), HUMCACH1A_PEA_{—}1_T2 (SEQ ID NO:707), HUMCACH1A_PEA_{—}1_T3 (SEQ ID NO:708), HUMCACH1A_PEA_{—}1_T4 (SEQ ID NO:709), HUMCACH1A_PEA_{—}1_T6 (SEQ ID NO:710), HUMCACH1A_PEA_{—}1_T7 (SEQ ID NO:711), HUMCACH1A_PEA_{—}1_T8 (SEQ ID NO:712), HUMCACH1A_PEA_{—}1_T12 (SEQ ID NO:713), HUMCACH1A_PEA_{—}1_T13 (SEQ ID NO:714), HUMCACH1A_PEA_{—}1_T14 (SEQ ID NO:715), HUMCACH1A_PEA_{—}1_T15 (SEQ ID NO:716) and HUMCACH1A_PEA_{—}1_T16 (SEQ ID NO:717). Table 85 below describes the starting and ending position of this segment on each transcript.

TABLE 85
Segment location on transcripts

| | | Seg- |
|---|---|---|
| | Segment | ment |
| | starting | ending |
| Transcript name | position | position |
| HUMCACH1A_PEA_1_T0 (SEQ ID NO: 705) | 2908 | 2977 |
| HUMCACH1A_PEA_1_T1 (SEQ ID NO: 706) | 2485 | 2554 |
| HUMCACH1A_PEA_1_T2 (SEQ ID NO: 707) | 2908 | 2977 |
| HUMCACH1A_PEA_1_T3 (SEQ ID NO: 708) | 2908 | 2977 |
| HUMCACH1A_PEA_1_T4 (SEQ ID NO: 709) | 2908 | 2977 |
| HUMCACH1A_PEA_1_T6 (SEQ ID NO: 710) | 2908 | 2977 |
| HUMCACH1A_PEA_1_T7 (SEQ ID NO: 711) | 2908 | 2977 |
| HUMCACH1A_PEA_1_T8 (SEQ ID NO: 712) | 2848 | 2917 |
| HUMCACH1A_PEA_1_T12 (SEQ ID NO: 713) | 1241 | 1310 |
| HUMCACH1A_PEA_1_T13 (SEQ ID NO: 714) | 2908 | 2977 |
| HUMCACH1A_PEA_1_T14 (SEQ ID NO: 715) | 2908 | 2977 |
| HUMCACH1A_PEA_1_T15 (SEQ ID NO: 716) | 2908 | 2977 |
| HUMCACH1A_PEA_1_T16 (SEQ ID NO: 717) | 2908 | 2977 |

[2814] Segment cluster HUMCACH1A_PEA_{—}1_node_{—}53 (SEQ ID NO:767) according to the present invention is supported by 4 libraries. The number of libraries was determined as previously described. This segment can be found in the following transcript(s): HUMCACH1A_PEA_{—}1_T0 (SEQ ID NO:705), HUMCACH1A_PEA_{—}1_T1 (SEQ ID NO:706), HUMCACH1A_PEA_{—}1_T2 (SEQ ID NO:707), HUMCACH1A_PEA_{—}1_T3 (SEQ ID NO:708), HUMCACH1A_PEA_{—}1_T4 (SEQ ID NO:709), HUMCACH1A_PEA_{—}1_T6 (SEQ ID NO:710), HUMCACH1A_PEA_{—}1_T7 (SEQ ID NO:711), HUMCACH1A_PEA_{—}1_T8 (SEQ ID NO:712), HUMCACH1A_PEA_{—}1_T12 (SEQ ID NO:713), HUMCACH1A_PEA_{—}1_T13 (SEQ ID NO:714), HUMCACH1A_PEA_{—}1_T14 (SEQ ID NO:715), HUMCACH1A_PEA_{—}1_T15 (SEQ ID NO:716) and HUMCACH1A_PEA_{—}1_T16 (SEQ ID NO:717). Table 86 below describes the starting and ending position of this segment on each transcript.

TABLE 86
Segment location on transcripts

| | | Seg- |
|---|---|---|
| | Segment | ment |
| | starting | ending |
| Transcript name | position | position |
| HUMCACH1A_PEA_1_T0 (SEQ ID NO: 705) | 2978 | 3044 |
| HUMCACH1A_PEA_1_T1 (SEQ ID NO: 706) | 2555 | 2621 |
| HUMCACH1A_PEA_1_T2 (SEQ ID NO: 707) | 2978 | 3044 |
| HUMCACH1A_PEA_1_T3 (SEQ ID NO: 708) | 2978 | 3044 |
| HUMCACH1A_PEA_1_T4 (SEQ ID NO: 709) | 2978 | 3044 |
| HUMCACH1A_PEA_1_T6 (SEQ ID NO: 710) | 2978 | 3044 |
| HUMCACH1A_PEA_1_T7 (SEQ ID NO: 711) | 2978 | 3044 |
| HUMCACH1A_PEA_1_T8 (SEQ ID NO: 712) | 2918 | 2984 |
| HUMCACH1A_PEA_1_T12 (SEQ ID NO: 713) | 1311 | 1377 |
| HUMCACH1A_PEA_1_T13 (SEQ ID NO: 714) | 2978 | 3044 |
| HUMCACH1A_PEA_1_T14 (SEQ ID NO: 715) | 2978 | 3044 |
| HUMCACH1A_PEA_1_T15 (SEQ ID NO: 716) | 2978 | 3044 |
| HUMCACH1A_PEA_1_T16 (SEQ ID NO: 717) | 2978 | 3044 |

[2815] Segment cluster HUMCACH1A_PEA_{—}1_node_{—}58 (SEQ ID NO:768) according to the present invention is supported by 1 libraries. The number of libraries was determined as previously described. This segment can be found in the following transcript(s): HUMCACH1A_PEA_{—}1_T16 (SEQ ID NO:717). Table 87 below describes the starting and ending position of this segment on each transcript.

TABLE 87
Segment location on transcripts

| | | Seg- |
|---|---|---|
| | Segment | ment |
| | starting | ending |
| Transcript name | position | position |
| HUMCACH1A_PEA_1_T16 (SEQ ID NO: 717) | 3323 | 3363 |

[2816] Segment cluster HUMCACH1A_PEA_{—}1_node_{—}60 (SEQ ID NO:769) according to the present invention is supported by 4 libraries. The number of libraries was determined as previously described. This segment can be found in the following transcript(s): HUMCACH1A_PEA_{—}1_T0 (SEQ ID NO:705), HUMCACH1A_PEA_{—}1_T1 (SEQ ID NO:706), HUMCACH1A_PEA_{—}1_T2 (SEQ ID NO:707), HUMCACH1A_PEA_{—}1_T3 (SEQ ID NO:708), HUMCACH1A_PEA_{—}1_T4 (SEQ ID NO:709), HUMCACH1A_PEA_{—}1_T6 (SEQ ID NO:710), HUMCACH1A_PEA_{—}1_T7 (SEQ ID NO:711), HUMCACH1A_PEA_{—}1_T8 (SEQ ID NO:712), HUMCACH1A_PEA_{—}1_T12 (SEQ ID NO:713), HUMCACH1A_PEA_{—}1_T13 (SEQ ID NO:714), HUMCACH1A_PEA_{—}1_T14 (SEQ ID NO:715) and HUMCACH1A_PEA_{—}1_T15 (SEQ ID NO:716). Table 88 below describes the starting and ending position of this segment on each transcript.

TABLE 88
Segment location on transcripts

| | | Seg- |
|---|---|---|
| | Segment | ment |
| | starting | ending |
| Transcript name | position | position |
| HUMCACH1A_PEA_1_T0 (SEQ ID NO: 705) | 3323 | 3382 |
| HUMCACH1A_PEA_1_T1 (SEQ ID NO: 706) | 2900 | 2959 |
| HUMCACH1A_PEA_1_T2 (SEQ ID NO: 707) | 3323 | 3382 |
| HUMCACH1A_PEA_1_T3 (SEQ ID NO: 708) | 3323 | 3382 |
| HUMCACH1A_PEA_1_T4 (SEQ ID NO: 709) | 3323 | 3382 |
| HUMCACH1A_PEA_1_T6 (SEQ ID NO: 710) | 3323 | 3382 |
| HUMCACH1A_PEA_1_T7 (SEQ ID NO: 711) | 3323 | 3382 |
| HUMCACH1A_PEA_1_T8 (SEQ ID NO: 712) | 3263 | 3322 |
| HUMCACH1A_PEA_1_T12 (SEQ ID NO: 713) | 1656 | 1715 |
| HUMCACH1A_PEA_1_T13 (SEQ ID NO: 714) | 3323 | 3382 |
| HUMCACH1A_PEA_1_T14 (SEQ ID NO: 715) | 3323 | 3382 |
| HUMCACH1A_PEA_1_T15 (SEQ ID NO: 716) | 3323 | 3382 |

[2817] Segment cluster HUMCACH1A_PEA_{—}1_node_{—}62 (SEQ ID NO:770) according to the present invention is supported by 2 libraries. The number of libraries was determined as previously described. This segment can be found in the following transcript(s): HUMCACH1A_PEA_{—}1_T0 (SEQ ID NO:705), HUMCACH1A_PEA_{—}1_T1 (SEQ ID NO:706), HUMCACH1A_PEA_{—}1_T2 (SEQ ID NO:707), HUMCACH1A_PEA_{—}1_T3 (SEQ ID NO:708), HUMCACH1A_PEA_{—}1_T4 (SEQ ID NO:709), HUMCACH1A_PEA_{—}1_T6 (SEQ ID NO:710), HUMCACH1A_PEA_{—}1_T7 (SEQ ID NO:711), HUMCACH1A_PEA_{—}1_T8 (SEQ ID NO:712), HUMCACH1A_PEA_{—}1_T12 (SEQ ID NO:713), HUMCACH1A_PEA_{—}1_T13 (SEQ ID NO:714), HUMCACH1A_PEA_{—}1_T14 (SEQ ID NO:715) and HUMCACH1A_PEA_{—}1_T15 (SEQ ID NO:716). Table 89 below describes the starting and ending position of this segment on each transcript.

TABLE 89
Segment location on transcripts

| | | Seg- |
|---|---|---|
| | Segment | ment |
| | starting | ending |
| Transcript name | position | position |
| HUMCACH1A_PEA_1_T0 (SEQ ID NO: 705) | 3383 | 3489 |
| HUMCACH1A_PEA_1_T1 (SEQ ID NO: 706) | 2960 | 3066 |
| HUMCACH1A_PEA_1_T2 (SEQ ID NO: 707) | 3383 | 3489 |
| HUMCACH1A_PEA_1_T3 (SEQ ID NO: 708) | 3383 | 3489 |
| HUMCACH1A_PEA_1_T4 (SEQ ID NO: 709) | 3383 | 3489 |
| HUMCACH1A_PEA_1_T6 (SEQ ID NO: 710) | 3383 | 3489 |
| HUMCACH1A_PEA_1_T7 (SEQ ID NO: 711) | 3383 | 3489 |
| HUMCACH1A_PEA_1_T8 (SEQ ID NO: 712) | 3323 | 3429 |
| HUMCACH1A_PEA_1_T12 (SEQ ID NO: 713) | 1716 | 1822 |
| HUMCACH1A_PEA_1_T13 (SEQ ID NO: 714) | 3383 | 3489 |
| HUMCACH1A_PEA_1_T14 (SEQ ID NO: 715) | 3383 | 3489 |
| HUMCACH1A_PEA_1_T15 (SEQ ID NO: 716) | 3383 | 3489 |

[2818] Segment cluster HUMCACH1A_PEA_{—}1_node_{—}64 (SEQ ID NO:771) according to the present invention is supported by 2 libraries. The number of libraries was determined as previously described. This segment can be found in the following transcript(s): HUMCACH1A_PEA_{—}1_T0 (SEQ ID NO:705), HUMCACH1A_PEA_{—}1_T1 (SEQ ID NO:706), HUMCACH1A_PEA_{—}1_T2 (SEQ ID NO:707), HUMCACH1A_PEA_{—}1_T3 (SEQ ID NO:708), HUMCACH1A_PEA_{—}1_T4 (SEQ ID NO:709), HUMCACH1A_PEA_{—}1_T6 (SEQ ID NO:710), HUMCACH1A_PEA_{—}1_T7 (SEQ ID NO:711), HUMCACH1A_PEA_{—}1_T8 (SEQ ID NO:712), HUMCACH1A_PEA_{—}1_T12 (SEQ ID NO:713), HUMCACH1A_PEA_{—}1_T13 (SEQ ID NO:714), HUMCACH1A_PEA_{—}1_T14 (SEQ ID NO:715) and HUMCACH1A_PEA_{—}1_T15 (SEQ ID NO:716). Table 90 below describes the starting and ending position of this segment on each transcript.

TABLE 90
Segment location on transcripts

| | | Seg- |
|---|---|---|
| | Segment | ment |
| | starting | ending |
| Transcript name | position | position |
| HUMCACH1A_PEA_1_T0 (SEQ ID NO: 705) | 3490 | 3577 |
| HUMCACH1A_PEA_1_T1 (SEQ ID NO: 706) | 3067 | 3154 |
| HUMCACH1A_PEA_1_T2 (SEQ ID NO: 707) | 3490 | 3577 |
| HUMCACH1A_PEA_1_T3 (SEQ ID NO: 708) | 3490 | 3577 |
| HUMCACH1A_PEA_1_T4 (SEQ ID NO: 709) | 3490 | 3577 |
| HUMCACH1A_PEA_1_T6 (SEQ ID NO: 710) | 3490 | 3577 |
| HUMCACH1A_PEA_1_T7 (SEQ ID NO: 711) | 3490 | 3577 |
| HUMCACH1A_PEA_1_T8 (SEQ ID NO: 712) | 3430 | 3517 |
| HUMCACH1A_PEA_1_T12 (SEQ ID NO: 713) | 1823 | 1910 |
| HUMCACH1A_PEA_1_T13 (SEQ ID NO: 714) | 3490 | 3577 |
| HUMCACH1A_PEA_1_T14 (SEQ ID NO: 715) | 3490 | 3577 |
| HUMCACH1A_PEA_1_T15 (SEQ ID NO: 716) | 3490 | 3577 |

[2819] Segment cluster HUMCACH1A_PEA_{—}1_node_{—}66 (SEQ ID NO:772) according to the present invention is supported by 4 libraries. The number of libraries was determined as previously described. This segment can be found in the following transcript(s): HUMCACH1A_PEA_{—}1_T0 (SEQ ID NO:705), HUMCACH1A_PEA_{—}1_T1 (SEQ ID NO:706), HUMCACH1A_PEA_{—}1_T2 (SEQ ID NO:707), HUMCACH1A_PEA_{—}1_T3 (SEQ ID NO:708), HUMCACH1A_PEA_{—}1_T4 (SEQ ID NO:709), HUMCACH1A_PEA_{—}1_T6 (SEQ ID NO:710), HUMCACH1A_PEA_{—}1_T7 (SEQ ID NO:711), HUMCACH1A_PEA_{—}1_T8 (SEQ ID NO:712), HUMCACH1A_PEA_{—}1_T12 (SEQ ID NO:713), HUMCACH1A_PEA_{—}1_T13 (SEQ ID NO:714), HUMCACH1A_PEA_{—}1_T14 (SEQ ID NO:715) and HUMCACH1A_PEA_{—}1_T15 (SEQ ID NO:716). Table 91 below describes the starting and ending position of this segment on each transcript.

TABLE 91
Segment location on transcripts

| | | Seg- |
|---|---|---|
| | Segment | ment |
| | starting | ending |
| Transcript name | position | position |
| HUMCACH1A_PEA_1_T0 (SEQ ID NO: 705) | 3578 | 3685 |
| HUMCACH1A_PEA_1_T1 (SEQ ID NO: 706) | 3155 | 3262 |
| HUMCACH1A_PEA_1_T2 (SEQ ID NO: 707) | 3578 | 3685 |
| HUMCACH1A_PEA_1_T3 (SEQ ID NO: 708) | 3578 | 3685 |
| HUMCACH1A_PEA_1_T4 (SEQ ID NO: 709) | 3578 | 3685 |
| HUMCACH1A_PEA_1_T6 (SEQ ID NO: 710) | 3578 | 3685 |
| HUMCACH1A_PEA_1_T7 (SEQ ID NO: 711) | 3578 | 3685 |
| HUMCACH1A_PEA_1_T8 (SEQ ID NO: 712) | 3518 | 3625 |
| HUMCACH1A_PEA_1_T12 (SEQ ID NO: 713) | 1911 | 2018 |
| HUMCACH1A_PEA_1_T13 (SEQ ID NO: 714) | 3578 | 3685 |
| HUMCACH1A_PEA_1_T14 (SEQ ID NO: 715) | 3578 | 3685 |
| HUMCACH1A_PEA_1_T15 (SEQ ID NO: 716) | 3578 | 3685 |

[2820] Segment cluster HUMCACH1A_PEA_{—}1_node_{—}68 (SEQ ID NO:773) according to the present invention is supported by 3 libraries. The number of libraries was determined as previously described. This segment can be found in the following transcript(s): HUMCACH1A_PEA_{—}1_T0 (SEQ ID NO:705), HUMCACH1A_PEA_{—}1_T1 (SEQ ID NO:706), HUMCACH1A_PEA_{—}1_T2 (SEQ ID NO:707), HUMCACH1A_PEA_{—}1_T3 (SEQ ID NO:708), HUMCACH1A_PEA_{—}1_T4 (SEQ ID NO:709), HUMCACH1A_PEA_{—}1_T6 (SEQ ID NO:710), HUMCACH1A_PEA_{—}1_T7 (SEQ ID NO:711), HUMCACH1A_PEA_{—}1_T8 (SEQ ID NO:712), HUMCACH1A_PEA_{—}1_T12 (SEQ ID NO:713), HUMCACH1A_PEA_{—}1_T13 (SEQ ID NO:714), HUMCACH1A_PEA_{—}1_T14 (SEQ ID NO:715) and HUMCACH1A_PEA_{—}1_T15 (SEQ ID NO:716). Table 92 below describes the starting and ending position of this segment on each transcript.

TABLE 92
Segment location on transcripts

| | | Seg- |
|---|---|---|
| | Segment | ment |
| | starting | ending |
| Transcript name | position | position |
| HUMCACH1A_PEA_1_T0 (SEQ ID NO: 705) | 3686 | 3738 |
| HUMCACH1A_PEA_1_T1 (SEQ ID NO: 706) | 3263 | 3315 |
| HUMCACH1A_PEA_1_T2 (SEQ ID NO: 707) | 3686 | 3738 |
| HUMCACH1A_PEA_1_T3 (SEQ ID NO: 708) | 3686 | 3738 |
| HUMCACH1A_PEA_1_T4 (SEQ ID NO: 709) | 3686 | 3738 |
| HUMCACH1A_PEA_1_T6 (SEQ ID NO: 710) | 3686 | 3738 |
| HUMCACH1A_PEA_1_T7 (SEQ ID NO: 711) | 3686 | 3738 |
| HUMCACH1A_PEA_1_T8 (SEQ ID NO: 712) | 3626 | 3678 |
| HUMCACH1A_PEA_1_T12 (SEQ ID NO: 713) | 2019 | 2071 |
| HUMCACH1A_PEA_1_T13 (SEQ ID NO: 714) | 3686 | 3738 |
| HUMCACH1A_PEA_1_T14 (SEQ ID NO: 715) | 3686 | 3738 |
| HUMCACH1A_PEA_1_T15 (SEQ ID NO: 716) | 3686 | 3738 |

[2821] Segment cluster HUMCACH1A_PEA_{—}1_node_{—}76 (SEQ ID NO:774) according to the present invention is supported by 2 libraries. The number of libraries was determined as previously described. This segment can be found in the following transcript(s): HUMCACH1A_PEA_{—}1_T0 (SEQ ID NO:705), HUMCACH1A_PEA_{—}1_T1 (SEQ ID NO:706), HUMCACH1A_PEA_{—}1_T2 (SEQ ID NO:707), HUMCACH1A_PEA_{—}1_T3 (SEQ ID NO:708), HUMCACH1A_PEA_{—}1_T4 (SEQ ID NO:709), HUMCACH1A_PEA_{—}1_T6 (SEQ ID NO:710), HUMCACH1A_PEA_{—}1_T7 (SEQ ID NO:711), HUMCACH1A_PEA_{—}1_T8 (SEQ ID NO:712), HUMCACH1A_PEA_{—}1_T12 (SEQ ID NO:713), HUMCACH1A_PEA_{—}1_T13 (SEQ ID NO:714), HUMCACH1A_PEA_{—}1_T14 (SEQ ID NO:715) and HUMCACH1A_PEA_{—}1_T15 (SEQ ID NO:716). Table 93 below describes the starting and ending position of this segment on each transcript.

TABLE 93
Segment location on transcripts

| | | Seg- |
|---|---|---|
| | Segment | ment |
| | starting | ending |
| Transcript name | position | position |
| HUMCACH1A_PEA_1_T0 (SEQ ID NO: 705) | 4247 | 4357 |
| HUMCACH1A_PEA_1_T1 (SEQ ID NO: 706) | 3824 | 3934 |
| HUMCACH1A_PEA_1_T2 (SEQ ID NO: 707) | 4247 | 4357 |
| HUMCACH1A_PEA_1_T3 (SEQ ID NO: 708) | 4247 | 4357 |
| HUMCACH1A_PEA_1_T4 (SEQ ID NO: 709) | 4247 | 4357 |
| HUMCACH1A_PEA_1_T6 (SEQ ID NO: 710) | 4247 | 4357 |
| HUMCACH1A_PEA_1_T7 (SEQ ID NO: 711) | 4247 | 4357 |
| HUMCACH1A_PEA_1_T8 (SEQ ID NO: 712) | 4187 | 4297 |
| HUMCACH1A_PEA_1_T12 (SEQ ID NO: 713) | 2580 | 2690 |
| HUMCACH1A_PEA_1_T13 (SEQ ID NO: 714) | 4247 | 4357 |
| HUMCACH1A_PEA_1_T14 (SEQ ID NO: 715) | 4247 | 4357 |
| HUMCACH1A_PEA_1_T15 (SEQ ID NO: 716) | 4247 | 4357 |

[2822] Segment cluster HUMCACH1A_PEA_{—}1_node_{—}77 (SEQ ID NO:775) according to the present invention is supported by 1 libraries. The number of libraries was determined as previously described. This segment can be found in the following transcript(s): HUMCACH1A_PEA_{—}1_T15 (SEQ ID NO:716). Table 94 below describes the starting and ending position of this segment on each transcript.

TABLE 94
Segment location on transcripts

| | | Seg- |
|---|---|---|
| | Segment | ment |
| | starting | ending |
| Transcript name | position | position |
| HUMCACH1A_PEA_1_T15 (SEQ ID NO: 716) | 4358 | 4400 |

[2823] Segment cluster HUMCACH1A_PEA_{—}1_node_{—}79 (SEQ ID NO:776) according to the present invention is supported by 1 libraries. The number of libraries was determined as previously described. This segment can be found in the following transcript(s): HUMCACH1A_PEA_{—}1_T0 (SEQ ID NO:705), HUMCACH1A_PEA_{—}1_T1 (SEQ ID NO:706), HUMCACH1A_PEA_{—}1_T2 (SEQ ID NO:707), HUMCACH1A_PEA_{—}1_T3 (SEQ ID NO:708), HUMCACH1A_PEA_{—}1_T4 (SEQ ID NO:709), HUMCACH1A_PEA_{—}1_T6 (SEQ ID NO:710), HUMCACH1A_PEA_{—}1_T7 (SEQ ID NO:711), HUMCACH1A_PEA_{—}1_T8 (SEQ ID NO:712), HUMCACH1A_PEA_{—}1_T12 (SEQ ID NO:713), HUMCACH1A_PEA_{—}1_T13 (SEQ ID NO:714) and HUMCACH1A_PEA_{—}1_T14 (SEQ ID NO:715). Table 95 below describes the starting and ending position of this segment on each transcript.

TABLE 95
Segment location on transcripts

| | | Seg- |
|---|---|---|
| | Segment | ment |
| | starting | ending |
| Transcript name | position | position |
| HUMCACH1A_PEA_1_T0 (SEQ ID NO: 705) | 4358 | 4441 |
| HUMCACH1A_PEA_1_T1 (SEQ ID NO: 706) | 3935 | 4018 |
| HUMCACH1A_PEA_1_T2 (SEQ ID NO: 707) | 4358 | 4441 |
| HUMCACH1A_PEA_1_T3 (SEQ ID NO: 708) | 4358 | 4441 |
| HUMCACH1A_PEA_1_T4 (SEQ ID NO: 709) | 4358 | 4441 |
| HUMCACH1A_PEA_1_T6 (SEQ ID NO: 710) | 4358 | 4441 |
| HUMCACH1A_PEA_1_T7 (SEQ ID NO: 711) | 4358 | 4441 |
| HUMCACH1A_PEA_1_T8 (SEQ ID NO: 712) | 4298 | 4381 |
| HUMCACH1A_PEA_1_T12 (SEQ ID NO: 713) | 2691 | 2774 |
| HUMCACH1A_PEA_1_T13 (SEQ ID NO: 714) | 4358 | 4441 |
| HUMCACH1A_PEA_1_T14 (SEQ ID NO: 715) | 4358 | 4441 |

[2824] Segment cluster HUMCACH1A_PEA_{—}1_node_{—}81 (SEQ ID NO:777) according to the present invention is supported by 1 libraries. The number of libraries was determined as previously described. This segment can be found in the following transcript(s): HUMCACH1A_PEA_{—}1_T17 (SEQ ID NO:718). Table 96 below describes the starting and ending position of this segment on each transcript.

TABLE 96
Segment location on transcripts

| | | Seg- |
|---|---|---|
| | Segment | ment |
| | starting | ending |
| Transcript name | position | position |
| HUMCACH1A_PEA_1_T17 (SEQ ID NO: 718) | 1 | 31 |

[2825] Segment cluster HUMCACH1A_PEA_{—}1_node_{—}84 (SEQ ID NO:778) according to the present invention is supported by 2 libraries. The number of libraries was determined as previously described. This segment can be found in the following transcript(s): HUMCACH1A_PEA_{—}1_T0 (SEQ ID NO:705), HUMCACH1A_PEA_{—}1_T1 (SEQ ID NO:706), HUMCACH1A_PEA_{—}1_T2 (SEQ ID NO:707), HUMCACH1A_PEA_{—}1_T3 (SEQ ID NO:708), HUMCACH1A_PEA_{—}1_T4 (SEQ ID NO:709), HUMCACH1A_PEA_{—}1_T6 (SEQ ID NO:710), HUMCACH1A_PEA_{—}1_T7 (SEQ ID NO:711), HUMCACH1A_PEA_{—}1_T8 (SEQ ID NO:712), HUMCACH1A_PEA_{—}1_T12 (SEQ ID NO:713), HUMCACH1A_PEA_{—}1_T13 (SEQ ID NO:714), HUMCACH1A_PEA_{—}1_T14 (SEQ ID NO:715) and HUMCACH1A_PEA_{—}1_T17 (SEQ ID NO:718). Table 97 below describes the starting and ending position of this segment on each transcript.

TABLE 97
Segment location on transcripts

| | | Seg- |
|---|---|---|
| | Segment | ment |
| | starting | ending |
| Transcript name | position | position |
| HUMCACH1A_PEA_1_T0 (SEQ ID NO: 705) | 4442 | 4486 |
| HUMCACH1A_PEA_1_T1 (SEQ ID NO: 706) | 4019 | 4063 |
| HUMCACH1A_PEA_1_T2 (SEQ ID NO: 707) | 4442 | 4486 |
| HUMCACH1A_PEA_1_T3 (SEQ ID NO: 708) | 4442 | 4486 |
| HUMCACH1A_PEA_1_T4 (SEQ ID NO: 709) | 4442 | 4486 |
| HUMCACH1A_PEA_1_T6 (SEQ ID NO: 710) | 4442 | 4486 |
| HUMCACH1A_PEA_1_T7 (SEQ ID NO: 711) | 4442 | 4486 |
| HUMCACH1A_PEA_1_T8 (SEQ ID NO: 712) | 4382 | 4426 |
| HUMCACH1A_PEA_1_T12 (SEQ ID NO: 713) | 2775 | 2819 |
| HUMCACH1A_PEA_1_T13 (SEQ ID NO: 714) | 4442 | 4486 |
| HUMCACH1A_PEA_1_T14 (SEQ ID NO: 715) | 4442 | 4486 |
| HUMCACH1A_PEA_1_T17 (SEQ ID NO: 718) | 32 | 76 |

[2826] Segment cluster HUMCACH1A_PEA_{—}1_node_{—}88 (SEQ ID NO:779) according to the present invention is supported by 2 libraries. The number of libraries was determined as previously described. This segment can be found in the following transcript(s): HUMCACH1A_PEA_{—}1_T0 (SEQ ID NO:705), HUMCACH1A_PEA_{—}1_T1 (SEQ ID NO:706), HUMCACH1A_PEA_{—}1_T2 (SEQ ID NO:707), HUMCACH1A_PEA_{—}1_T3 (SEQ ID NO:708), HUMCACH1A_PEA_{—}1_T4 (SEQ ID NO:709), HUMCACH1A_PEA_{—}1_T6 (SEQ ID NO:710), HUMCACH1A_PEA_{—}1_T7 (SEQ ID NO:711), HUMCACH1A_PEA_{—}1_T8 (SEQ ID NO:712), HUMCACH1A_PEA_{—}1_T12 (SEQ ID NO:713), HUMCACH1A_PEA_{—}1_T13 (SEQ ID NO:714), HUMCACH1A_PEA_{—}1_T14 (SEQ ID NO:715) and HUMCACH1A_PEA_{—}1_T17 (SEQ ID NO:718). Table 98 below describes the starting and ending position of this segment on each transcript.

TABLE 98
Segment location on transcripts

| | | Seg- |
|---|---|---|
| | Segment | ment |
| | starting | ending |
| Transcript name | position | position |
| HUMCACH1A_PEA_1_T0 (SEQ ID NO: 705) | 4616 | 4681 |
| HUMCACH1A_PEA_1_T1 (SEQ ID NO: 706) | 4193 | 4258 |
| HUMCACH1A_PEA_1_T2 (SEQ ID NO: 707) | 4616 | 4681 |
| HUMCACH1A_PEA_1_T3 (SEQ ID NO: 708) | 4616 | 4681 |
| HUMCACH1A_PEA_1_T4 (SEQ ID NO: 709) | 4616 | 4681 |
| HUMCACH1A_PEA_1_T6 (SEQ ID NO: 710) | 4616 | 4681 |
| HUMCACH1A_PEA_1_T7 (SEQ ID NO: 711) | 4616 | 4681 |
| HUMCACH1A_PEA_1_T8 (SEQ ID NO: 712) | 4556 | 4621 |
| HUMCACH1A_PEA_1_T12 (SEQ ID NO: 713) | 2949 | 3014 |
| HUMCACH1A_PEA_1_T13 (SEQ ID NO: 714) | 4616 | 4681 |
| HUMCACH1A_PEA_1_T14 (SEQ ID NO: 715) | 4616 | 4681 |
| HUMCACH1A_PEA_1_T17 (SEQ ID NO: 718) | 206 | 271 |

[2827] Segment cluster HUMCACH1A_PEA_{—}1_node_{—}90 (SEQ ID NO:780) according to the present invention is supported by 2 libraries. The number of libraries was determined as previously described. This segment can be found in the following transcript(s): HUMCACH1A_PEA_{—}1_T0 (SEQ ID NO:705), HUMCACH1A_PEA_{—}1_T1 (SEQ ID NO:706), HUMCACH1A_PEA_{—}1_T2 (SEQ ID NO:707), HUMCACH1A_PEA_{—}1_T3 (SEQ ID NO:708), HUMCACH1A_PEA_{—}1_T4 (SEQ ID NO:709), HUMCACH1A_PEA_{—}1_T6 (SEQ ID NO:710), HUMCACH1A_PEA_{—}1_T7 (SEQ ID NO:711), HUMCACH1A_PEA_{—}1_T8 (SEQ ID NO:712), HUMCACH1A_PEA_{—}1_T12 (SEQ ID NO:713), HUMCACH1A_PEA_{—}1_T13 (SEQ ID NO:714), HUMCACH1A_PEA_{—}1_T14 (SEQ ID NO:715) and HUMCACH1A_PEA_{—}1_T17 (SEQ ID NO:718). Table 99 below describes the starting and ending position of this segment on each transcript.

TABLE 99
Segment location on transcripts

| | | Seg- |
|---|---|---|
| | Segment | ment |
| | starting | ending |
| Transcript name | position | position |
| HUMCACH1A_PEA_1_T0 (SEQ ID NO: 705) | 4682 | 4773 |
| HUMCACH1A_PEA_1_T1 (SEQ ID NO: 706) | 4259 | 4350 |
| HUMCACH1A_PEA_1_T2 (SEQ ID NO: 707) | 4682 | 4773 |
| HUMCACH1A_PEA_1_T3 (SEQ ID NO: 708) | 4682 | 4773 |
| HUMCACH1A_PEA_1_T4 (SEQ ID NO: 709) | 4682 | 4773 |
| HUMCACH1A_PEA_1_T6 (SEQ ID NO: 710) | 4682 | 4773 |
| HUMCACH1A_PEA_1_T7 (SEQ ID NO: 711) | 4682 | 4773 |
| HUMCACH1A_PEA_1_T8 (SEQ ID NO: 712) | 4622 | 4713 |
| HUMCACH1A_PEA_1_T12 (SEQ ID NO: 713) | 3015 | 3106 |
| HUMCACH1A_PEA_1_T13 (SEQ ID NO: 714) | 4682 | 4773 |
| HUMCACH1A_PEA_1_T14 (SEQ ID NO: 715) | 4682 | 4773 |
| HUMCACH1A_PEA_1_T17 (SEQ ID NO: 718) | 272 | 363 |

[2828] Segment cluster HUMCACH1A_PEA_{—}1_node_{—}96 (SEQ ID NO:781) according to the present invention is supported by 4 libraries. The number of libraries was determined as previously described. This segment can be found in the following transcript(s): HUMCACH1A_PEA_{—}1_T0 (SEQ ID NO:705), HUMCACH1A_PEA_{—}1_T1 (SEQ ID NO:706), HUMCACH1A_PEA_{—}1_T2 (SEQ ID NO:707), HUMCACH1A_PEA_{—}1_T3 (SEQ ID NO:708), HUMCACH1A_PEA_{—}1_T4 (SEQ ID NO:709), HUMCACH1A_PEA_{—}1_T6 (SEQ ID NO:710), HUMCACH1A_PEA_{—}1_T7 (SEQ ID NO:711), HUMCACH1A_PEA_{—}1_T8 (SEQ ID NO:712), HUMCACH1A_PEA_{—}1_T12 (SEQ ID NO:713), HUMCACH1A_PEA_{—}1_T13 (SEQ ID NO:714), HUMCACH1A_PEA_{—}1_T14 (SEQ ID NO:715) and HUMCACH1A_PEA_{—}1_T17 (SEQ ID NO:718). Table 100 below describes the starting and ending position of this segment on each transcript.

TABLE 100
Segment location on transcripts

| | | Seg- |
|---|---|---|
| | Segment | ment |
| | starting | ending |
| Transcript name | position | position |
| HUMCACH1A_PEA_1_T0 (SEQ ID NO: 705) | 5062 | 5158 |
| HUMCACH1A_PEA_1_T1 (SEQ ID NO: 706) | 4639 | 4735 |
| HUMCACH1A_PEA_1_T2 (SEQ ID NO: 707) | 5062 | 5158 |
| HUMCACH1A_PEA_1_T3 (SEQ ID NO: 708) | 5062 | 5158 |
| HUMCACH1A_PEA_1_T4 (SEQ ID NO: 709) | 5062 | 5158 |
| HUMCACH1A_PEA_1_T6 (SEQ ID NO: 710) | 5062 | 5158 |
| HUMCACH1A_PEA_1_T7 (SEQ ID NO: 711) | 5062 | 5158 |
| HUMCACH1A_PEA_1_T8 (SEQ ID NO: 712) | 5002 | 5098 |
| HUMCACH1A_PEA_1_T12 (SEQ ID NO: 713) | 3395 | 3491 |
| HUMCACH1A_PEA_1_T13 (SEQ ID NO: 714) | 5062 | 5158 |
| HUMCACH1A_PEA_1_T14 (SEQ ID NO: 715) | 5062 | 5158 |
| HUMCACH1A_PEA_1_T17 (SEQ ID NO: 718) | 652 | 748 |

[2829] Segment cluster HUMCACH1A_PEA_{—}1_node_{—}98 (SEQ ID NO:782) according to the present invention is supported by 2 libraries. The number of libraries was determined as previously described. This segment can be found in the following transcript(s): HUMCACH1A_PEA_{—}1_T0 (SEQ ID NO:705), HUMCACH1A_PEA_{—}1_T1 (SEQ ID NO:706), HUMCACH1A_PEA_{—}1_T2 (SEQ ID NO:707), HUMCACH1A_PEA_{—}1_T3 (SEQ ID NO:708), HUMCACH1A_PEA_{—}1_T4 (SEQ ID NO:709), HUMCACH1A_PEA_{—}1_T6 (SEQ ID NO:710), HUMCACH1A_PEA_{—}1_T7 (SEQ ID NO:711), HUMCACH1A_PEA_{—}1_T8 (SEQ ID NO:712), HUMCACH1A_PEA_{—}1_T12 (SEQ ID NO:713), HUMCACH1A_PEA_{—}1_T13 (SEQ ID NO:714), HUMCACH1A_PEA_{—}1_T14 (SEQ ID NO:715) and HUMCACH1A_PEA_{—}1_T17 (SEQ ID NO:718). Table 101 below describes the starting and ending position of this segment on each transcript.

TABLE 101
Segment location on transcripts

| | | Seg- |
|---|---|---|
| | Segment | ment |
| | starting | ending |
| Transcript name | position | position |
| HUMCACH1A_PEA_1_T0 (SEQ ID NO: 705) | 5159 | 5261 |
| HUMCACH1A_PEA_1_T1 (SEQ ID NO: 706) | 4736 | 4838 |
| HUMCACH1A_PEA_1_T2 (SEQ ID NO: 707) | 5159 | 5261 |
| HUMCACH1A_PEA_1_T3 (SEQ ID NO: 708) | 5159 | 5261 |
| HUMCACH1A_PEA_1_T4 (SEQ ID NO: 709) | 5159 | 5261 |
| HUMCACH1A_PEA_1_T6 (SEQ ID NO: 710) | 5159 | 5261 |
| HUMCACH1A_PEA_1_T7 (SEQ ID NO: 711) | 5159 | 5261 |
| HUMCACH1A_PEA_1_T8 (SEQ ID NO: 712) | 5099 | 5201 |
| HUMCACH1A_PEA_1_T12 (SEQ ID NO: 713) | 3492 | 3594 |
| HUMCACH1A_PEA_1_T13 (SEQ ID NO: 714) | 5159 | 5261 |
| HUMCACH1A_PEA_1_T14 (SEQ ID NO: 715) | 5159 | 5261 |
| HUMCACH1A_PEA_1_T17 (SEQ ID NO: 718) | 749 | 851 |

[2830] Segment cluster HUMCACH1A_PEA_{—}1_node_{—}100 (SEQ ID NO:783) according to the present invention is supported by 1 libraries. The number of libraries was determined as previously described. This segment can be found in the following transcript(s): HUMCACH1A_PEA_{—}1_T0 (SEQ ID NO:705), HUMCACH1A_PEA_{—}1_T1 (SEQ ID NO:706), HUMCACH1A_PEA_{—}1_T2 (SEQ ID NO:707), HUMCACH1A_PEA_{—}1_T3 (SEQ ID NO:708), HUMCACH1A_PEA_{—}1_T4 (SEQ ID NO:709), HUMCACH1A_PEA_{—}1_T6 (SEQ ID NO:710), HUMCACH1A_PEA_{—}1_T7 (SEQ ID NO:711), HUMCACH1A_PEA_{—}1_T8 (SEQ ID NO:712), HUMCACH1A_PEA_{—}1_T12 (SEQ ID NO:713), HUMCACH1A_PEA_{—}1_T13 (SEQ ID NO:714), HUMCACH1A_PEA_{—}1_T14 (SEQ ID NO:715) and HUMCACH1A_PEA_{—}1_T17 (SEQ ID NO:718). Table 102 below describes the starting and ending position of this segment on each transcript.

TABLE 102
Segment location on transcripts

| | | Seg- |
|---|---|---|
| | Segment | ment |
| | starting | ending |
| Transcript name | position | position |
| HUMCACH1A_PEA_1_T0 (SEQ ID NO: 705) | 5262 | 5363 |
| HUMCACH1A_PEA_1_T1 (SEQ ID NO: 706) | 4839 | 4940 |
| HUMCACH1A_PEA_1_T2 (SEQ ID NO: 707) | 5262 | 5363 |
| HUMCACH1A_PEA_1_T3 (SEQ ID NO: 708) | 5262 | 5363 |
| HUMCACH1A_PEA_1_T4 (SEQ ID NO: 709) | 5262 | 5363 |
| HUMCACH1A_PEA_1_T6 (SEQ ID NO: 710) | 5262 | 5363 |
| HUMCACH1A_PEA_1_T7 (SEQ ID NO: 711) | 5262 | 5363 |
| HUMCACH1A_PEA_1_T8 (SEQ ID NO: 712) | 5202 | 5303 |
| HUMCACH1A_PEA_1_T12 (SEQ ID NO: 713) | 3595 | 3696 |
| HUMCACH1A_PEA_1_T13 (SEQ ID NO: 714) | 5262 | 5363 |
| HUMCACH1A_PEA_1_T14 (SEQ ID NO: 715) | 5262 | 5363 |
| HUMCACH1A_PEA_1_T17 (SEQ ID NO: 718) | 852 | 953 |

[2831] Segment cluster HUMCACH1A_PEA_{—}1_node_{—}101 (SEQ ID NO:784) according to the present invention is supported by 0 libraries. The number of libraries was determined as previously described. This segment can be found in the following transcript(s): HUMCACH1A_PEA_{—}1_T14 (SEQ ID NO:715). Table 103 below describes the starting and ending position of this segment on each transcript.

TABLE 103
Segment location on transcripts

| | | Seg- |
|---|---|---|
| | Segment | ment |
| | starting | ending |
| Transcript name | position | position |
| HUMCACH1A_PEA_1_T14 (SEQ ID NO: 715) | 5364 | 5440 |

[2832] Segment cluster HUMCACH1A_PEA_{—}1_node_{—}107 (SEQ ID NO:785) according to the present invention is supported by 6 libraries. The number of libraries was determined as previously described. This segment can be found in the following transcript(s): HUMCACH1A_PEA_{—}1_T0 (SEQ ID NO:705), HUMCACH1A_PEA_{—}1_T1 (SEQ ID NO:706), HUMCACH1A_PEA_{—}1_T2 (SEQ ID NO:707), HUMCACH1A_PEA_{—}1_T3 (SEQ ID NO:708), HUMCACH1A_PEA_{—}1_T4 (SEQ ID NO:709), HUMCACH1A_PEA_{—}1_T6 (SEQ ID NO:710), HUMCACH1A_PEA_{—}1_T7 (SEQ ID NO:711), HUMCACH1A_PEA_{—}1_T8 (SEQ ID NO:712), HUMCACH1A_PEA_{—}1_T12 (SEQ ID NO:713), HUMCACH1A_PEA_{—}1_T13 (SEQ ID NO:714), HUMCACH1A_PEA_{—}1_T17 (SEQ ID NO:718), HUMCACH1A_PEA_{—}1_T18 (SEQ ID NO:719) and HUMCACH1A_PEA_{—}1_T19 (SEQ ID NO:720). Table 104 below describes the starting and ending position of this segment on each transcript.

TABLE 104
Segment location on transcripts

| | | Seg- |
|---|---|---|
| | Segment | ment |
| | starting | ending |
| Transcript name | position | position |
| HUMCACH1A_PEA_1_T0 (SEQ ID NO: 705) | 5495 | 5611 |
| HUMCACH1A_PEA_1_T1 (SEQ ID NO: 706) | 5072 | 5188 |
| HUMCACH1A_PEA_1_T2 (SEQ ID NO: 707) | 5495 | 5611 |
| HUMCACH1A_PEA_1_T3 (SEQ ID NO: 708) | 5495 | 5611 |
| HUMCACH1A_PEA_1_T4 (SEQ ID NO: 709) | 5495 | 5611 |
| HUMCACH1A_PEA_1_T6 (SEQ ID NO: 710) | 5495 | 5611 |
| HUMCACH1A_PEA_1_T7 (SEQ ID NO: 711) | 5495 | 5611 |
| HUMCACH1A_PEA_1_T8 (SEQ ID NO: 712) | 5435 | 5551 |
| HUMCACH1A_PEA_1_T12 (SEQ ID NO: 713) | 3828 | 3944 |
| HUMCACH1A_PEA_1_T13 (SEQ ID NO: 714) | 5495 | 5611 |
| HUMCACH1A_PEA_1_T17 (SEQ ID NO: 718) | 1085 | 1201 |
| HUMCACH1A_PEA_1_T18 (SEQ ID NO: 719) | 336 | 452 |
| HUMCACH1A_PEA_1_T19 (SEQ ID NO: 720) | 1457 | 1573 |

[2833] Segment cluster HUMCACH1A_PEA_{—}1_node_{—}111 (SEQ ID NO:786) according to the present invention is supported by 0 libraries. The number of libraries was determined as previously described. This segment can be found in the following transcript(s): HUMCACH1A_PEA_{—}1_T0 (SEQ ID NO:705), HUMCACH1A_PEA_{—}1_T1 (SEQ ID NO:706), HUMCACH1A_PEA_{—}1_T2 (SEQ ID NO:707), HUMCACH1A_PEA_{—}1_T3 (SEQ ID NO:708), HUMCACH1A_PEA_{—}1_T4 (SEQ ID NO:709), HUMCACH1A_PEA_{—}1_T6 (SEQ ID NO:710), HUMCACH1A_PEA_{—}1_T8 (SEQ ID NO:712), HUMCACH1A_PEA_{—}1_T12 (SEQ ID NO:713), HUMCACH1A_PEA_{—}1_T17 (SEQ ID NO:718), HUMCACH1A_PEA_{—}1_T18 (SEQ ID NO:719) and HUMCACH1A_PEA_{—}1_T19 (SEQ ID NO:720). Table 105 below describes the starting and ending position of this segment on each transcript.

TABLE 105
Segment location on transcripts

| | | Seg- |
|---|---|---|
| | Segment | ment |
| | starting | ending |
| Transcript name | position | position |
| HUMCACH1A_PEA_1_T0 (SEQ ID NO: 705) | 5980 | 6006 |
| HUMCACH1A_PEA_1_T1 (SEQ ID NO: 706) | 5557 | 5583 |
| HUMCACH1A_PEA_1_T2 (SEQ ID NO: 707) | 5980 | 6006 |
| HUMCACH1A_PEA_1_T3 (SEQ ID NO: 708) | 5980 | 6006 |
| HUMCACH1A_PEA_1_T4 (SEQ ID NO: 709) | 5980 | 6006 |
| HUMCACH1A_PEA_1_T6 (SEQ ID NO: 710) | 5980 | 6006 |
| HUMCACH1A_PEA_1_T8 (SEQ ID NO: 712) | 5920 | 5946 |
| HUMCACH1A_PEA_1_T12 (SEQ ID NO: 713) | 4313 | 4339 |
| HUMCACH1A_PEA_1_T17 (SEQ ID NO: 718) | 1570 | 1596 |
| HUMCACH1A_PEA_1_T18 (SEQ ID NO: 719) | 821 | 847 |
| HUMCACH1A_PEA_1_T19 (SEQ ID NO: 720) | 1942 | 1968 |

[2834] Segment cluster HUMCACH1A_PEA_{—}1_node_{—}117 (SEQ ID NO:787) according to the present invention is supported by 1 libraries. The number of libraries was determined as previously described. This segment can be found in the following transcript(s): HUMCACH1A_PEA_{—}1_T13 (SEQ ID NO:714). Table 106 below describes the starting and ending position of this segment on each transcript.

TABLE 106
Segment location on transcripts

| | | Seg- |
|---|---|---|
| | Segment | ment |
| | starting | ending |
| Transcript name | position | position |
| HUMCACH1A_PEA_1_T13 (SEQ ID NO: 714) | 6294 | 6365 |

[2835] Segment cluster HUMCACH1A_PEA_{—}1_node_{—}124 (SEQ ID NO:788) according to the present invention is supported by 18 libraries. The number of libraries was determined as previously described. This segment can be found in the following transcript(s): HUMCACH1A_PEA_{—}1_T0 (SEQ ID NO:705), HUMCACH1A_PEA_{—}1_T1 (SEQ ID NO:706), HUMCACH1A_PEA_{—}1_T2 (SEQ ID NO:707), HUMCACH1A_PEA_{—}1_T3 (SEQ ID NO:708), HUMCACH1A_PEA_{—}1_T4 (SEQ ID NO:709), HUMCACH1A_PEA_{—}1_T6 (SEQ ID NO:710), HUMCACH1A_PEA_{—}1_T7 (SEQ ID NO:711), HUMCACH1A_PEA_{—}1_T8 (SEQ ID NO:712), HUMCACH1A_PEA_{—}1_T12 (SEQ ID NO:713), HUMCACH1A_PEA_{—}1_T17 (SEQ ID NO:718), HUMCACH1A_PEA_{—}1_T18 (SEQ ID NO:719) and HUMCACH1A_PEA_{—}1_T19 (SEQ ID NO:720). Table 107 below describes the starting and ending position of this segment on each transcript.

TABLE 107
Segment location on transcripts

| | | Seg- |
|---|---|---|
| | Segment | ment |
| | starting | ending |
| Transcript name | position | position |
| HUMCACH1A_PEA_1_T0 (SEQ ID NO: 705) | 7551 | 7649 |
| HUMCACH1A_PEA_1_T1 (SEQ ID NO: 706) | 7128 | 7226 |
| HUMCACH1A_PEA_1_T2 (SEQ ID NO: 707) | 7551 | 7649 |
| HUMCACH1A_PEA_1_T3 (SEQ ID NO: 708) | 7551 | 7649 |
| HUMCACH1A_PEA_1_T4 (SEQ ID NO: 709) | 7551 | 7649 |
| HUMCACH1A_PEA_1_T6 (SEQ ID NO: 710) | 7730 | 7828 |
| HUMCACH1A_PEA_1_T7 (SEQ ID NO: 711) | 7524 | 7622 |
| HUMCACH1A_PEA_1_T8 (SEQ ID NO: 712) | 7491 | 7589 |
| HUMCACH1A_PEA_1_T12 (SEQ ID NO: 713) | 5884 | 5982 |
| HUMCACH1A_PEA_1_T17 (SEQ ID NO: 718) | 3141 | 3239 |
| HUMCACH1A_PEA_1_T18 (SEQ ID NO: 719) | 2392 | 2490 |
| HUMCACH1A_PEA_1_T19 (SEQ ID NO: 720) | 3513 | 3611 |

[2836] Segment cluster HUMCACH1A_PEA_{—}1_node_{—}126 (SEQ ID NO:789) according to the present invention is supported by 9 libraries. The number of libraries was determined as previously described. This segment can be found in the following transcript(s): HUMCACH1A_PEA_{—}1_T0 (SEQ ID NO:705), HUMCACH1A_PEA_{—}1_T1 (SEQ ID NO:706), HUMCACH1A_PEA_{—}1_T6 (SEQ ID NO:710), HUMCACH1A_PEA_{—}1_T7 (SEQ ID NO:711), HUMCACH1A_PEA_{—}1_T8 (SEQ ID NO:712), HUMCACH1A_PEA_{—}1_T12 (SEQ ID NO:713), HUMCACH1A_PEA_{—}1_T17 (SEQ ID NO:718), HUMCACH1A_PEA_{—}1_T18 (SEQ ID NO:719) and HUMCACH1A_PEA_{—}1_T19 (SEQ ID NO:720). Table 108 below describes the starting and ending position of this segment on each transcript.

TABLE 108
Segment location on transcripts

| | | Seg- |
|---|---|---|
| | Segment | ment |
| | starting | ending |
| Transcript name | position | position |
| HUMCACH1A_PEA_1_T0 (SEQ ID NO: 705) | 9311 | 9380 |
| HUMCACH1A_PEA_1_T1 (SEQ ID NO: 706) | 8888 | 8957 |
| HUMCACH1A_PEA_1_T6 (SEQ ID NO: 710) | 9490 | 9559 |
| HUMCACH1A_PEA_1_T7 (SEQ ID NO: 711) | 9284 | 9353 |
| HUMCACH1A_PEA_1_T8 (SEQ ID NO: 712) | 9251 | 9320 |
| HUMCACH1A_PEA_1_T12 (SEQ ID NO: 713) | 7644 | 7713 |
| HUMCACH1A_PEA_1_T17 (SEQ ID NO: 718) | 4901 | 4970 |
| HUMCACH1A_PEA_1_T18 (SEQ ID NO: 719) | 4152 | 4221 |
| HUMCACH1A_PEA_1_T19 (SEQ ID NO: 720) | 5273 | 5342 |

### Variant Protein Alignment to the Previously Known Protein:

Sequence name: CCAD_HUMAN_V3 (SEQ ID NO:791)
Sequence documentation:
Alignment of: HUMCACH1A_PEA_1_P7 (SEQ ID NO:796) × CCAD_HUMAN_V3 (SEQ ID
NO:791) ..
Alignment segment 1/1:

| | | | |
|---|---|---|---|
| Quality: | 16625.00 | Escore: | 0 |
| Matching length: | 1696 | Total length: | 1716 |
| Matching Percent Similarity: | 99.94 | Matching Percent Identity: | 99.94 |
| Total Percent Similarity: | 98.78 | Total Percent Identity: | 98.78 |
| Gaps: | 1 | | |
| Alignment: | | | |

[chemical structure]

[chemical structure]

[chemical structure]

[chemical structure]

[chemical structure]

[chemical structure]

[chemical structure]

[chemical structure]

[chemical structure]

[chemical structure]

[chemical structure]

[chemical structure]

[chemical structure]

[chemical structure]

[chemical structure]

[chemical structure]

[chemical structure]

[chemical structure]

[chemical structure]

[chemical structure]

[chemical structure]

[chemical structure]

[chemical structure]

[chemical structure]

[chemical structure]

[chemical structure]

[chemical structure]

[chemical structure]

[chemical structure]

[chemical structure]

[chemical structure]

[chemical structure]

[chemical structure]

[chemical structure]

[chemical structure]

Sequence name: CCAD_HUMAN (SEQ ID NO:790)
Sequence documentation:
Alignment of: HUMCACH1A_PEA_1_P13 (SEQ ID NO:802) × OCAD_HUMAN (SEQ ID
NO:790) ..
Alignment segment 1/1:

| | | | |
|---|---|---|---|
| Quality: | 5658.00 | Escore: | 0 |
| Matching length: | 564 | Total length: | 564 |
| Matching Percent Similarity: | 100.00 | Matching Percent Identity: | 100.00 |
| Total Percent Similarity: | 100.00 | Total Percent Identity: | 100.00 |
| Gaps: | 0 | | |
| Alignment: | | | |

[chemical structure]

[chemical structure]

[chemical structure]

[chemical structure]

[chemical structure]

[chemical structure]

[chemical structure]

[chemical structure]

[chemical structure]

[chemical structure]

[chemical structure]

[chemical structure]

Sequence name: CCAD_HUMAN (SEQ ID NO:790)
Sequence documentation:
Alignment of: HUMCACH1A_PEA_1_{— P14 (SEQ ID NO:803) × CCAD}_HUMAN (SEQ ID
NO:790) ..
Alignment segment 1/1:

| | | | |
|---|---|---|---|
| Quality: | 4021.00 | Escore: | 0 |
| Matching length: | 399 | Total length: | 399 |
| Matching Percent Similarity: | 100.00 | Matching Percent Identity: | 100.00 |
| Total Percent Similarity: | 100.00 | Total Percent Identity: | 100.00 |
| Gaps: | 0 | | |
| Alignment: | | | |

[chemical structure]

[chemical structure]

[chemical structure]

[chemical structure]

[chemical structure]

[chemical structure]

[chemical structure]

[chemical structure]

Sequence name: CCAD_HUMAN (SEQ ID NO:790)
Sequence documentation:
Alignment of: HUMCACH1A_PEA_1_P17 (SEQ ID NO:805) × CCAD_HUMAN (SEQ ID
NO:790) ..
Alignment segment 1/1:

| | | | |
|---|---|---|---|
| Quality: | 3976.00 | Escore: | 0 |
| Matching length: | 407 | Total length: | 407 |
| Matching Percent Similarity: | 100.00 | Matching Percent Identity: | 100.00 |
| Total Percent Similarity: | 100.00 | Total Percent Identity: | 100.00 |
| Gaps: | 0 | | |
| Alignment: | | | |

[chemical structure]

[chemical structure]

[chemical structure]

[chemical structure]

[chemical structure]

[chemical structure]

[chemical structure]

[chemical structure]

[chemical structure]

[2838] Expression of Voltage-Dependent L-Type Calcium Channel Alpha-1D Subunit Calcium Channel, L Type, Alpha-1 Polypeptide, Isoform 2 Transcripts which are Detectable by Seg 113, 35, 109, 125, in Normal, and Cancerous Colon Tissues

[2839] Expression of Voltage-dependent L-type calcium channel alpha-1D subunit Calcium channel, L type, alpha-1 polypeptide, isoform 2 transcripts detectable by or according to segments 113, 35, 109, 125 was measured with oligonucleotide-based micro-arrays. The results of image intensities for each feature were normalized according to the ninetieth percentile of the image intensities of all the features on the chip. Then, feature image intensities for replicates of the same oligonucleotide on the chip and replicates of the same sample were averaged. Outlying results were discarded.

[2840] For every oligonucleotide HUMCACH1A_{—}0_{—}3_{—}14917, HUMCACH1A_{—}0_{—}0_{—}14922, HUMCACH1A_{—}0_{—}0_{—}14924 and HUMCACH1A_{—}0_{—}0_{—}14913 (SEQ ID NOs: 1331, 1332, 1333 and 1334, respectively) the averaged intensity determined for every sample was divided by the averaged intensity of all the normal samples (Sample Nos. 62-66 and 69, Table 1, above, “Tissue samples in testing panel”), to obtain a value of fold up-regulation for each sample relative to the averaged normal samples. These data are presented in a histogram bellow (FIG. 47). As is evident from the histogram, the expression of Voltage-dependent L-type calcium channel alpha-1D subunit Calcium channel, L type, alpha-1 polypeptide, isoform 2 transcripts detectable with the above oligonucleotides in cancer samples was higher than in the normal samples.

HUMCACH1A_0_3_14917-

(SEQ ID NO: 1331)

AGAGAATATCACTCCGATGGTCGGTTTCTGACTGTCACGCTAAGGGCAAC
HUMCACH1A_0_0_14922-

(SEQ ID NO: 1332)

GAACACAGAGAACGTCAGCGGTGAAGGCGAGAACCGAGGCTGCTGTGGAA
HUMCACH1A_0_0_14924-

(SEQ ID NO: 1333)

GGCCCAGCATTGGGAACCTTGAGCATGTGTCTGAAAATGGGCATCATTCT
HUMCACH1A_0_0_14913-

(SEQ ID NO: 1334)

GACTCAGGAGATGAACAGCTCCCAACTATTTGCCGGGAAGACCCAGAGAT

[2841] Expression of Voltage-Dependent L-Type Calcium Channel Alpha-1D Subunit Calcium Channel, L Type, Alpha-1 Polypeptide, Isoform 2

[2842] HUMCACH1A Transcripts which are Detectable by Amplicon as Depicted in Sequence Name HUMCACH1Aseg101 (SEQ ID NO: 1337) in Normal and Cancerous Colon Tissues

[2843] Expression of Voltage-dependent L-type calcium channel alpha-1D subunit Calcium channel, L type, alpha-1 polypeptide, isoform 2 transcripts detectable by or according to seg101, HUMCACH1A seg101 amplicon (SEQ ID NO: 1337) and HUMCACH1Aseg101F (SEQ ID NO: 1335), HUMCACH1A seg101R (SEQ ID NO: 1336) primers was measured by real time PCR. In parallel the expression of four housekeeping genes —PBGD (GenBank Accession No. BC019323 (SEQ ID NO:1576); amplicon—PBGD-amplicon, SEQ ID NO:531), HPRT1 (GenBank Accession No. NM_{—}000194 (SEQ ID NO:1577); amplicon—HPRT1-amplicon, SEQ ID NO:612), G6PD (GenBank Accession No. NM_{—}000402 (SEQ ID NO:1578); G6PD amplicon, SEQ ID NO:615), RPS27A (GenBank Accession No. NM_{—}002954 (SEQ ID NO:1579); RPS27A amplicon, SEQ ID NO:1261), was measured similarly. For each RT sample, the expression of the above amplicon was normalized to the geometric mean of the quantities of the housekeeping genes. The normalized quantity of each RT sample was then divided by the median of the quantities of the normal post-mortem (PM) samples (Sample Nos. 41, 52, 62-67, 69-71, Table 1, above, “Tissue samples in testing panel”), to obtain a value of fold up-regulation for each sample relative to median of the normal PM samples.

[2844] FIG. 48 is a histogram showing over expression of the above-indicated Voltage-dependent L-type calcium channel alpha-1D subunit Calcium channel, L type, alpha-1 polypeptide, isoform 2 transcripts in cancerous colon samples relative to the normal samples. The number and percentage of samples that exhibit at least 3 fold over-expression, out of the total number of samples tested is indicated in the bottom.

[2845] As is evident from FIG. 48, the expression of Voltage-dependent L-type calcium channel alpha-1D subunit Calcium channel, L type, alpha-1 polypeptide, isoform 2 transcripts detectable by the above amplicon in cancer samples was significantly higher than in the non-cancerous samples (Sample Nos. 41, 52, 62-67, 69-71, Table 1, “Tissue samples in testing panel”). Notably an over-expression of at least 3 fold was found in II out of 37 adenocarcinoma samples,

[2846] Statistical analysis was applied to verify the significance of these results, as described below.

[2847] The P value for the difference in the expression levels of Voltage-dependent L-type calcium channel alpha-1D subunit Calcium channel, L type, alpha-1 polypeptide, isoform 2 transcripts detectable by the above amplicon in colon cancer samples versus the normal tissue samples was determined by T test as 1.02E-03.

[2848] Threshold of 3 fold overexpression was found to differentiate between cancer and normal samples with P value of 3.78E-02 as checked by exact fisher test. The above values demonstrate statistical significance of the results.

[2849] Primer pairs are also optionally and preferably encompassed within the present invention; for example, for the above experiment, the following primer pair was used as a non-limiting illustrative example only of a suitable primer pair: HUMCACH1Aseg101F forward primer (SEQ ID NO: 1335); and HUMCACH1A seg101R reverse primer (SEQ ID NO: 1336).

[2850] The present invention also preferably encompasses any amplicon obtained through the use of any suitable primer pair; for example, for the above experiment, the following amplicon was obtained as a non-limiting illustrative example only of a suitable amplicon: HUMCACH1A seg101 (SEQ ID NO: 1337).

Forward primer (SEQ ID NO: 1335):
CAGCAGGAAATTCGGTGTGTC
Reverse primer (SEQ ID NO: 1336):
TCAAGGTTCCCAATGCTGG
Amplicon (SEQ ID NO: 1337):
CAGCAGGAAATTCGGTGTGTCATAACCATCATAACCATAATTCCATAGGA
AAGCAAGTTCCCACCTCAACAAATGCCAATCTCAATAATGCCAATATGTC
CAAAGCTGCCCATGGAAAGCGGCCCAGCATTGGGAACCTTGA

### Description for Cluster HUMCEA

[2851] Cluster HUMCEA features 10 transcript(s) and 47 segment(s) of interest, the names for which are given in Tables 1 and 2, respectively, the sequences themselves are given at the end of the application. The selected protein variants are given in table 3.

TABLE 1
Transcripts of interest

| Transcripts Name | SEQ ID NO: |
|---|---|
| HUMCEA_PEA_1_T8 | 806 |
| HUMCEA_PEA_1_T9 | 807 |
| HUMCEA_PEA_1_T12 | 808 |
| HUMCEA_PEA_1_T14 | 809 |
| HUMCEA_PEA_1_T16 | 810 |
| HUMCEA_PEA_1_T20 | 811 |
| HUMCEA_PEA_1_T25 | 812 |
| HUMCEA_PEA_1_T26 | 813 |
| HUMCEA_PEA_1_T29 | 814 |
| HUMCEA_PEA_1_T30 | 815 |

TABLE 2
Segments of interest

| Segment Name | SEQ ID NO: |
|---|---|
| HUMCEA_PEA_1_node_0 | 816 |
| HUMCEA_PEA_1_node_2 | 817 |
| HUMCEA_PEA_1_node_6 | 818 |
| HUMCEA_PEA_1_node_11 | 819 |
| HUMCEA_PEA_1_node_12 | 820 |
| HUMCEA_PEA_1_node_31 | 821 |
| HUMCEA_PEA_1_node_36 | 822 |
| HUMCEA_PEA_1_node_42 | 823 |
| HUMCEA_PEA_1_node_43 | 824 |
| HUMCEA_PEA_1_node_44 | 825 |
| HUMCEA_PEA_1_node_46 | 826 |
| HUMCEA_PEA_1_node_48 | 827 |
| HUMCEA_PEA_1_node_63 | 828 |
| HUMCEA_PEA_1_node_65 | 829 |
| HUMCEA_PEA_1_node_67 | 830 |
| HUMCEA_PEA_1_node_3 | 831 |
| HUMCEA_PEA_1_node_7 | 832 |
| HUMCEA_PEA_1_node_8 | 833 |
| HUMCEA_PEA_1_node_9 | 834 |
| HUMCEA_PEA_1_node_10 | 835 |
| HUMCEA_PEA_1_node_15 | 836 |
| HUMCEA_PEA_1_node_16 | 837 |
| HUMCEA_PEA_1_node_17 | 838 |
| HUMCEA_PEA_1_node_18 | 839 |
| HUMCEA_PEA_1_node_19 | 840 |
| HUMCEA_PEA_1_node_20 | 841 |
| HUMCEA_PEA_1_node_21 | 842 |
| HUMCEA_PEA_1_node_22 | 843 |
| HUMCEA_PEA_1_node_23 | 844 |
| HUMCEA_PEA_1_node_24 | 845 |
| HUMCEA_PEA_1_node_27 | 846 |
| HUMCEA_PEA_1_node_29 | 847 |
| HUMCEA_PEA_1_node_30 | 848 |
| HUMCEA_PEA_1_node_33 | 849 |
| HUMCEA_PEA_1_node_34 | 850 |
| HUMCEA_PEA_1_node_35 | 851 |
| HUMCEA_PEA_1_node_45 | 852 |
| HUMCEA_PEA_1_node_49 | 853 |
| HUMCEA_PEA_1_node_50 | 854 |
| HUMCEA_PEA_1_node_51 | 855 |
| HUMCEA_PEA_1_node_56 | 856 |
| HUMCEA_PEA_1_node_57 | 857 |
| HUMCEA_PEA_1_node_58 | 858 |
| HUMCEA_PEA_1_node_60 | 859 |
| HUMCEA_PEA_1_node_61 | 860 |
| HUMCEA_PEA_1_node_62 | 861 |
| HUMCEA_PEA_1_node_64 | 862 |

TABLE 3
Proteins of interest

| Protein Name | SEQ ID NO: | Corresponding Transcript(s) |
|---|---|---|
| HUMCEA_PEA_1_P4 | 864 | HUMCEA_PEA_1_T8 |
| | | (SEQ ID NO: 806) |
| HUMCEA_PEA_1_P5 | 865 | HUMCEA_PEA_1_T9 |
| | | (SEQ ID NO: 807) |
| HUMCEA_PEA_1_P7 | 866 | HUMCEA_PEA_1_T12 |
| | | (SEQ ID NO: 808) |
| HUMCEA_PEA_1_P10 | 867 | HUMCEA_PEA_1_T16 |
| | | (SEQ ID NO: 810) |
| HUMCEA_PEA_1_P14 | 868 | HUMCEA_PEA_1_T20 |
| | | (SEQ ID NO: 811) |
| HUMCEA_PEA_1_P19 | 869 | HUMCEA_PEA_1_T25 |
| | | (SEQ ID NO: 812) |
| HUMCEA_PEA_1_P20 | 870 | HUMCEA_PEA_1_T26 |
| | | (SEQ ID NO: 813) |

[2852] These sequences are variants of the known protein Carcinoembryonic antigen-related cell adhesion molecule 5 precursor (SwissProt accession identifier CEA5_HUMAN; known also according to the synonyms Carcinoembryonic antigen; CEA; Meconium antigen 100; CD66e antigen), SEQ ID NO: 863, referred to herein as the previously known protein.

[2853] The sequence for protein Carcinoembryonic antigen-related cell adhesion molecule 5 precursor (SEQ ID NO:863) is given at the end of the application, as “Carcinoembryonic antigen-related cell adhesion molecule 5 precursor amino acid sequence”. Known polymorphisms for this sequence are as shown in Table 4.

TABLE 4
Amino acid mutations for Known Protein

| SNP position(s) on amino | |
|---|---|
| acid sequence | Comment |
| 320 | Missing |

[2854] Protein Carcinoembryonic antigen-related cell adhesion molecule 5 precursor (SEQ ID NO:863) localization is believed to be Attached to the membrane by a GPI-anchor.

[2855] The previously known protein also has the following indication(s) and/or potential therapeutic use(s): Cancer. It has been investigated for clinical/therapeutic use in humans, for example as a target for an antibody or small molecule, and/or as a direct therapeutic; available information related to these investigations is as follows. Potential pharmaceutically related or therapeutically related activity or activities of the previously known protein are as follows: Immunostimulant. A therapeutic role for a protein represented by the cluster has been predicted. The cluster was assigned this field because there was information in the drug database or the public databases (e.g., described herein above) that this protein, or part thereof, is used or can be used for a potential therapeutic indication: Imaging agent; Anticancer; Immunostimulant; Immunoconjugate; Monoclonal antibody, murine; Antisense therapy; antibody.

[2856] The following GO Annotation(s) apply to the previously known protein. The following annotation(s) were found: integral plasma membrane protein; membrane, which are annotation(s) related to Cellular Component.

[2857] The GO assignment relies on information from one or more of the SwissProt/TremB1 Protein knowledgebase, available from <http://www.expasy.ch/sprot/>; or Locuslink, available from <http://www.ncbi.nim.nih.gov/projects/LocusLink/>.

[2858] Cluster HUMCEA can be used as a diagnostic marker according to overexpression of transcripts of this cluster in cancer. Expression of such transcripts in normal tissues is also given according to the previously described methods. The term “number” in the left hand column of the table and the numbers on the y-axis of the figure below refer to weighted expression of ESTs in each category, as “parts per million” (ratio of the expression of ESTs for a particular cluster to the expression of all ESTs in that category, according to parts per million).

[2859] Overall, the following results were obtained as shown with regard to the histograms in FIG. 49 and Table 5. This cluster is overexpressed (at least at a minimum level) in the following pathological conditions: epithelial malignant tumors, a mixture of malignant tumors from different tissues and pancreas carcinoma.

TABLE 5
Normal tissue distribution

| Name of Tissue | Number |
|---|---|
| colon | 1175 |
| epithelial | 92 |
| general | 29 |
| head and neck | 81 |
| kidney | 0 |
| lung | 0 |
| lymph nodes | 0 |
| breast | 0 |
| pancreas | 0 |
| prostate | 0 |
| stomach | 256 |

TABLE 6
P values and ratios for expression in cancerous tissue

| Name of Tissue | P1 | P2 | SP1 | R3 | SP2 | R4 |
|---|---|---|---|---|---|---|
| colon | 2.0e−01 | 2.7e−01 | 9.8e−01 | 0.5 | 1 | 0.5 |
| epithelial | 2.1e−03 | 2.7e−02 | 6.4e−04 | 1.4 | 2.1e−01 | 1.0 |
| general | 3.9e−08 | 8.2e−06 | 9.2e−18 | 3.2 | 1.3e−10 | 2.2 |
| head and neck | 3.4e−01 | 5.0e−01 | 2.1e−01 | 1.8 | 5.6e−01 | 0.9 |
| kidney | 4.3e−01 | 5.3e−01 | 5.8e−01 | 2.1 | 7.0e−01 | 1.6 |
| lung | 1.3e−01 | 2.6e−01 | 1 | 1.1 | 1 | 1.1 |
| lymph nodes | 3.1e−01 | 5.7e−01 | 8.1e−02 | 6.0 | 3.3e−01 | 2.5 |
| breast | 3.8e−01 | 1.5e−01 | 1 | 1.0 | 6.8e−01 | 1.5 |
| pancreas | 2.2e−02 | 2.3e−02 | 1.4e−08 | 7.8 | 7.4e−07 | 6.4 |
| prostate | 5.3e−01 | 6.0e−01 | 3.0e−01 | 2.5 | 4.2e−01 | 2.0 |
| stomach | 1.5e−01 | 4.7e−01 | 8.9e−01 | 0.6 | 7.2e−01 | 0.4 |

[2860] For this cluster, at least one oligonucleotide was found to demonstrate overexpression of the cluster, although not of at least one transcript/segment as listed below. Microarray (chip) data is also available for this cluster as follows. Various oligonucleotides were tested for being differentially expressed in various disease conditions, particularly cancer, as previously described. The following oligonucleotides were found to hit this cluster but not other segments/transcripts below, shown in Table 7.

TABLE 7
Oligonucleotides related to this cluster

| Oligonucleotide name | Overexpressed in cancers | Chip reference |
|---|---|---|
| HUMCEA_0_0_15168 | lung malignant tumors | LUN |

[2861] As noted above, cluster HUMCEA features 10 transcript(s), which were listed in Table 1 above. These transcript(s) encode for protein(s) which are variant(s) of protein Carcinoembryonic antigen-related cell adhesion molecule 5 precursor (SEQ ID NO:863). A description of each variant protein according to the present invention is now provided.

[2862] Variant protein HUMCEA_PEA_{—}1_P4 (SEQ ID NO:864) according to the present invention has an amino acid sequence as given at the end of the application; it is encoded by transcript(s) HUMCEA_PEA_{—}1_T8 (SEQ ID NO:806). An alignment is given to the known protein (Carcinoembryonic antigen-related cell adhesion molecule 5 precursor (SEQ ID NO:863)) at the end of the application. One or more alignments to one or more previously published protein sequences are given at the end of the application. A brief description of the relationship of the variant protein according to the present invention to each such aligned protein is as follows:

[2863] Comparison Report Between HUMCEA_PEA_{—}1_P4 (SEQ ID NO:864) and CEA5_HUMAN (SEQ ID NO:863):

[2864] 1. An isolated chimeric polypeptide encoding for HUMCEA_PEA_{—}1_P4 (SEQ ID NO:864), comprising a first amino acid sequence being at least 90% homologous to MESPSAPPHRWCIPWQRLLLTASLLTFWNPPTTAKLTIESTPFNVAEGKEVLLLVHNLPQHLFGYSWYKGE RVDGNRQIIGYVIGTQQATPGPAYSGREIIYPNASLLIQNIIQNDTGFYTLHVIKSDLVNEEATGQFRVYPEL PKPSISSNNSKPVEDKDAVAFTCEPETQDATYLWWVNNQSLPVSPRLQLSNGNRTLTLFNVTRNDTASYK CETQNPVSARRSDSVILNVL corresponding to amino acids 1-234 of CEA5_HUMAN (SEQ ID NO:863), which also corresponds to amino acids 1-234 of HUMCEA_PEA_{—}1_P4 (SEQ ID NO:864), and a second amino acid sequence being at least 70%, optionally at least 80%, preferably at least 85%, more preferably at least 90% and most preferably at least 95% homologous to a polypeptide having the sequence CEYICSSLAQAASPNPQGQRQDFSVPLRFKYTDPQPWTSRLSVTFCPRKTWADQVLTKNRRGGAASVLGG SGSTPYDGRNR (SEQ ID NO:1475) corresponding to amino acids 235-315 of HUMCEA_PEA_{—}1_P4 (SEQ ID NO:864), wherein said first amino acid sequence and second amino acid sequence are contiguous and in a sequential order.

[2865] 2. An isolated polypeptide encoding for a tail of HUMCEA_PEA_{—}1_P4 (SEQ ID NO:864), comprising a polypeptide being at least 70%, optionally at least about 80%, preferably at least about 85%, more preferably at least about 90% and most preferably at least about 95% homologous to the sequence CEYICSSLAQAASPNPQGQRQDFSVPLRFKYTDPQPWTSRLSVTFCPRKTWADQVLTKNRRGGAASVLGG SGSTPYDGRNR (SEQ ID NO:1475) in HUMCEA_PEA_{—}1_P4 (SEQ ID NO:864).

[2866] The location of the variant protein was determined according to results from a number of different software programs and analyses, including analyses from SignalP and other specialized programs. The variant protein is believed to be located as follows with regard to the cell: secreted. The protein localization is believed to be secreted because both signal-peptide prediction programs predict that this protein has a signal peptide, and neither trans-membrane region prediction program predicts that this protein has a trans-membrane region.

[2867] Variant protein HUMCEA_PEA_{—}1_P4 (SEQ ID NO:864) also has the following non-silent SNPs (Single Nucleotide Polymorphisms) as listed in Table 8, (given according to their position(s) on the amino acid sequence, with the alternative amino acid(s) listed; the last column indicates whether the SNP is known or not; the presence of known SNPs in variant protein HUMCEA_PEA_{—}1_P4 (SEQ ID NO:864) sequence provides support for the deduced sequence of this variant protein according to the present invention).

TABLE 8
Amino acid mutations

| SNP position(s) on | Alternative | Previously |
|---|---|---|
| amino acid sequence | amino acid(s) | known SNP? |
| 63 | F -> L | No |
| 80 | I -> V | Yes |
| 83 | V -> A | Yes |
| 137 | Q -> P | Yes |
| 173 | D -> N | No |

[2868] The glycosylation sites of variant protein HUMCEA_PEA_{—}1_P4 (SEQ ID NO:864), as compared to the known protein Carcinoembryonic antigen-related cell adhesion molecule 5 precursor (SEQ ID NO:863), are described in Table 9 (given according to their position(s) on the amino acid sequence in the first column; the second column indicates whether the glycosylation site is present in the variant protein; and the last column indicates whether the position is different on the variant protein).

TABLE 9
Glycosylation site(s)

| Position(s) on | | |
|---|---|---|
| known amino acid | Present in | Position in |
| sequence | variant protein? | variant protein? |
| 197 | yes | 197 |
| 466 | no | |
| 360 | no | |
| 288 | no | |
| 665 | no | |
| 560 | no | |
| 650 | no | |
| 480 | no | |
| 104 | yes | 104 |
| 580 | no | |
| 204 | yes | 204 |
| 115 | yes | 115 |
| 208 | yes | 208 |
| 152 | yes | 152 |
| 309 | no | |
| 432 | no | |
| 351 | no | |
| 246 | no | |
| 182 | yes | 182 |
| 612 | no | |
| 256 | no | |
| 508 | no | |
| 330 | no | |
| 274 | no | |
| 292 | no | |
| 553 | no | |
| 529 | no | |
| 375 | no | |

[2869] Variant protein HUMCEA_PEA_{—}1_P4 (SEQ ID NO:864) is encoded by the following transcript(s): HUMCEA_PEA_{—}1_T8 (SEQ ID NO:806), for which the sequence(s) is/are given at the end of the application. The coding portion of transcript HUMCEA_PEA_{—}1_T8 (SEQ ID NO:806) is shown in bold; this coding portion starts at position 115 and ends at position 1059. The transcript also has the following SNPs as listed in Table 10 (given according to their position on the nucleotide sequence, with the alternative nucleic acid listed; the last column indicates whether the SNP is known or not; the presence of known SNPs in variant protein HUMCEA_PEA_{—}1_P4 (SEQ ID NO:864) sequence provides support for the deduced sequence of this variant protein according to the present invention).

TABLE 10
Nucleic acid SNPs

| SNP position | | |
|---|---|---|
| on nucleotide | Alternative | Previously |
| sequence | nucleic acid | known SNP? |
| 49 | T -> | No |
| 273 | A -> C | Yes |
| 303 | T -> G | No |
| 324 | T -> C | Yes |
| 352 | A -> G | Yes |
| 362 | T -> C | Yes |
| 524 | A -> C | Yes |
| 631 | G -> A | No |
| 1315 | A -> G | No |
| 1380 | T -> C | No |
| 1533 | C -> A | Yes |
| 1706 | G -> A | Yes |
| 2308 | T -> C | No |
| 2362 | C -> T | No |
| 2455 | A -> | No |
| 2504 | C -> A | Yes |
| 2558 | G -> | No |
| 2623 | G -> | No |
| 2639 | T -> A | No |
| 2640 | T -> A | No |
| 2832 | G -> A | Yes |
| 2885 | C -> T | No |
| 3396 | A -> G | Yes |
| 3562 | C -> T | Yes |
| 3753 | C -> T | Yes |

[2870] Variant protein HUMCEA_PEA_{—}1_P5 (SEQ ID NO:865) according to the present invention has an amino acid sequence as given at the end of the application; it is encoded by transcript(s) HUMCEA_PEA_{—}1_T9 (SEQ ID NO:807). An alignment is given to the known protein (Carcinoembryonic antigen-related cell adhesion molecule 5 precursor (SEQ ID NO:863)) at the end of the application. One or more alignments to one or more previously published protein sequences are given at the end of the application. A brief description of the relationship of the variant protein according to the present invention to each such aligned protein is as follows:

[2871] Comparison Report Between HUMCEA_PEA_{—}1_P5 (SEQ ID NO:865) and CEA5_HUMAN (SEQ ID NO:863):

[2872] 1. An isolated chimeric polypeptide encoding for HUMCEA_PEA_{—}1_P5 (SEQ ID NO:865), comprising a first amino acid sequence being at least 90% homologous to MESPSAPPHRWCIPWQRLLLTASLLTFWNPPTTAKLTIESTPFNVAEGKEVLLLVHNLPQHLFGYSWYKGE RVDGNRQIIGYVIGTQQATPGPAYSGREIIYPNASLLIQNIIQNDTGFYTLHVIKSDLVNEEATGQFRVYPEL PKPSISSNNSKPVEDKDAVAFTCEPETQDATYLWWVNNQSLPVSPRLQLSNGNRTLTLFNVTRNDTASYK CETQNPVSARRSDSVILNVLYGPDAPTISPLNTSYRSGENLNLSCHAASNPPAQYSWFVNGTFQQSTQELFI PNITVNNSGSYTCQAHNSDTGLNRTTVTTITVYAEPPKPFITSNNSNPVEDEDAVALTCEPEIQNTTYLWW VNNQSLPVSPRLQLSNDNRTLTLLSVTRNDVGPYECGIQNELSVDHSDPVILNVLYGPDDPTISPSYTYYRP GVNLSLSCHAASNPPAQYSWLIDGNIQQHTQELFISNITEKNSGLYTCQANNSASGHSRTTVKTITVSAELP KPSISSNNSKPVEDKDAVAFTCEPEAQNTTYLWWVNGQSLPVSPRLQLSNGNRTLTLFNVTRNDARAYVC GIQNSVSANRSDPVTLDVLYGPDTPIISPPDSSYLSGANLNLSCHSASNPSPQYSWRINGIPQQHTQVLFIAKI TPNNNGTYACFVSNLATGRNNSIVKSITVS corresponding to amino acids 1-675 of CEA5_HUMAN (SEQ ID NO:863), which also corresponds to amino acids 1-675 of HUMCEA_PEA_{—}1_P5 (SEQ ID NO:865), and a second amino acid sequence being at least 70%, optionally at least 80%, preferably at least 85%, more preferably at least 90% and most preferably at least 95% homologous to a polypeptide having the sequence GKWLPGASASYSGVESIWFSPKSQEDIFFPSLCSMGTRKSQILS (SEQ ID NO:1476) corresponding to amino acids 676-719 of HUMCEA_PEA_{—}1_P5 (SEQ ID NO:865), wherein said first amino acid sequence and second amino acid sequence are contiguous and in a sequential order.

[2873] 2. An isolated polypeptide encoding for a tail of HUMCEA_PEA_{—}1_P5 (SEQ ID NO:865), comprising a polypeptide being at least 70%, optionally at least about 80%, preferably at least about 85%, more preferably at least about 90% and most preferably at least about 95% homologous to the sequence GKWLPGASASYSGVESIWFSPKSQEDIFFPSLCSMGTRKSQILS (SEQ ID NO:1476) in HUMCEA_PEA_{—}1_P5 (SEQ ID NO:865).

[2874] The location of the variant protein was determined according to results from a number of different software programs and analyses, including analyses from SignalP and other specialized programs. The variant protein is believed to be located as follows with regard to the cell: secreted. The protein localization is believed to be secreted because both signal-peptide prediction programs predict that this protein has a signal peptide, and neither trans-membrane region prediction program predicts that this protein has a trans-membrane region.

[2875] Variant protein HUMCEA_PEA_{—}1_P5 (SEQ ID NO:865) also has the following non-silent SNPs (Single Nucleotide Polymorphisms) as listed in Table 11, (given according to their position(s) on the amino acid sequence, with the alternative amino acid(s) listed; the last column indicates whether the SNP is known or not; the presence of known SNPs in variant protein HUMCEA_PEA_{—}1_P5 (SEQ ID NO:865) sequence provides support for the deduced sequence of this variant protein according to the present invention).

TABLE 11
Amino acid mutations

| SNP position(s) | | |
|---|---|---|
| on amino acid | Alternative | Previously |
| sequence | amino acid(s) | known SNP? |
| 63 | F -> L | No |
| 80 | I -> V | Yes |
| 83 | V -> A | Yes |
| 137 | Q -> P | Yes |
| 173 | D -> N | No |
| 289 | I -> T | No |
| 340 | A -> D | Yes |
| 398 | E -> K | Yes |
| 647 | P -> | No |
| 664 | R -> S | Yes |

[2876] The glycosylation sites of variant protein HUMCEA_PEA_{—}1_P5 (SEQ ID NO:865), as compared to the known protein Carcinoembryonic antigen-related cell adhesion molecule 5 precursor (SEQ ID NO:863), are described in Table 12 (given according to their position(s) on the amino acid sequence in the first column; the second column indicates whether the glycosylation site is present in the variant protein; and the last column indicates whether the position is different on the variant protein).

TABLE 12
Glycosylation site(s)

| Position(s) on | | |
|---|---|---|
| known amino acid | Present in | Position in |
| sequence | variant protein? | variant protein? |
| 197 | yes | 197 |
| 466 | yes | 466 |
| 360 | yes | 360 |
| 288 | yes | 288 |
| 665 | yes | 665 |
| 560 | yes | 560 |
| 650 | yes | 650 |
| 480 | yes | 480 |
| 104 | yes | 104 |
| 580 | yes | 580 |
| 204 | yes | 204 |
| 115 | yes | 115 |
| 208 | yes | 208 |
| 152 | yes | 152 |
| 309 | yes | 309 |
| 432 | yes | 432 |
| 351 | yes | 351 |
| 246 | yes | 246 |
| 182 | yes | 182 |
| 612 | yes | 612 |
| 256 | yes | 256 |
| 508 | yes | 508 |
| 330 | yes | 330 |
| 274 | yes | 274 |
| 292 | yes | 292 |
| 553 | yes | 553 |
| 529 | yes | 529 |
| 375 | yes | 375 |

[2877] Variant protein HUMCEA_PEA_{—}1_P5 (SEQ ID NO:865) is encoded by the following transcript(s): HUMCEA_PEA_{—}1_T9 (SEQ ID NO:807), for which the sequence(s) is/are given at the end of the application. The coding portion of transcript HUMCEA_PEA_{—}1_T9 (SEQ ID NO:807) is shown in bold; this coding portion starts at position 115 and ends at position 2271. The transcript also has the following SNPs as listed in Table 13 (given according to their position on the nucleotide sequence, with the alternative nucleic acid listed; the last column indicates whether the SNP is known or not; the presence of known SNPs in variant protein HUMCEA_PEA_{—}1_P5 (SEQ ID NO:865) sequence provides support for the deduced sequence of this variant protein according to the present invention).

TABLE 13
Nucleic acid SNPs

| SNP position | | |
|---|---|---|
| on nucleotide | Alternative | Previously |
| sequence | nucleic acid | known SNP? |
| 49 | T -> | No |
| 273 | A -> C | Yes |
| 303 | T -> G | No |
| 324 | T -> C | Yes |
| 352 | A -> G | Yes |
| 362 | T -> C | Yes |
| 524 | A -> C | Yes |
| 631 | G -> A | No |
| 915 | A -> G | No |
| 980 | T -> C | No |
| 1133 | C -> A | Yes |
| 1306 | G -> A | Yes |
| 1908 | T -> C | No |
| 1962 | C -> T | No |
| 2055 | A -> | No |
| 2104 | C -> A | Yes |
| 3259 | T -> C | Yes |

[2878] Variant protein HUMCEA_PEA_{—}1_P7 (SEQ ID NO:866) according to the present invention has an amino acid sequence as given at the end of the application; it is encoded by transcript(s) HUMCEA_PEA_{—}1_T12 (SEQ ID NO:808). An alignment is given to the known protein (Carcinoembryonic antigen-related cell adhesion molecule 5 precursor (SEQ ID NO:863)) at the end of the application. One or more alignments to one or more previously published protein sequences are given at the end of the application. A brief description of the relationship of the variant protein according to the present invention to each such aligned protein is as follows:

[2879] Comparison Report Between HUMCEA_PEA_{—}1_P7 (SEQ ID NO:866) and CEA5_HUMAN (SEQ ID NO:863):

[2880] 1. An isolated chimeric polypeptide encoding for HUMCEA_PEA_{—}1_P7 (SEQ ID NO:866), comprising a first amino acid sequence being at least 90% homologous to MESPSAPPHRWCIPWQRLLLTASLLTFWNPPTTAKLTIESTPFNVAEGKEVLLLVHNLPQHLFGYSWYKGE RVDGNRQIIGYVIGTQQATPGPAYSGREIIYPNASLLIQNIIQNDTGFYTLHVIKSDLVNEEATGQFRVYPEL PKPSISSNNSKPVEDKDAVAFTCEPETQDATYLWWVNNQSLPVSPRLQLSNGNRTLTLFNVTRNDTASYK CETQNPVSARRSDSVILNVLYGPDAPTISPLNTSYRSGENLNLSCHAASNPPAQYSWFVNGTFQQSTQELFI PNITVNNSGSYTCQAHNSDTGLNRTTVTTITVYAEPPKPFITSNNSNPVEDEDAVALTCEPEIQNTTYLWW VNNQSLPVSPRLQLSNDNRTLTLLSVTRNDVGPYECGIQNELSVDHSDPVILNVLYGPDDPTISPSYTYYRP GVNLSLSCHAASNPPAQYSWLIDGNIQQHTQELFISNITEKNSGLYTCQANNSASGHSRTTVKTITVSAELP KPSISSNNSKPVEDKDAVAFTCEPEAQNTTYLWWVNGQSLPVSPRLQLSNGNRTLTLFNVTRNDARAYVC GIQNSVSANRSDPVTLDVLYGPDTPIISPPDSSYLSGANLNLSCHSASNPSPQYSWRINGIPQQHTQVLFIAKI TPNNNGTYACFVSNLATGRNNSIVKSITV corresponding to amino acids 1-674 of CEA5_HUMAN (SEQ ID NO:863), which also corresponds to amino acids 1-674 of HUMCEA_PEA_{—}1_P7 (SEQ ID NO:866), and a second amino acid sequence being at least 90% homologous to SAGATVGIMIGVLVGVALI corresponding to amino acids 684-702 of CEA5_HUMAN (SEQ ID NO:863), which also corresponds to amino acids 675-693 of HUMCEA_PEA_{—}1_P7 (SEQ ID NO:866), wherein said first amino acid sequence and second amino acid sequence are contiguous and in a sequential order.

[2881] 2. An isolated chimeric polypeptide encoding for an edge portion of HUMCEA_PEA_{—}1_P7 (SEQ ID NO:866), comprising a polypeptide having a length “n”, wherein n is at least about 10 amino acids in length, optionally at least about 20 amino acids in length, preferably at least about 30 amino acids in length, more preferably at least about 40 amino acids in length and most preferably at least about 50 amino acids in length, wherein at least two amino acids comprise VS, having a structure as follows: a sequence starting from any of amino acid numbers 674−x to 674; and ending at any of amino acid numbers 675+((n−2)−x), in which x varies from 0 to n−2.

[2882] The location of the variant protein was determined according to results from a number of different software programs and analyses, including analyses from SignalP and other specialized programs. The variant protein is believed to be located as follows with regard to the cell: membrane. The protein localization is believed to be membrane because of manual inspection of known protein localization and/or gene structure.

[2883] Variant protein HUMCEA_PEA_{—}1_P7 (SEQ ID NO:866) also has the following non-silent SNPs (Single Nucleotide Polymorphisms) as listed in Table 14, (given according to their position(s) on the amino acid sequence, with the alternative amino acid(s) listed; the last column indicates whether the SNP is known or not; the presence of known SNPs in variant protein HUMCEA_PEA_{—}1_P7 (SEQ ID NO:866) sequence provides support for the deduced sequence of this variant protein according to the present invention).

TABLE 14
Amino acid mutations

| SNP position(s) | | |
|---|---|---|
| on amino acid | Alternative | Previously |
| sequence | amino acid(s) | known SNP? |
| 63 | F -> L | No |
| 80 | I -> V | Yes |
| 83 | V -> A | Yes |
| 137 | Q -> P | Yes |
| 173 | D -> N | No |
| 289 | I -> T | No |
| 340 | A -> D | Yes |
| 398 | E -> K | Yes |
| 647 | P -> | No |
| 664 | R -> S | Yes |

[2884] The glycosylation sites of variant protein HUMCEA_PEA_{—}1_P7 (SEQ ID NO:866), as compared to the known protein Carcinoembryonic antigen-related cell adhesion molecule 5 precursor (SEQ ID NO:863), are described in Table 15 (given according to their position(s) on the amino acid sequence in the first column; the second column indicates whether the glycosylation site is present in the variant protein; and the last column indicates whether the position is different on the variant protein).

TABLE 15
Glycosylation site(s)

| Position(s) on | | |
|---|---|---|
| known amino acid | Present in | Position in |
| sequence | variant protein? | variant protein? |
| 197 | yes | 197 |
| 466 | yes | 466 |
| 360 | yes | 360 |
| 288 | yes | 288 |
| 665 | yes | 665 |
| 560 | yes | 560 |
| 650 | yes | 650 |
| 480 | yes | 480 |
| 104 | yes | 104 |
| 580 | yes | 580 |
| 204 | yes | 204 |
| 115 | yes | 115 |
| 208 | yes | 208 |
| 152 | yes | 152 |
| 309 | yes | 309 |
| 432 | yes | 432 |
| 351 | yes | 351 |
| 246 | yes | 246 |
| 182 | yes | 182 |
| 612 | yes | 612 |
| 256 | yes | 256 |
| 508 | yes | 508 |
| 330 | yes | 330 |
| 274 | yes | 274 |
| 292 | yes | 292 |
| 553 | yes | 553 |
| 529 | yes | 529 |
| 375 | yes | 375 |

[2885] Variant protein HUMCEA_PEA_{—}1_P7 (SEQ ID NO:866) is encoded by the following transcript(s): HUMCEA_PEA_{—}1_T12 (SEQ ID NO:808), for which the sequence(s) is/are given at the end of the application. The coding portion of transcript HUMCEA_PEA_{—}1_T12 (SEQ ID NO:808) is shown in bold; this coding portion starts at position 115 and ends at position 2193. The transcript also has the following SNPs as listed in Table 16 (given according to their position on the nucleotide sequence, with the alternative nucleic acid listed; the last column indicates whether the SNP is known or not; the presence of known SNPs in variant protein HUMCEA_PEA_{—}1_P7 (SEQ ID NO:866) sequence provides support for the deduced sequence of this variant protein according to the present invention).

TABLE 16
Nucleic acid SNPs

| SNP position | | |
|---|---|---|
| on nucleotide | Alternative | Previously |
| sequence | nucleic acid | known SNP? |
| 49 | T -> | No |
| 273 | A -> C | Yes |
| 303 | T -> G | No |
| 324 | T -> C | Yes |
| 352 | A -> G | Yes |
| 362 | T -> C | Yes |
| 524 | A -> C | Yes |
| 631 | G -> A | No |
| 915 | A -> G | No |
| 980 | T -> C | No |
| 1133 | C -> A | Yes |
| 1306 | G -> A | Yes |
| 1908 | T -> C | No |
| 1962 | C -> T | No |
| 2055 | A -> | No |
| 2104 | C -> A | Yes |
| 2196 | G -> | No |
| 2212 | T -> A | No |
| 2213 | T -> A | No |
| 2405 | G -> A | Yes |
| 2458 | C -> T | No |
| 2969 | A -> G | Yes |
| 3135 | C -> T | Yes |
| 3326 | C -> T | Yes |

[2886] Variant protein HUMCEA_PEA_{—}1_P10 (SEQ ID NO:867) according to the present invention has an amino acid sequence as given at the end of the application; it is encoded by transcript(s) HUMCEA_PEA_{—}1_T16 (SEQ ID NO:810). An alignment is given to the known protein (Carcinoembryonic antigen-related cell adhesion molecule 5 precursor (SEQ ID NO:863)) at the end of the application. One or more alignments to one or more previously published protein sequences are given at the end of the application. A brief description of the relationship of the variant protein according to the present invention to each such aligned protein is as follows:

[2887] Comparison Report Between HUMCEA_PEA_{—}1_P10 (SEQ ID NO:867) and CEA5_HUMAN (SEQ ID NO:863):

[2888] 1. An isolated chimeric polypeptide encoding for HUMCEA_PEA_{—}1_P10 (SEQ ID NO:867), comprising a first amino acid sequence being at least 90% homologous to MESPSAPPHRWCIPWQRLLLTASLLTFWNPPTTAKLTIESTPFNVAEGKEVLLLVHNLPQHLFGYSWYKGE RVDGNRQIIGYVIGTQQATPGPAYSGREIIYPNASLLIQNIIQNDTGFYTLHVIKSDLVNEEATGQFRVYPEL PKPSISSNNSKPVEDKDAVAFTCEPETQDATYLWWVNNQSLPVSPRLQLSNGNRTLTLFNVTRNDTASYK CETQNPVSARRSDS corresponding to amino acids 1-228 of CEA5_HUMAN (SEQ ID NO:863), which also corresponds to amino acids 1-228 of HUMCEA_PEA_{—}1_P10 (SEQ ID NO:867), and a second amino acid sequence being at least 90% homologous to VILNVLYGPDDPTISPSYTYYRPGVNLSLSCHAASNPPAQYSWLIDGNIQQHTQELFISNITEKNSGLYTCQA NNSASGHSRTTVKTITVSAELPKPSISSNNSKPVEDKDAVAFTCEPEAQNTTYLWWVNGQSLPVSPRLQLS NGNRTLTLFNVTRNDARAYVCGIQNSVSANRSDPVTLDVLYGPDTPIISPPDSSYLSGANLNLSCHSASNPS PQYSWRINGIPQQHTQVLFIAKITPNNNGTYACFVSNLATGRNNSIVKSITVSASGTSPGLSAGATVGIMIGV LVGVALI corresponding to amino acids 407-702 of CEA5_HUMAN (SEQ ID NO:863), which also corresponds to amino acids 229-524 of HUMCEA_PEA_{—}1_P10 (SEQ ID NO:867), wherein said first amino acid sequence and second amino acid sequence are contiguous and in a sequential order.

[2889] 2. An isolated chimeric polypeptide encoding for an edge portion of HUMCEA_PEA_{—}1_P10 (SEQ ID NO:867), comprising a polypeptide having a length “n”, wherein n is at least about 10 amino acids in length, optionally at least about 20 amino acids in length, preferably at least about 30 amino acids in length, more preferably at least about 40 amino acids in length and most preferably at least about 50 amino acids in length, wherein at least two amino acids comprise SV, having a structure as follows: a sequence starting from any of amino acid numbers 228−x to 228; and ending at any of amino acid numbers 229+((n−2)−x), in which x varies from 0 to n−2.

[2890] The location of the variant protein was determined according to results from a number of different software programs and analyses, including analyses from SignalP and other specialized programs. The variant protein is believed to be located as follows with regard to the cell: secreted. The protein localization is believed to be secreted because both signal-peptide prediction programs predict that this protein has a signal peptide.

[2891] Variant protein HUMCEA_PEA_{—}1_P10 (SEQ ID NO:867) also has the following non-silent SNPs (Single Nucleotide Polymorphisms) as listed in Table 17, (given according to their position(s) on the amino acid sequence, with the alternative amino acid(s) listed; the last column indicates whether the SNP is known or not; the presence of known SNPs in variant protein HUMCEA_PEA_{—}1_P10 (SEQ ID NO:867) sequence provides support for the deduced sequence of this variant protein according to the present invention).

TABLE 17
Amino acid mutations

| SNP position(s) | | |
|---|---|---|
| on amino acid | Alternative | Previously |
| sequence | amino acid(s) | known SNP? |
| 63 | F -> L | No |
| 80 | I -> V | Yes |
| 83 | V -> A | Yes |
| 137 | Q -> P | Yes |
| 173 | D -> N | No |
| 469 | P -> | No |
| 486 | R -> S | Yes |
| 504 | G -> | No |

[2892] The glycosylation sites of variant protein HUMCEA_PEA_{—}1_P10 (SEQ ID NO:867), as compared to the known protein Carcinoembryonic antigen-related cell adhesion molecule 5 precursor (SEQ ID NO:863), are described in Table 18 (given according to their position(s) on the amino acid sequence in the first column; the second column indicates whether the glycosylation site is present in the variant protein; and the last column indicates whether the position is different on the variant protein).

TABLE 18
Glycosylation site(s)

| Position(s) on | | |
|---|---|---|
| known amino acid | Present in | Position in |
| sequence | variant protein? | variant protein? |
| 197 | yes | 197 |
| 466 | yes | 288 |
| 360 | no | |
| 288 | no | |
| 665 | yes | 487 |
| 560 | yes | 382 |
| 650 | yes | 472 |
| 480 | yes | 302 |
| 104 | yes | 104 |
| 580 | yes | 402 |
| 204 | yes | 204 |
| 115 | yes | 115 |
| 208 | yes | 208 |
| 152 | yes | 152 |
| 309 | no | |
| 432 | yes | 254 |
| 351 | no | |
| 246 | no | |
| 182 | yes | 182 |
| 612 | yes | 434 |
| 256 | no | |
| 508 | yes | 330 |
| 330 | no | |
| 274 | no | |
| 292 | no | |
| 553 | yes | 375 |
| 529 | yes | 351 |
| 375 | no | |

[2893] Variant protein HUMCEA_PEA_{—}1_P10 (SEQ ID NO:867) is encoded by the following transcript(s): HUMCEA_PEA_{—}1_T16 (SEQ ID NO:810), for which the sequence(s) is/are given at the end of the application. The coding portion of transcript HUMCEA_PEA_{—}1_T16 (SEQ ID NO:810) is shown in bold; this coding portion starts at position 115 and ends at position 1686. The transcript also has the following SNPs as listed in Table 19 (given according to their position on the nucleotide sequence, with the alternative nucleic acid listed; the last column indicates whether the SNP is known or not; the presence of known SNPs in variant protein HUMCEA_PEA_{—}1_P10 (SEQ ID NO:867) sequence provides support for the deduced sequence of this variant protein according to the present invention).

TABLE 19
Nucleic acid SNPs

| SNP position | | |
|---|---|---|
| on nucleotide | Alternative | Previously |
| sequence | nucleic acid | known SNP? |
| 49 | T -> | No |
| 273 | A -> C | Yes |
| 303 | T -> G | No |
| 324 | T -> C | Yes |
| 352 | A -> G | Yes |
| 362 | T -> C | Yes |
| 524 | A -> C | Yes |
| 631 | G -> A | No |
| 1374 | T -> C | No |
| 1428 | C -> T | No |
| 1521 | A -> | No |
| 1570 | C -> A | Yes |
| 1624 | G -> | No |
| 1689 | G -> | No |
| 1705 | T -> A | No |
| 1706 | T -> A | No |
| 1898 | G -> A | Yes |
| 1951 | C -> T | No |
| 2462 | A -> G | Yes |
| 2628 | C -> T | Yes |
| 2819 | C -> T | Yes |

[2894] Variant protein HUMCEA_PEA_{—}1_P14 (SEQ ID NO:868) according to the present invention has an amino acid sequence as given at the end of the application; it is encoded by transcript(s) HUMCEA_PEA_{—}1_T20 (SEQ ID NO:811). The location of the variant protein was determined according to results from a number of different software programs and analyses, including analyses from SignalP and other specialized programs. The variant protein is believed to be located as follows with regard to the cell: secreted. The protein localization is believed to be secreted because both signal-peptide prediction programs predict that this protein has a signal peptide, and neither trans-membrane region prediction program predicts that this protein has a trans-membrane region.

[2895] Variant protein HUMCEA_PEA_{—}1_P14 (SEQ ID NO:868) also has the following non-silent SNPs (Single Nucleotide Polymorphisms) as listed in Table 20, (given according to their position(s) on the amino acid sequence, with the alternative amino acid(s) listed; the last column indicates whether the SNP is known or not; the presence of known SNPs in variant protein HUMCEA_PEA_{—}1_P14 (SEQ ID NO:868) sequence provides support for the deduced sequence of this variant protein according to the present invention).

TABLE 20
Amino acid mutations

| SNP position(s) | | |
|---|---|---|
| on amino acid | Alternative | Previously |
| sequence | amino acid(s) | known SNP? |
| 63 | F -> L | No |
| 80 | I -> V | Yes |
| 83 | V -> A | Yes |
| 137 | Q -> P | Yes |
| 173 | D -> N | No |
| 289 | I -> T | No |
| 340 | A -> D | Yes |
| 398 | E -> K | Yes |

[2896] Variant protein HUMCEA_PEA_{—}1_P14 (SEQ ID NO:868) is encoded by the following transcript(s): HUMCEA_PEA_{—}1_T20 (SEQ ID NO:811), for which the sequence(s) is/are given at the end of the application. The coding portion of transcript HUMCEA_PEA_{—}1_T20 (SEQ ID NO:811) is shown in bold; this coding portion starts at position 115 and ends at position 1821. The transcript also has the following SNPs as listed in Table 21 (given according to their position on the nucleotide sequence, with the alternative nucleic acid listed; the last column indicates whether the SNP is known or not; the presence of known SNPs in variant protein HUMCEA_PEA_{—}1_P14 (SEQ ID NO:868) sequence provides support for the deduced sequence of this variant protein according to the present invention).

TABLE 21
Nucleic acid SNPs

| SNP position | | |
|---|---|---|
| on nucleotide | Alternative | Previously |
| sequence | nucleic acid | known SNP? |
| 49 | T -> | No |
| 273 | A -> C | Yes |
| 303 | T -> G | No |
| 324 | T -> C | Yes |
| 352 | A -> G | Yes |
| 362 | T -> C | Yes |
| 524 | A -> C | Yes |
| 631 | G -> A | No |
| 915 | A -> G | No |
| 980 | T -> C | No |
| 1133 | C -> A | Yes |
| 1306 | G -> A | Yes |

[2897] Variant protein HUMCEA_PEA_{—}1_P19 (SEQ ID NO:869) according to the present invention has an amino acid sequence as given at the end of the application; it is encoded by transcript(s) HUMCEA_PEA_{—}1_T25 (SEQ ID NO:812). An alignment is given to the known protein (Carcinoembryonic antigen-related cell adhesion molecule 5 precursor (SEQ ID NO:863)) at the end of the application. One or more alignments to one or more previously published protein sequences are given at the end of the application. A brief description of the relationship of the variant protein according to the present invention to each such aligned protein is as follows:

[2898] Comparison Report Between HUMCEA_PEA_{—}1_P19 (SEQ ID NO:869) and CEA5_HUMAN (SEQ ID NO:863):

[2899] 1. An isolated chimeric polypeptide encoding for HUMCEA_PEA_{—}1_P19 (SEQ ID NO:869), comprising a first amino acid sequence being at least 90% homologous to MESPSAPPHRWCIPWQRLLLTASLLTFWNPPTTAKLTIESTPFNVAEGKEVLLLVHNLPQHLFGYSWYKGE RVDGNRQIIGYVIGTQQATPGPAYSGREIIYPNASLLIQNIIQNDTGFYTLHVIKSDLVNEEATGQFRVYPEL PKPSISSNNSKPVEDKDAVAFTCEPETQDATYLWWVNNQSLPVSPRLQLSNGNRTLTLFNVTRNDTASYK CETQNPVSARRSDSVILN corresponding to amino acids 1-232 of CEA5_HUMAN (SEQ ID NO:863), which also corresponds to amino acids 1-232 of HUMCEA_PEA_{—}1_P19 (SEQ ID NO:869), and a second amino acid sequence being at least 90% homologous to VLYGPDTPIISPPDSSYLSGANLNLSCHSASNPSPQYSWRINGIPQQHTQVLFIAKITPNNNGTYACFVSNLA TGRNNSIVKSITVSASGTSPGLSAGATVGIMIGVLVGVALI corresponding to amino acids 589-702 of CEA5_HUMAN (SEQ ID NO:863), which also corresponds to amino acids 233-346 of HUMCEA_PEA_{—}1_P19 (SEQ ID NO:869), wherein said first amino acid sequence and second amino acid sequence are contiguous and in a sequential order.

[2900] 2. An isolated chimeric polypeptide encoding for an edge portion of HUMCEA_PEA_{—}1_P19 (SEQ ID NO:869), comprising a polypeptide having a length “n”, wherein n is at least about 10 amino acids in length, optionally at least about 20 amino acids in length, preferably at least about 30 amino acids in length, more preferably at least about 40 amino acids in length and most preferably at least about 50 amino acids in length, wherein at least two amino acids comprise NV, having a structure as follows: a sequence starting from any of amino acid numbers 232−x to 232; and ending at any of amino acid numbers 233+((n−2)−x), in which x varies from 0 to n−2.

[2901] The location of the variant protein was determined according to results from a number of different software programs and analyses, including analyses from SignalP and other specialized programs. The variant protein is believed to be located as follows with regard to the cell: membrane. The protein localization is believed to be membrane because of manual inspection of known protein localization and/or gene structure.

[2902] Variant protein HUMCEA_PEA_{—}1_P19 (SEQ ID NO:869) also has the following non-silent SNPs (Single Nucleotide Polymorphisms) as listed in Table 22, (given according to their position(s) on the amino acid sequence, with the alternative amino acid(s) listed; the last column indicates whether the SNP is known or not; the presence of known SNPs in variant protein HUMCEA_PEA_{—}1_P19 (SEQ ID NO:869) sequence provides support for the deduced sequence of this variant protein according to the present invention).

TABLE 22
Amino acid mutations

| SNP position(s) | | |
|---|---|---|
| on amino acid | Alternative | Previously |
| sequence | amino acid(s) | known SNP? |
| 63 | F -> L | No |
| 80 | I -> V | Yes |
| 83 | V -> A | Yes |
| 137 | Q -> P | Yes |
| 173 | D -> N | No |
| 291 | P -> | No |
| 308 | R -> S | Yes |
| 326 | G -> | No |

[2903] The glycosylation sites of variant protein HUMCEA_PEA_{—}1_P19 (SEQ ID NO:869), as compared to the known protein Carcinoembryonic antigen-related cell adhesion molecule 5 precursor (SEQ ID NO:863), are described in Table 23 (given according to their position(s) on the amino acid sequence in the first column; the second column indicates whether the glycosylation site is present in the variant protein; and the last column indicates whether the position is different on the variant protein).

TABLE 23
Glycosylation site(s)

| Position(s) on | | |
|---|---|---|
| known amino acid | Present in | Position in |
| sequence | variant protein? | variant protein? |
| 197 | yes | 197 |
| 466 | no | |
| 360 | no | |
| 288 | no | |
| 665 | yes | 309 |
| 560 | no | |
| 650 | yes | 294 |
| 480 | no | |
| 104 | yes | 104 |
| 580 | no | |
| 204 | yes | 204 |
| 115 | yes | 115 |
| 208 | yes | 208 |
| 152 | yes | 152 |
| 309 | no | |
| 432 | no | |
| 351 | no | |
| 246 | no | |
| 182 | yes | 182 |
| 612 | yes | 256 |
| 256 | no | |
| 508 | no | |
| 330 | no | |
| 274 | no | |
| 292 | no | |
| 553 | no | |
| 529 | no | |
| 375 | no | |

[2904] Variant protein HUMCEA_PEA_{—}1_P19 (SEQ ID NO:869) is encoded by the following transcript(s): HUMCEA_PEA_{—}1_T25 (SEQ ID NO:812), for which the sequence(s) is/are given at the end of the application. The coding portion of transcript HUMCEA_PEA_{—}1_T25 (SEQ ID NO:812) is shown in bold; this coding portion starts at position 115 and ends at position 1152. The transcript also has the following SNPs as listed in Table 24 (given according to their position on the nucleotide sequence, with the alternative nucleic acid listed; the last column indicates whether the SNP is known or not; the presence of known SNPs in variant protein HUMCEA_PEA_{—}1_P19 (SEQ ID NO:869) sequence provides support for the deduced sequence of this variant protein according to the present invention).

TABLE 24
Nucleic acid SNPs

| SNP position on | | |
|---|---|---|
| nucleotide sequence | Alternative nucleic acid | Previously known SNP? |
| 49 | T -> | No |
| 273 | A -> C | Yes |
| 303 | T -> G | No |
| 324 | T -> C | Yes |
| 352 | A -> G | Yes |
| 362 | T -> C | Yes |
| 524 | A -> C | Yes |
| 631 | G -> A | No |
| 840 | T -> C | No |
| 894 | C -> T | No |
| 987 | A -> | No |
| 1036 | C -> A | Yes |
| 1090 | G -> | No |
| 1155 | G -> | No |
| 1171 | T -> A | No |
| 1172 | T -> A | No |
| 1364 | G -> A | Yes |
| 1417 | C -> T | No |
| 1928 | A -> G | Yes |
| 2094 | C -> T | Yes |
| 2285 | C -> T | Yes |

[2905] Variant protein HUMCEA_PEA_{—}1_P20 (SEQ ID NO:870) according to the present invention has an amino acid sequence as given at the end of the application; it is encoded by transcript(s) HUMCEA_PEA_{—}1_T26 (SEQ ID NO:813). An alignment is given to the known protein (Carcinoembryonic antigen-related cell adhesion molecule 5 precursor (SEQ ID NO:863)) at the end of the application. One or more alignments to one or more previously published protein sequences are given at the end of the application. A brief description of the relationship of the variant protein according to the present invention to each such aligned protein is as follows:

[2906] Comparison Report Between HUMCEA_PEA_{—}1_P20 (SEQ ID NO:870) and CEA5_HUMAN (SEQ ID NO:863):

[2907] 1. An isolated chimeric polypeptide encoding for HUMCEA_PEA_{—}1_P20 (SEQ ID NO:870), comprising a first amino acid sequence being at least 90% homologous to MESPSAPPHRWCIPWQRLLLTASLLTFWNPPTTAKLTIESTPFNVAEGKEVLLLVHNLPQHLFGYSWYKGE RVDGNRQIIGYVIGTQQATPGPAYSGREIIYPNASLLIQNIIQNDTGFYTLHVIKSDLVNEEATGQFRVYP corresponding to amino acids 1-142 of CEA5_HUMAN (SEQ ID NO:863), which also corresponds to amino acids 1-142 of HUMCEA_PEA_{—}1_P20 (SEQ ID NO:870), and a second amino acid sequence being at least 90% homologous to ELPKPSISSNNSKPVEDKDAVAFTCEPEAQNTTYLWWVNGQSLPVSPRLQLSNGNRTLTLFNVTRNDARA YVCGIQNSVSANRSDPVTLDVLYGPDTPIISPPDSSYLSGANLNLSCHSASNPSPQYSWRINGIPQQHTQVLF IAKITPNNNGTYACFVSNLATGRNNSIVKSITVSASGTSPGLSAGATVGIMIGVLVGVALI corresponding to amino acids 499-702 of CEA5_HUMAN (SEQ ID NO:863), which also corresponds to amino acids 143-346 of HUMCEA_PEA_{—}1_P20 (SEQ ID NO:870), wherein said first amino acid sequence and second amino acid sequence are contiguous and in a sequential order.

[2908] 2. An isolated chimeric polypeptide encoding for an edge portion of HUMCEA_PEA_{—}1_P20 (SEQ ID NO:870), comprising a polypeptide having a length “n”, wherein n is at least about 10 amino acids in length, optionally at least about 20 amino acids in length, preferably at least about 30 amino acids in length, more preferably at least about 40 amino acids in length and most preferably at least about 50 amino acids in length, wherein at least two amino acids comprise PE, having a structure as follows: a sequence starting from any of amino acid numbers 142−x to 142; and ending at any of amino acid numbers 143+((n−2)−x), in which x varies from 0 to n−2.

[2909] The location of the variant protein was determined according to results from a number of different software programs and analyses, including analyses from SignalP and other specialized programs. The variant protein is believed to be located as follows with regard to the cell: membrane. The protein localization is believed to be membrane because of manual inspection of known protein localization and/or gene structure.

[2910] Variant protein HUMCEA_PEA_{—}1_P20 (SEQ ID NO:870) also has the following non-silent SNPs (Single Nucleotide Polymorphisms) as listed in Table 25, (given according to their position(s) on the amino acid sequence, with the alternative amino acid(s) listed; the last column indicates whether the SNP is known or not; the presence of known SNPs in variant protein HUMCEA_PEA_{—}1_P20 (SEQ ID NO:870) sequence provides support for the deduced sequence of this variant protein according to the present invention).

TABLE 25
Amino acid mutations

| SNP position(s) on | | |
|---|---|---|
| amino acid sequence | Alternative amino acid(s) | Previously known SNP? |
| 63 | F -> L | No |
| 80 | I -> V | Yes |
| 83 | V -> A | Yes |
| 137 | Q -> P | Yes |
| 291 | P -> | No |
| 308 | R -> S | Yes |
| 326 | G -> | No |

[2911] The glycosylation sites of variant protein HUMCEA_PEA_{—}1_P20 (SEQ ID NO:870), as compared to the known protein Carcinoembryonic antigen-related cell adhesion molecule 5 precursor (SEQ ID NO:863), are described in Table 26 (given according to their position(s) on the amino acid sequence in the first column; the second column indicates whether the glycosylation site is present in the variant protein; and the last column indicates whether the position is different on the variant protein).

TABLE 26
Glycosylation site(s)

| Position(s) on known | Present in | Position |
|---|---|---|
| amino acid sequence | variant protein? | in variant protein? |
| 197 | no | |
| 466 | no | |
| 360 | no | |
| 288 | no | |
| 665 | yes | 309 |
| 560 | yes | 204 |
| 650 | yes | 294 |
| 480 | no | |
| 104 | yes | 104 |
| 580 | yes | 224 |
| 204 | no | |
| 115 | yes | 115 |
| 208 | no | |
| 152 | no | |
| 309 | no | |
| 432 | no | |
| 351 | no | |
| 246 | no | |
| 182 | no | |
| 612 | yes | 256 |
| 256 | no | |
| 508 | yes | 152 |
| 330 | no | |
| 274 | no | |
| 292 | no | |
| 553 | yes | 197 |
| 529 | yes | 173 |
| 375 | no | |

[2912] Variant protein HUMCEA_PEA_{—}1_P20 (SEQ ID NO:870) is encoded by the following transcript(s): HUMCEA_PEA_{—}1_T26 (SEQ ID NO:813), for which the sequence(s) is/are given at the end of the application. The coding portion of transcript HUMCEA_PEA_{—}1_T26 (SEQ ID NO:813) is shown in bold; this coding portion starts at position 115 and ends at position 1152. The transcript also has the following SNPs as listed in Table 27 (given according to their position on the nucleotide sequence, with the alternative nucleic acid listed; the last column indicates whether the SNP is known or not; the presence of known SNPs in variant protein HUMCEA_PEA_{—}1_P20 (SEQ ID NO:870) sequence provides support for the deduced sequence of this variant protein according to the present invention).

TABLE 27
Nucleic acid SNPs

| SNP position on | | |
|---|---|---|
| nucleotide sequence | Alternative nucleic acid | Previously known SNP? |
| 49 | T -> | No |
| 273 | A -> C | Yes |
| 303 | T -> G | No |
| 324 | T -> C | Yes |
| 352 | A -> G | Yes |
| 362 | T -> C | Yes |
| 524 | A -> C | Yes |
| 840 | T -> C | No |
| 894 | C -> T | No |
| 987 | A -> | No |
| 1036 | C -> A | Yes |
| 1090 | G -> | No |
| 1155 | G -> | No |
| 1171 | T -> A | No |
| 1172 | T -> A | No |
| 1364 | G -> A | Yes |
| 1417 | C -> T | No |
| 1928 | A -> G | Yes |
| 2094 | C -> T | Yes |
| 2285 | C -> T | Yes |

[2913] As noted above, cluster HUMCEA features 47 segment(s), which were listed in Table 2 above and for which the sequence(s) are given at the end of the application. These segment(s) are portions of nucleic acid sequence(s) which are described herein separately because they are of particular interest. A description of each segment according to the present invention is now provided.

[2914] Segment cluster HUMCEA_PEA_{—}1_node_{—}0 (SEQ ID NO:816) according to the present invention is supported by 56 libraries. The number of libraries was determined as previously described. This segment can be found in the following transcript(s): HUMCEA_PEA_{—}1_T8 (SEQ ID NO:806), HUMCEA_PEA_{—}1_T9 (SEQ ID NO:807), HUMCEA_PEA_{—}1_T12 (SEQ ID NO:808), HUMCEA_PEA_{—}1_T16 (SEQ ID NO:810), HUMCEA_PEA_{—}1_T20 (SEQ ID NO:811), HUMCEA_PEA_{—}1_T25 (SEQ ID NO:812) and HUMCEA_PEA_{—}1_T26 (SEQ ID NO:813). Table 28 below describes the starting and ending position of this segment on each transcript.

TABLE 28
Segment location on transcripts

| | Segment | Segment |
|---|---|---|
| | starting | ending |
| Transcript name | position | position |
| HUMCEA_PEA_1_T8 (SEQ ID NO: 806) | 1 | 178 |
| HUMCEA_PEA_1_T9 (SEQ ID NO: 807) | 1 | 178 |
| HUMCEA_PEA_1_T12 (SEQ ID NO: 808) | 1 | 178 |
| HUMCEA_PEA_1_T16 (SEQ ID NO: 810) | 1 | 178 |
| HUMCEA_PEA_1_T20 (SEQ ID NO: 811) | 1 | 178 |
| HUMCEA_PEA_1_T25 (SEQ ID NO: 812) | 1 | 178 |
| HUMCEA_PEA_1_T26 (SEQ ID NO: 813) | 1 | 178 |

[2915] Segment cluster HUMCEA_PEA_{—}1_node_{—}2 (SEQ ID NO:817) according to the present invention is supported by 83 libraries. The number of libraries was determined as previously described. This segment can be found in the following transcript(s): HUMCEA_PEA_{—}1_T8 (SEQ ID NO:806), HUMCEA_PEA_{—}1_T9 (SEQ ID NO:807), HUMCEA_PEA_{—}1_T12 (SEQ ID NO:808), HUMCEA_PEA_{—}1_T16 (SEQ ID NO:810), HUMCEA_PEA_{—}1_T20 (SEQ ID NO:811), HUMCEA_PEA_{—}1_T25 (SEQ ID NO:812) and HUMCEA_PEA_{—}1_T26 (SEQ ID NO:813). Table 29 below describes the starting and ending position of this segment on each transcript.

TABLE 29
Segment location on transcripts

| | Segment | Segment |
|---|---|---|
| | starting | ending |
| Transcript name | position | position |
| HUMCEA_PEA_1_T8 (SEQ ID NO: 806) | 179 | 456 |
| HUMCEA_PEA_1_T9 (SEQ ID NO: 807) | 179 | 456 |
| HUMCEA_PEA_1_T12 (SEQ ID NO: 808) | 179 | 456 |
| HUMCEA_PEA_1_T16 (SEQ ID NO: 810) | 179 | 456 |
| HUMCEA_PEA_1_T20 (SEQ ID NO: 811) | 179 | 456 |
| HUMCEA_PEA_1_T25 (SEQ ID NO: 812) | 179 | 456 |
| HUMCEA_PEA_1_T26 (SEQ ID NO: 813) | 179 | 456 |

[2916] Segment cluster HUMCEA_PEA_{—}1_node_{—}6 (SEQ ID NO:818) according to the present invention is supported by 8 libraries. The number of libraries was determined as previously described. This segment can be found in the following transcript(s): HUMCEA_PEA_{—}1_T14 (SEQ ID NO:809). Table 30 below describes the starting and ending position of this segment on each transcript.

TABLE 30
Segment location on transcripts

| | Segment | Segment |
|---|---|---|
| | starting | ending |
| Transcript name | position | position |
| HUMCEA_PEA_1_T14 (SEQ ID NO: 809) | 1 | 1258 |

[2917] Segment cluster HUMCEA_PEA_{—}1_node_{—}1 (SEQ ID NO:819) according to the present invention is supported by 6 libraries. The number of libraries was determined as previously described. This segment can be found in the following transcript(s): HUMCEA_PEA_{—}1_T8 (SEQ ID NO:806). Table 31 below describes the starting and ending position of this segment on each transcript.

TABLE 31
Segment location on transcripts

| | Segment | |
|---|---|---|
| | starting | Segment |
| Transcript name | position | ending position |
| HUMCEA_PEA_1_T8 (SEQ ID NO: 806) | 818 | 1217 |

[2918] Microarray (chip) data is also available for this segment as follows. As described above with regard to the cluster itself, various oligonucleotides were tested for being differentially expressed in various disease conditions, particularly cancer. The following oligonucleotides were found to hit this segment, shown in Table 32.

TABLE 32
Oligonucleotides related to this segment

| | Overexpressed | Chip |
|---|---|---|
| Oligonucleotide name | in cancers | reference |
| HUMCEA_0_0_96 (SEQ ID NO: 1428) | colorectal cancer | Colon |
| HUMCEA_0_0_96 (SEQ ID NO: 1428) | lung malignant | LUN |
| | tumors | |

[2919] Segment cluster HUMCEA_PEA_{—}1_node_{—}12 (SEQ ID NO:820) according to the present invention is supported by 83 libraries. The number of libraries was determined as previously described. This segment can be found in the following transcript(s): HUMCEA_PEA_{—}1_T8 (SEQ ID NO:806), HUMCEA_PEA_{—}1_T9 (SEQ ID NO:807), HUMCEA_PEA_{—}1_T12 (SEQ ID NO:808), HUMCEA_PEA_{—}1_T14 (SEQ ID NO:809) and HUMCEA_PEA_{—}1_T20 (SEQ ID NO:811). Table 33 below describes the starting and ending position of this segment on each transcript.

TABLE 33
Segment location on transcripts

| | Segment | Segment |
|---|---|---|
| | starting | ending |
| Transcript name | position | position |
| HUMCEA_PEA_1_T8 (SEQ ID NO: 806) | 1218 | 1472 |
| HUMCEA_PEA_1_T9 (SEQ ID NO: 807) | 818 | 1072 |
| HUMCEA_PEA_1_T12 (SEQ ID NO: 808) | 818 | 1072 |
| HUMCEA_PEA_1_T14 (SEQ ID NO: 809) | 1538 | 1792 |
| HUMCEA_PEA_1_T20 (SEQ ID NO: 811) | 818 | 1072 |

[2920] Segment cluster HUMCEA_PEA_{—}1_node_{—}31 (SEQ ID NO:821) according to the present invention is supported by 87 libraries. The number of libraries was determined as previously described. This segment can be found in the following transcript(s): HUMCEA_PEA_{—}1_T8 (SEQ ID NO:806), HUMCEA_PEA_{—}1_T9 (SEQ ID NO:807), HUMCEA_PEA_{—}1_T12 (SEQ ID NO:808), HUMCEA_PEA_{—}1_T14 (SEQ ID NO:809), HUMCEA_PEA_{—}1_T16 (SEQ ID NO:810) and HUMCEA_PEA_{—}1_T20 (SEQ ID NO:811). Table 34 below describes the starting and ending position of this segment on each transcript.

TABLE 34
Segment location on transcripts

| | Segment | Segment |
|---|---|---|
| | starting | ending |
| Transcript name | position | position |
| HUMCEA_PEA_1_T8 (SEQ ID NO: 806) | 1817 | 2006 |
| HUMCEA_PEA_1_T9 (SEQ ID NO: 807) | 1417 | 1606 |
| HUMCEA_PEA_1_T12 (SEQ ID NO: 808) | 1417 | 1606 |
| HUMCEA_PEA_1_T14 (SEQ ID NO: 809) | 2137 | 2326 |
| HUMCEA_PEA_1_T16 (SEQ ID NO: 810) | 883 | 1072 |
| HUMCEA_PEA_1_T20 (SEQ ID NO: 811) | 1417 | 1606 |

[2921] Segment cluster HUMCEA_PEA_{—}1_node_{—}36 (SEQ ID NO:822) according to the present invention is supported by 94 libraries. The number of libraries was determined as previously described. This segment can be found in the following transcript(s): HUMCEA_PEA_{—}1_T8 (SEQ ID NO:806), HUMCEA_PEA_{—}1_T9 (SEQ ID NO:807), HUMCEA_PEA_{—}1_T12 (SEQ ID NO:808), HUMCEA_PEA_{—}1_T14 (SEQ ID NO:809), HUMCEA_PEA_{—}1_T16 (SEQ ID NO:810) and HUMCEA_PEA_{—}1_T26 (SEQ ID NO:813). Table 35 below describes the starting and ending position of this segment on each transcript.

TABLE 35
Segment location on transcripts

| | Segment | Segment |
|---|---|---|
| | starting | ending |
| Transcript name | position | position |
| HUMCEA_PEA_1_T8 (SEQ ID NO: 806) | 2159 | 2285 |
| HUMCEA_PEA_1_T9 (SEQ ID NO: 807) | 1759 | 1885 |
| HUMCEA_PEA_1_T12 (SEQ ID NO: 808) | 1759 | 1885 |
| HUMCEA_PEA_1_T14 (SEQ ID NO: 809) | 2479 | 2605 |
| HUMCEA_PEA_1_T16 (SEQ ID NO: 810) | 1225 | 1351 |
| HUMCEA_PEA_1_T26 (SEQ ID NO: 813) | 691 | 817 |

[2922] Segment cluster HUMCEA_PEA_{—}1_node_{—}42 (SEQ ID NO:823) according to the present invention is supported by 5 libraries. The number of libraries was determined as previously described. This segment can be found in the following transcript(s): HUMCEA_PEA_{—}1_T29 (SEQ ID NO:814). Table 36 below describes the starting and ending position of this segment on each transcript.

TABLE 36
Segment location on transcripts

| | Segment | Segment |
|---|---|---|
| | starting | ending |
| Transcript name | position | position |
| HUMCEA_PEA_1_T29 (SEQ ID NO: 814) | 1 | 136 |

[2923] Segment cluster HUMCEA_PEA_{—}1_node_{—}43 (SEQ ID NO:824) according to the present invention is supported by 11 libraries. The number of libraries was determined as previously described. This segment can be found in the following transcript(s): HUMCEA_PEA_{—}1_T29 (SEQ ID NO:814). Table 37 below describes the starting and ending position of this segment on each transcript.

TABLE 37
Segment location on transcripts

| | Segment | Segment |
|---|---|---|
| | starting | ending |
| Transcript name | position | position |
| HUMCEA_PEA_1_T29 (SEQ ID NO: 814) | 137 | 260 |

[2924] Segment cluster HUMCEA_PEA_{—}1_node_{—}44 (SEQ ID NO:825) according to the present invention is supported by 112 libraries. The number of libraries was determined as previously described. This segment can be found in the following transcript(s): HUMCEA_PEA_{—}1_T8 (SEQ ID NO:806), HUMCEA_PEA_{—}1_T9 (SEQ ID NO:807), HUMCEA_PEA_{—}1_T12 (SEQ ID NO:808), HUMCEA_PEA_{—}1_T14 (SEQ ID NO:809), HUMCEA_PEA_{—}1_T16 (SEQ ID NO:810), HUMCEA_PEA_{—}1_T25 (SEQ ID NO:812), HUMCEA_PEA_{—}1_T26 (SEQ ID NO:813) and HUMCEA_PEA_{—}1_T29 (SEQ ID NO:814). Table 38 below describes the starting and ending position of this segment on each transcript.

TABLE 38
Segment location on transcripts

| | Segment | Segment |
|---|---|---|
| | starting | ending |
| Transcript name | position | position |
| HUMCEA_PEA_1_T8 (SEQ ID NO: 806) | 2286 | 2540 |
| HUMCEA_PEA_1_T9 (SEQ ID NO: 807) | 1886 | 2140 |
| HUMCEA_PEA_1_T12 (SEQ ID NO: 808) | 1886 | 2140 |
| HUMCEA_PEA_1_T14 (SEQ ID NO: 809) | 2606 | 2860 |
| HUMCEA_PEA_1_T16 (SEQ ID NO: 810) | 1352 | 1606 |
| HUMCEA_PEA_1_T25 (SEQ ID NO: 812) | 818 | 1072 |
| HUMCEA_PEA_1_T26 (SEQ ID NO: 813) | 818 | 1072 |
| HUMCEA_PEA_1_T29 (SEQ ID NO: 814) | 261 | 515 |

[2925] Segment cluster HUMCEA_PEA_{—}1_node_{—}46 (SEQ ID NO:826) according to the present invention is supported by 15 libraries. The number of libraries was determined as previously described. This segment can be found in the following transcript(s): HUMCEA_PEA_{—}1_T9 (SEQ ID NO:807). Table 39 below describes the starting and ending position of this segment on each transcript.

TABLE 39
Segment location on transcripts

| | Segment | Segment |
|---|---|---|
| Transcript name | starting position | ending position |
| HUMCEA_PEA_1_T9 | 2174 | 3347 |
| (SEQ ID NO: 807) | | |

[2926] Segment cluster HUMCEA_PEA_{—}1_node_{—}48 (SEQ ID NO:827) according to the present invention is supported by 18 libraries. The number of libraries was determined as previously described. This segment can be found in the following transcript(s): HUMCEA_PEA_{—}1_T30 (SEQ ID NO:815). Table 40 below describes the starting and ending position of this segment on each transcript.

TABLE 40
Segment location on transcripts

| | Segment | Segment |
|---|---|---|
| Transcript name | starting position | ending position |
| HUMCEA_PEA_1_T30 | 1 | 1762 |
| (SEQ ID NO: 815) | | |

[2927] Segment cluster HUMCEA_PEA_{—}1_node_{—}63 (SEQ ID NO:828) according to the present invention is supported by 68 libraries. The number of libraries was determined as previously described. This segment can be found in the following transcript(s): HUMCEA_PEA_{—}1_T8 (SEQ ID NO:806), HUMCEA_PEA_{—}1_T12 (SEQ ID NO:808), HUMCEA_PEA_{—}1_T14 (SEQ ID NO:809), HUMCEA_PEA_{—}1_T16 (SEQ ID NO:810), HUMCEA_PEA_{—}1_T25 (SEQ ID NO:812), HUMCEA_PEA_{—}1_T26 (SEQ ID NO:813), HUMCEA_PEA_{—}1_T29 (SEQ ID NO:814) and HUMCEA_PEA_{—}1_T30 (SEQ ID NO:815). Table 41 below describes the starting and ending position of this segment on each transcript.

TABLE 41
Segment location on transcripts

| | Segment | Segment |
|---|---|---|
| | starting | ending |
| Transcript name | position | position |
| HUMCEA_PEA_1_T8 (SEQ ID NO: 806) | 2957 | 3135 |
| HUMCEA_PEA_1_T12 (SEQ ID NO: 808) | 2530 | 2708 |
| HUMCEA_PEA_1_T14 (SEQ ID NO: 809) | 3277 | 3455 |
| HUMCEA_PEA_1_T16 (SEQ ID NO: 810) | 2023 | 2201 |
| HUMCEA_PEA_1_T25 (SEQ ID NO: 812) | 1489 | 1667 |
| HUMCEA_PEA_1_T26 (SEQ ID NO: 813) | 1489 | 1667 |
| HUMCEA_PEA_1_T29 (SEQ ID NO: 814) | 932 | 1110 |
| HUMCEA_PEA_1_T30 (SEQ ID NO: 815) | 2185 | 2363 |

[2928] Segment cluster HUMCEA_PEA_{—}1_node_{—}65 (SEQ ID NO:829) according to the present invention is supported by 54 libraries. The number of libraries was determined as previously described. This segment can be found in the following transcript(s): HUMCEA_PEA_{—}1_T8 (SEQ ID NO:806), HUMCEA_PEA_{—}1_T12 (SEQ ID NO:808), HUMCEA_PEA_{—}1_T14 (SEQ ID NO:809), HUMCEA_PEA_{—}1_T16 (SEQ ID NO:810), HUMCEA_PEA_{—}1_T25 (SEQ ID NO:812), HUMCEA_PEA_{—}1_T26 (SEQ ID NO:813), HUMCEA_PEA_{—}1_T29 (SEQ ID NO:814) and HUMCEA_PEA_{—}1_T30 (SEQ ID NO:815). Table 42 below describes the starting and ending position of this segment on each transcript.

TABLE 42
Segment location on transcripts

| | Segment | Segment |
|---|---|---|
| | starting | ending |
| Transcript name | position | position |
| HUMCEA_PEA_1_T8 (SEQ ID NO: 806) | 3166 | 3897 |
| HUMCEA_PEA_1_T12 (SEQ ID NO: 808) | 2739 | 3470 |
| HUMCEA_PEA_1_T14 (SEQ ID NO: 809) | 3486 | 4217 |
| HUMCEA_PEA_1_T16 (SEQ ID NO: 810) | 2232 | 2963 |
| HUMCEA_PEA_1_T25 (SEQ ID NO: 812) | 1698 | 2429 |
| HUMCEA_PEA_1_T26 (SEQ ID NO: 813) | 1698 | 2429 |
| HUMCEA_PEA_1_T29 (SEQ ID NO: 814) | 1141 | 1872 |
| HUMCEA_PEA_1_T30 (SEQ ID NO: 815) | 2394 | 3125 |

[2929] Segment cluster HUMCEA_PEA_{—}1_node_{—}67 (SEQ ID NO:830) according to the present invention is supported by 2 libraries. The number of libraries was determined as previously described. This segment can be found in the following transcript(s): HUMCEA_PEA_{—}1_T20 (SEQ ID NO:811). Table 43 below describes the starting and ending position of this segment on each transcript.

TABLE 43
Segment location on transcripts

| | Segment | Segment |
|---|---|---|
| Transcript name | starting position | ending position |
| HUMCEA_PEA_1_T20 | 1607 | 1886 |
| (SEQ ID NO: 811) | | |

[2930] According to an optional embodiment of the present invention, short segments related to the above cluster are also provided. These segments are up to about 120 bp in length, and so are included in a separate description.

[2931] Segment cluster HUMCEA_PEA_{—}1_node_{—}3 (SEQ ID NO:831) according to the present invention is supported by 67 libraries. The number of libraries was determined as previously described. This segment can be found in the following transcript(s): HUMCEA_PEA_{—}1_T8 (SEQ ID NO:806), HUMCEA_PEA_{—}1_T9 (SEQ ID NO:807), HUMCEA_PEA_{—}1_T12 (SEQ ID NO:808), HUMCEA_PEA_{—}1_T16 (SEQ ID NO:810), HUMCEA_PEA_{—}1_T20 (SEQ ID NO:811), HUMCEA_PEA_{—}1_T25 (SEQ ID NO:812) and HUMCEA_PEA_{—}1_T26 (SEQ ID NO:813). Table 44 below describes the starting and ending position of this segment on each transcript.

TABLE 44
Segment location on transcripts

| | Segment | Segment |
|---|---|---|
| | starting | ending |
| Transcript name | position | position |
| HUMCEA_PEA_1_T8 (SEQ ID NO: 806) | 457 | 538 |
| HUMCEA_PEA_1_T9 (SEQ ID NO: 807) | 457 | 538 |
| HUMCEA_PEA_1_T12 (SEQ ID NO: 808) | 457 | 538 |
| HUMCEA_PEA_1_T16 (SEQ ID NO: 810) | 457 | 538 |
| HUMCEA_PEA_1_T20 (SEQ ID NO: 811) | 457 | 538 |
| HUMCEA_PEA_1_T25 (SEQ ID NO: 812) | 457 | 538 |
| HUMCEA_PEA_1_T26 (SEQ ID NO: 813) | 457 | 538 |

[2932] Segment cluster HUMCEA_PEA_{—}1_node_{—}7 (SEQ ID NO:832) according to the present invention is supported by 73 libraries. The number of libraries was determined as previously described. This segment can be found in the following transcript(s): HUMCEA_PEA_{—}1_T8 (SEQ ID NO:806), HUMCEA_PEA_{—}1_T9 (SEQ ID NO:807), HUMCEA_PEA_{—}1_T12 (SEQ ID NO:808), HUMCEA_PEA_{—}1_T14 (SEQ ID NO:809), HUMCEA_PEA_{—}1_T16 (SEQ ID NO:810), HUMCEA_PEA_{—}1_T20 (SEQ ID NO:811) and HUMCEA_PEA_{—}1_T25 (SEQ ID NO:812). Table 45 below describes the starting and ending position of this segment on each transcript.

TABLE 45
Segment location on transcripts

| | Segment | Segment |
|---|---|---|
| | starting | ending |
| Transcript name | position | position |
| HUMCEA_PEA_1_T8 (SEQ ID NO: 806) | 539 | 642 |
| HUMCEA_PEA_1_T9 (SEQ ID NO: 807) | 539 | 642 |
| HUMCEA_PEA_1_T12 (SEQ ID NO: 808) | 539 | 642 |
| HUMCEA_PEA_1_T14 (SEQ ID NO: 809) | 1259 | 1362 |
| HUMCEA_PEA_1_T16 (SEQ ID NO: 810) | 539 | 642 |
| HUMCEA_PEA_1_T20 (SEQ ID NO: 811) | 539 | 642 |
| HUMCEA_PEA_1_T25 (SEQ ID NO: 812) | 539 | 642 |

[2933] Segment cluster HUMCEA_PEA_{—}1_node_{—}8 (SEQ ID NO:833) according to the present invention is supported by 67 libraries. The number of libraries was determined as previously described. This segment can be found in the following transcript(s): HUMCEA_PEA_{—}1_T8 (SEQ ID NO:806), HUMCEA_PEA_{—}1_T9 (SEQ ID NO:807), HUMCEA_PEA_{—}1_T12 (SEQ ID NO:808), HUMCEA_PEA_{—}1_T14 (SEQ ID NO:809), HUMCEA_PEA_{—}1_T16 (SEQ ID NO:810), HUMCEA_PEA_{—}1_T20 (SEQ ID NO:811) and HUMCEA_PEA_{—}1_T25 (SEQ ID NO:812). Table 46 below describes the starting and ending position of this segment on each transcript.

TABLE 46
Segment location on transcripts

| | Segment | Segment |
|---|---|---|
| | starting | ending |
| Transcript name | position | position |
| HUMCEA_PEA_1_T8 (SEQ ID NO: 806) | 643 | 690 |
| HUMCEA_PEA_1_T9 (SEQ ID NO: 807) | 643 | 690 |
| HUMCEA_PEA_1_T12 (SEQ ID NO: 808) | 643 | 690 |
| HUMCEA_PEA_1_T14 (SEQ ID NO: 809) | 1363 | 1410 |
| HUMCEA_PEA_1_T16 (SEQ ID NO: 810) | 643 | 690 |
| HUMCEA_PEA_1_T20 (SEQ ID NO: 811) | 643 | 690 |
| HUMCEA_PEA_1_T25 (SEQ ID NO: 812) | 643 | 690 |

[2934] Segment cluster HUMCEA_PEA_{—}1_node_{—}9 (SEQ ID NO:834) according to the present invention is supported by 71 libraries. The number of libraries was determined as previously described. This segment can be found in the following transcript(s): HUMCEA_PEA_{—}1_T8 (SEQ ID NO:806), HUMCEA_PEA_{—}1_T9 (SEQ ID NO:807), HUMCEA_PEA_{—}1_T12 (SEQ ID NO:808), HUMCEA_PEA_{—}1_T14 (SEQ ID NO:809), HUMCEA_PEA_{—}1_T16 (SEQ ID NO:810), HUMCEA_PEA_{—}1_T20 (SEQ ID NO:811) and HUMCEA_PEA_{—}1_T25 (SEQ ID NO:812). Table 47 below describes the starting and ending position of this segment on each transcript.

TABLE 47
Segment location on transcripts

| | Segment | Segment |
|---|---|---|
| | starting | ending |
| Transcript name | position | position |
| HUMCEA_PEA_1_T8 (SEQ ID NO: 806) | 691 | 738 |
| HUMCEA_PEA_1_T9 (SEQ ID NO: 807) | 691 | 738 |
| HUMCEA_PEA_1_T12 (SEQ ID NO: 808) | 691 | 738 |
| HUMCEA_PEA_1_T14 (SEQ ID NO: 809) | 1411 | 1458 |
| HUMCEA_PEA_1_T16 (SEQ ID NO: 810) | 691 | 738 |
| HUMCEA_PEA_1_T20 (SEQ ID NO: 811) | 691 | 738 |
| HUMCEA_PEA_1_T25 (SEQ ID NO: 812) | 691 | 738 |

[2935] Segment cluster HUMCEA_PEA_{—}1_node_{—}10 (SEQ ID NO:835) according to the present invention is supported by 67 libraries. The number of libraries was determined as previously described. This segment can be found in the following transcript(s): HUMCEA_PEA_{—}1_T8 (SEQ ID NO:806), HUMCEA_PEA_{—}1_T9 (SEQ ID NO:807), HUMCEA_PEA_{—}1_T12 (SEQ ID NO:808), HUMCEA_PEA_{—}1_T14 (SEQ ID NO:809), HUMCEA_PEA_{—}1_T16 (SEQ ID NO:810), HUMCEA_PEA_{—}1_T20 (SEQ ID NO:811) and HUMCEA_PEA_{—}1_T25 (SEQ ID NO:812). Table 48 below describes the starting and ending position of this segment on each transcript.

TABLE 48
Segment location on transcripts

| | Segment | Segment |
|---|---|---|
| | starting | ending |
| Transcript name | position | position |
| HUMCEA_PEA_1_T8 (SEQ ID NO: 806) | 739 | 817 |
| HUMCEA_PEA_1_T9 (SEQ ID NO: 807) | 739 | 817 |
| HUMCEA_PEA_1_T12 (SEQ ID NO: 808) | 739 | 817 |
| HUMCEA_PEA_1_T14 (SEQ ID NO: 809) | 1459 | 1537 |
| HUMCEA_PEA_1_T16 (SEQ ID NO: 810) | 739 | 817 |
| HUMCEA_PEA_1_T20 (SEQ ID NO: 811) | 739 | 817 |
| HUMCEA_PEA_1_T25 (SEQ ID NO: 812) | 739 | 817 |

[2936] Segment cluster HUMCEA_PEA_{—}1_node_{—}15 (SEQ ID NO:836) according to the present invention can be found in the following transcript(s): HUMCEA_PEA_{—}1_T8 (SEQ ID NO:806), HUMCEA_PEA_{—}1_T9 (SEQ ID NO:807), HUMCEA_PEA_{—}1_T12 (SEQ ID NO:808), HUMCEA_PEA_{—}1_T14 (SEQ ID NO:809) and HUMCEA_PEA_{—}1_T20 (SEQ ID NO:811). Table 49 below describes the starting and ending position of this segment on each transcript.

TABLE 49
Segment location on transcripts

| | Segment | Segment |
|---|---|---|
| | starting | ending |
| Transcript name | position | position |
| HUMCEA_PEA_1_T8 (SEQ ID NO: 806) | 1473 | 1475 |
| HUMCEA_PEA_1_T9 (SEQ ID NO: 807) | 1073 | 1075 |
| HUMCEA_PEA_1_T12 (SEQ ID NO: 808) | 1073 | 1075 |
| HUMCEA_PEA_1_T14 (SEQ ID NO: 809) | 1793 | 1795 |
| HUMCEA_PEA_1_T20 (SEQ ID NO: 811) | 1073 | 1075 |

[2937] Segment cluster HUMCEA_PEA_{—}1_node_{—}16 (SEQ ID NO:837) according to the present invention can be found in the following transcript(s): HUMCEA_PEA_{—}1_T8 (SEQ ID NO:806), HUMCEA_PEA_{—}1_T9 (SEQ ID NO:807), HUMCEA_PEA_{—}1_T12 (SEQ ID NO:808), HUMCEA_PEA_{—}1_T14 (SEQ ID NO:809) and HUMCEA_PEA_{—}1_T20 (SEQ ID NO:811). Table 50 below describes the starting and ending position of this segment on each transcript.

TABLE 50
Segment location on transcripts

| | Segment | Segment |
|---|---|---|
| | starting | ending |
| Transcript name | position | position |
| HUMCEA_PEA_1_T8 (SEQ ID NO: 806) | 1476 | 1481 |
| HUMCEA_PEA_1_T9 (SEQ ID NO: 807) | 1076 | 1081 |
| HUMCEA_PEA_1_T12 (SEQ ID NO: 808) | 1076 | 1081 |
| HUMCEA_PEA_1_T14 (SEQ ID NO: 809) | 1796 | 1801 |
| HUMCEA_PEA_1_T20 (SEQ ID NO: 811) | 1076 | 1081 |

[2938] Segment cluster HUMCEA_PEA_{—}1_node_{—}17 (SEQ ID NO:838) according to the present invention can be found in the following transcript(s): HUMCEA_PEA_{—}1_T8 (SEQ ID NO:806), HUMCEA_PEA_{—}1_T9 (SEQ ID NO:807), HUMCEA_PEA_{—}1_T12 (SEQ ID NO:808), HUMCEA_PEA_{—}1_T14 (SEQ ID NO:809) and HUMCEA_PEA_{—}1_T20 (SEQ ID NO:811). Table 51 below describes the starting and ending position of this segment on each transcript.

TABLE 51
Segment location on transcripts

| | Segment | Segment |
|---|---|---|
| | starting | ending |
| Transcript name | position | position |
| HUMCEA_PEA_1_T8 (SEQ ID NO: 806) | 1482 | 1488 |
| HUMCEA_PEA_1_T9 (SEQ ID NO: 807) | 1082 | 1088 |
| HUMCEA_PEA_1_T12 (SEQ ID NO: 808) | 1082 | 1088 |
| HUMCEA_PEA_1_T14 (SEQ ID NO: 809) | 1802 | 1808 |
| HUMCEA_PEA_1_T20 (SEQ ID NO: 811) | 1082 | 1088 |

[2939] Segment cluster HUMCEA_PEA_{—}1_node_{—}18 (SEQ ID NO:839) according to the present invention can be found in the following transcript(s): HUMCEA_PEA_{—}1_T8 (SEQ ID NO:806), HUMCEA_PEA_{—}1_T9 (SEQ ID NO:807), HUMCEA_PEA_{—}1_T12 (SEQ ID NO:808), HUMCEA_PEA_{—}1_T14 (SEQ ID NO:809) and HUMCEA_PEA_{—}1_T20 (SEQ ID NO:811). Table 52 below describes the starting and ending position of this segment on each transcript.

TABLE 52
Segment location on transcripts

| | Segment | Segment |
|---|---|---|
| | starting | ending |
| Transcript name | position | position |
| HUMCEA_PEA_1_T8 (SEQ ID NO: 806) | 1489 | 1506 |
| HUMCEA_PEA_1_T9 (SEQ ID NO: 807) | 1089 | 1106 |
| HUMCEA_PEA_1_T12 (SEQ ID NO: 808) | 1089 | 1106 |
| HUMCEA_PEA_1_T14 (SEQ ID NO: 809) | 1809 | 1826 |
| HUMCEA_PEA_1_T20 (SEQ ID NO: 811) | 1089 | 1106 |

[2940] Segment cluster HUMCEA_PEA_{—}1_node_{—}19 (SEQ ID NO:840) according to the present invention is supported by 69 libraries. The number of libraries was determined as previously described. This segment can be found in the following transcript(s): HUMCEA_PEA_{—}1_T8 (SEQ ID NO:806), HUMCEA_PEA_{—}1_T9 (SEQ ID NO:807), HUMCEA_PEA_{—}1_T12 (SEQ ID NO:808), HUMCEA_PEA_{—}1_T14 (SEQ ID NO:809) and HUMCEA_PEA_{—}1_T20 (SEQ ID NO:811). Table 53 below describes the starting and ending position of this segment on each transcript.

TABLE 53
Segment location on transcripts

| | Segment | Segment |
|---|---|---|
| | starting | ending |
| Transcript name | position | position |
| HUMCEA_PEA_1_T8 (SEQ ID NO: 806) | 1507 | 1576 |
| HUMCEA_PEA_1_T9 (SEQ ID NO: 807) | 1107 | 1176 |
| HUMCEA_PEA_1_T12 (SEQ ID NO: 808) | 1107 | 1176 |
| HUMCEA_PEA_1_T14 (SEQ ID NO: 809) | 1827 | 1896 |
| HUMCEA_PEA_1_T20 (SEQ ID NO: 811) | 1107 | 1176 |

[2941] Segment cluster HUMCEA_PEA_{—}1_node_{—}20 (SEQ ID NO:841) according to the present invention can be found in the following transcript(s): HUMCEA_PEA_{—}1_T8 (SEQ ID NO:806), HUMCEA_PEA_{—}1_T9 (SEQ ID NO:807), HUMCEA_PEA_{—}1_T12 (SEQ ID NO:808), HUMCEA_PEA_{—}1_T14 (SEQ ID NO:809) and HUMCEA_PEA_{—}1_T20 (SEQ ID NO:811). Table 54 below describes the starting and ending position of this segment on each transcript.

TABLE 54
Segment location on transcripts

| | Segment | Segment |
|---|---|---|
| | starting | ending |
| Transcript name | position | position |
| HUMCEA_PEA_1_T8 (SEQ ID NO: 806) | 1577 | 1600 |
| HUMCEA_PEA_1_T9 (SEQ ID NO: 807) | 1177 | 1200 |
| HUMCEA_PEA_1_T12 (SEQ ID NO: 808) | 1177 | 1200 |
| HUMCEA_PEA_1_T14 (SEQ ID NO: 809) | 1897 | 1920 |
| HUMCEA_PEA_1_T20 (SEQ ID NO: 811) | 1177 | 1200 |

[2942] Segment cluster HUMCEA_PEA_{—}1_node_{—}21 (SEQ ID NO:842) according to the present invention can be found in the following transcript(s): HUMCEA_PEA_{—}1_T8 (SEQ ID NO:806), HUMCEA_PEA_{—}1_T9 (SEQ ID NO:807), HUMCEA_PEA_{—}1_T12 (SEQ ID NO:808), HUMCEA_PEA_{—}1_T14 (SEQ ID NO:809) and HUMCEA_PEA_{—}1_T20 (SEQ ID NO:811). Table 55 below describes the starting and ending position of this segment on each transcript.

TABLE 55
Segment location on transcripts

| | Segment | Segment |
|---|---|---|
| | starting | ending |
| Transcript name | position | position |
| HUMCEA_PEA_1_T8 (SEQ ID NO: 806) | 1601 | 1624 |
| HUMCEA_PEA_1_T9 (SEQ ID NO: 807) | 1201 | 1224 |
| HUMCEA_PEA_1_T12 (SEQ ID NO: 808) | 1201 | 1224 |
| HUMCEA_PEA_1_T14 (SEQ ID NO: 809) | 1921 | 1944 |
| HUMCEA_PEA_1_T20 (SEQ ID NO: 811) | 1201 | 1224 |

[2943] Segment cluster HUMCEA_PEA_{—}1_node_{—}22 (SEQ ID NO:843) according to the present invention is supported by 77 libraries. The number of libraries was determined as previously described. This segment can be found in the following transcript(s): HUMCEA_PEA_{—}1_T8 (SEQ ID NO:806), HUMCEA_PEA_{—}1_T9 (SEQ ID NO:807), HUMCEA_PEA_{—}1_T12 (SEQ ID NO:808), HUMCEA_PEA_{—}1_T14 (SEQ ID NO:809) and HUMCEA_PEA_{—}1_T20 (SEQ ID NO:811). Table 56 below describes the starting and ending position of this segment on each transcript.

TABLE 56
Segment location on transcripts

| | Segment | Segment |
|---|---|---|
| | starting | ending |
| Transcript name | position | position |
| HUMCEA_PEA_1_T8 (SEQ ID NO: 806) | 1625 | 1702 |
| HUMCEA_PEA_1_T9 (SEQ ID NO: 807) | 1225 | 1302 |
| HUMCEA_PEA_1_T12 (SEQ ID NO: 808) | 1225 | 1302 |
| HUMCEA_PEA_1_T14 (SEQ ID NO: 809) | 1945 | 2022 |
| HUMCEA_PEA_1_T20 (SEQ ID NO: 811) | 1225 | 1302 |

[2944] Segment cluster HUMCEA_PEA_{—}1_node_{—}23 (SEQ ID NO:844) according to the present invention is supported by 72 libraries. The number of libraries was determined as previously described. This segment can be found in the following transcript(s): HUMCEA_PEA_{—}1_T8 (SEQ ID NO:806), HUMCEA_PEA_{—}1_T9 (SEQ ID NO:807), HUMCEA_PEA_{—}1_T12 (SEQ ID NO:808), HUMCEA_PEA_{—}1_T14 (SEQ ID NO:809) and HUMCEA_PEA_{—}1_T20 (SEQ ID NO:811). Table 57 below describes the starting and ending position of this segment on each transcript.

TABLE 57
Segment location on transcripts

| | Segment | Segment |
|---|---|---|
| | starting | ending |
| Transcript name | position | position |
| HUMCEA_PEA_1_T8 (SEQ ID NO: 806) | 1703 | 1732 |
| HUMCEA_PEA_1_T9 (SEQ ID NO: 807) | 1303 | 1332 |
| HUMCEA_PEA_1_T12 (SEQ ID NO: 808) | 1303 | 1332 |
| HUMCEA_PEA_1_T14 (SEQ ID NO: 809) | 2023 | 2052 |
| HUMCEA_PEA_1_T20 (SEQ ID NO: 811) | 1303 | 1332 |

[2945] Segment cluster HUMCEA_PEA_{—}1_node_{—}24 (SEQ ID NO:845) according to the present invention can be found in the following transcript(s): HUMCEA_PEA_{—}1_T8 (SEQ ID NO:806), HUMCEA_PEA_{—}1_T9 (SEQ ID NO:807), HUMCEA_PEA_{—}1_T12 (SEQ ID NO:808), HUMCEA_PEA_{—}1_T14 (SEQ ID NO:809) and HUMCEA_PEA_{—}1_T20 (SEQ ID NO:811). Table 58 below describes the starting and ending position of this segment on each transcript.

TABLE 58
Segment location on transcripts

| | Segment | Segment |
|---|---|---|
| | starting | ending |
| Transcript name | position | position |
| HUMCEA_PEA_1_T8 (SEQ ID NO: 806) | 1733 | 1751 |
| HUMCEA_PEA_1_T9 (SEQ ID NO: 807) | 1333 | 1351 |
| HUMCEA_PEA_1_T12 (SEQ ID NO: 808) | 1333 | 1351 |
| HUMCEA_PEA_1_T14 (SEQ ID NO: 809) | 2053 | 2071 |
| HUMCEA_PEA_1_T20 (SEQ ID NO: 811) | 1333 | 1351 |

[2946] Segment cluster HUMCEA_PEA_{—}1_node_{—}27 (SEQ ID NO:846) according to the present invention can be found in the following transcript(s): HUMCEA_PEA_{—}1_T8 (SEQ ID NO:806), HUMCEA_PEA_{—}1_T9 (SEQ ID NO:807), HUMCEA_PEA_{—}1_T12 (SEQ ID NO:808), HUMCEA_PEA_{—}1_T14 (SEQ ID NO:809), HUMCEA_PEA_{—}1_T16 (SEQ ID NO:810) and HUMCEA_PEA_{—}1_T20 (SEQ ID NO:811). Table 59 below describes the starting and ending position of this segment on each transcript.

TABLE 59
Segment location on transcripts

| | Segment | Segment |
|---|---|---|
| | starting | ending |
| Transcript name | position | position |
| HUMCEA_PEA_1_T8 (SEQ ID NO: 806) | 1752 | 1770 |
| HUMCEA_PEA_1_T9 (SEQ ID NO: 807) | 1352 | 1370 |
| HUMCEA_PEA_1_T12 (SEQ ID NO: 808) | 1352 | 1370 |
| HUMCEA_PEA_1_T14 (SEQ ID NO: 809) | 2072 | 2090 |
| HUMCEA_PEA_1_T16 (SEQ ID NO: 810) | 818 | 836 |
| HUMCEA_PEA_1_T20 (SEQ ID NO: 811) | 1352 | 1370 |

[2947] Segment cluster HUMCEA_PEA_{—}1_node_{—}29 (SEQ ID NO:847) according to the present invention can be found in the following transcript(s): HUMCEA_PEA_{—}1_T8 (SEQ ID NO:806), HUMCEA_PEA_{—}1_T9 (SEQ ID NO:807), HUMCEA_PEA_{—}1_T12 (SEQ ID NO:808), HUMCEA_PEA_{—}1_T14 (SEQ ID NO:809), HUMCEA_PEA_{—}1_T16 (SEQ ID NO:810) and HUMCEA_PEA_{—}1_T20 (SEQ ID NO:811). Table 60 below describes the starting and ending position of this segment on each transcript.

TABLE 60
Segment location on transcripts

| | Segment | Segment |
|---|---|---|
| | starting | ending |
| Transcript name | position | position |
| HUMCEA_PEA_1_T8 (SEQ ID NO: 806) | 1771 | 1788 |
| HUMCEA_PEA_1_T9 (SEQ ID NO: 807) | 1371 | 1388 |
| HUMCEA_PEA_1_T12 (SEQ ID NO: 808) | 1371 | 1388 |
| HUMCEA_PEA_1_T14 (SEQ ID NO: 809) | 2091 | 2108 |
| HUMCEA_PEA_1_T16 (SEQ ID NO: 810) | 837 | 854 |
| HUMCEA_PEA_1_T20 (SEQ ID NO: 811) | 1371 | 1388 |

[2948] Segment cluster HUMCEA_PEA_{—}1_node_{—}30 (SEQ ID NO:848) according to the present invention is supported by 67 libraries. The number of libraries was determined as previously described. This segment can be found in the following transcript(s): HUMCEA_PEA_{—}1_T8 (SEQ ID NO:806), HUMCEA_PEA_{—}1_T9 (SEQ ID NO:807), HUMCEA_PEA_{—}1_T12 (SEQ ID NO:808), HUMCEA_PEA_{—}1_T14 (SEQ ID NO:809), HUMCEA_PEA_{—}1_T16 (SEQ ID NO:810) and HUMCEA_PEA_{—}1_T20 (SEQ ID NO:811). Table 61 below describes the starting and ending position of this segment on each transcript.

TABLE 61
Segment location on transcripts

| | Segment | Segment |
|---|---|---|
| | starting | ending |
| Transcript name | position | position |
| HUMCEA_PEA_1_T8 (SEQ ID NO: 806) | 1789 | 1816 |
| HUMCEA_PEA_1_T9 (SEQ ID NO: 807) | 1389 | 1416 |
| HUMCEA_PEA_1_T12 (SEQ ID NO: 808) | 1389 | 1416 |
| HUMCEA_PEA_1_T14 (SEQ ID NO: 809) | 2109 | 2136 |
| HUMCEA_PEA_1_T16 (SEQ ID NO: 810) | 855 | 882 |
| HUMCEA_PEA_1_T20 (SEQ ID NO: 811) | 1389 | 1416 |

[2949] Segment cluster HUMCEA_PEA_{—}1_node_{—}33 (SEQ ID NO:849) according to the present invention can be found in the following transcript(s): HUMCEA_PEA_{—}1_T8 (SEQ ID NO:806), HUMCEA_PEA_{—}1_T9 (SEQ ID NO:807), HUMCEA_PEA_{—}1_T12 (SEQ ID NO:808), HUMCEA_PEA_{—}1_T14 (SEQ ID NO:809), HUMCEA_PEA_{—}1_T16 (SEQ ID NO:810) and HUMCEA_PEA_{—}1_T26 (SEQ ID NO:813). Table 62 below describes the starting and ending position of this segment on each transcript.

TABLE 62
Segment location on transcripts

| | Segment | Segment |
|---|---|---|
| | starting | ending |
| Transcript name | position | position |
| HUMCEA_PEA_1_T8 (SEQ ID NO: 806) | 2007 | 2028 |
| HUMCEA_PEA_1_T9 (SEQ ID NO: 807) | 1607 | 1628 |
| HUMCEA_PEA_1_T12 (SEQ ID NO: 808) | 1607 | 1628 |
| HUMCEA_PEA_1_T14 (SEQ ID NO: 809) | 2327 | 2348 |
| HUMCEA_PEA_1_T16 (SEQ ID NO: 810) | 1073 | 1094 |
| HUMCEA_PEA_1_T26 (SEQ ID NO: 813) | 539 | 560 |

[2950] Segment cluster HUMCEA_PEA_{—}1_node_{—}34 (SEQ ID NO:850) according to the present invention is supported by 80 libraries. The number of libraries was determined as previously described. This segment can be found in the following transcript(s): HUMCEA_PEA_{—}1_T8 (SEQ ID NO:806), HUMCEA_PEA_{—}1_T9 (SEQ ID NO:807), HUMCEA_PEA_{—}1_T12 (SEQ ID NO:808), HUMCEA_PEA_{—}1_T14 (SEQ ID NO:809), HUMCEA_PEA_{—}1_T16 (SEQ ID NO:810) and HUMCEA_PEA_{—}1_T26 (SEQ ID NO:813). Table 63 below describes the starting and ending position of this segment on each transcript.

TABLE 63
Segment location on transcripts

| | Segment | Segment |
|---|---|---|
| | starting | ending |
| Transcript name | position | position |
| HUMCEA_PEA_1_T8 (SEQ ID NO: 806) | 2029 | 2110 |
| HUMCEA_PEA_1_T9 (SEQ ID NO: 807) | 1629 | 1710 |
| HUMCEA_PEA_1_T12 (SEQ ID NO: 808) | 1629 | 1710 |
| HUMCEA_PEA_1_T14 (SEQ ID NO: 809) | 2349 | 2430 |
| HUMCEA_PEA_1_T16 (SEQ ID NO: 810) | 1095 | 1176 |
| HUMCEA_PEA_1_T26 (SEQ ID NO: 813) | 561 | 642 |

[2951] Segment cluster HUMCEA_PEA_{—}1_node_{—}35 (SEQ ID NO:851) according to the present invention is supported by 75 libraries. The number of libraries was determined as previously described. This segment can be found in the following transcript(s): HUMCEA_PEA_{—}1_T8 (SEQ ID NO:806), HUMCEA_PEA_{—}1_T9 (SEQ ID NO:807), HUMCEA_PEA_{—}1_T12 (SEQ ID NO:808), HUMCEA_PEA_{—}1_T14 (SEQ ID NO:809), HUMCEA_PEA_{—}1_T16 (SEQ ID NO:810) and HUMCEA_PEA_{—}1_T26 (SEQ ID NO:813). Table 64 below describes the starting and ending position of this segment on each transcript.

TABLE 64
Segment location on transcripts

| | Segment | Segment |
|---|---|---|
| | starting | ending |
| Transcript name | position | position |
| HUMCEA_PEA_1_T8 (SEQ ID NO: 806) | 2111 | 2158 |
| HUMCEA_PEA_1_T9 (SEQ ID NO: 807) | 1711 | 1758 |
| HUMCEA_PEA_1_T12 (SEQ ID NO: 808) | 1711 | 1758 |
| HUMCEA_PEA_1_T14 (SEQ ID NO: 809) | 2431 | 2478 |
| HUMCEA_PEA_1_T16 (SEQ ID NO: 810) | 1177 | 1224 |
| HUMCEA_PEA_1_T26 (SEQ ID NO: 813) | 643 | 690 |

[2952] Segment cluster HUMCEA_PEA_{—}1_node_{—}45 (SEQ ID NO:852) according to the present invention is supported by 9 libraries. The number of libraries was determined as previously described. This segment can be found in the following transcript(s): HUMCEA_PEA_{—}1_T9 (SEQ ID NO:807). Table 65 below describes the starting and ending position of this segment on each transcript.

TABLE 65
Segment location on transcripts

| | Segment | Segment |
|---|---|---|
| | starting | ending |
| Transcript name | position | position |
| HUMCEA_PEA_1_T9 (SEQ ID NO: 807) | 2141 | 2173 |

[2953] Segment cluster HUMCEA_PEA_{—}1_node_{—}49 (SEQ ID NO:853) according to the present invention can be found in the following transcript(s): HUMCEA_PEA_{—}1_T30 (SEQ ID NO:815). Table 66 below describes the starting and ending position of this segment on each transcript.

TABLE 66
Segment location on transcripts

| | Segment | Segment |
|---|---|---|
| | starting | ending |
| Transcript name | position | position |
| HUMCEA_PEA_1_T30 (SEQ ID NO: 815) | 1763 | 1768 |

[2954] Segment cluster HUMCEA_PEA_{—}1_node_{—}50 (SEQ ID NO:854) according to the present invention is supported by 64 libraries. The number of libraries was determined as previously described. This segment can be found in the following transcript(s): HUMCEA_PEA_{—}1_T8 (SEQ ID NO:806), HUMCEA_PEA_{—}1_T14 (SEQ ID NO:809), HUMCEA_PEA_{—}1_T16 (SEQ ID NO:810), HUMCEA_PEA_{—}1_T25 (SEQ ID NO:812), HUMCEA_PEA_{—}1_T26 (SEQ ID NO:813), HUMCEA_PEA_{—}1_T29 (SEQ ID NO:814) and HUMCEA_PEA_{—}1_T30 (SEQ ID NO:815). Table 67 below describes the starting and ending position of this segment on each transcript.

TABLE 67
Segment location on transcripts

| | Segment | Segment |
|---|---|---|
| | starting | ending |
| Transcript name | position | position |
| HUMCEA_PEA_1_T8 (SEQ ID NO: 806) | 2541 | 2567 |
| HUMCEA_PEA_1_T14 (SEQ ID NO: 809) | 2861 | 2887 |
| HUMCEA_PEA_1_T16 (SEQ ID NO: 810) | 1607 | 1633 |
| HUMCEA_PEA_1_T25 (SEQ ID NO: 812) | 1073 | 1099 |
| HUMCEA_PEA_1_T26 (SEQ ID NO: 813) | 1073 | 1099 |
| HUMCEA_PEA_1_T29 (SEQ ID NO: 814) | 516 | 542 |
| HUMCEA_PEA_1_T30 (SEQ ID NO: 815) | 1769 | 1795 |

[2955] Segment cluster HUMCEA_PEA_{—}1_node_{—}51 (SEQ ID NO:855) according to the present invention is supported by 88 libraries. The number of libraries was determined as previously described. This segment can be found in the following transcript(s): HUMCEA_PEA_{—}1_T8 (SEQ ID NO:806), HUMCEA_PEA_{—}1_T12 (SEQ ID NO:808), HUMCEA_PEA_{—}1_T14 (SEQ ID NO:809), HUMCEA_PEA_{—}1_T16 (SEQ ID NO:810), HUMCEA_PEA_{—}1_T25 (SEQ ID NO:812), HUMCEA_PEA_{—}1_T26 (SEQ ID NO:813), HUMCEA_PEA_{—}1_T29 (SEQ ID NO:814) and HUMCEA_PEA_{—}1_T30 (SEQ ID NO:815). Table 68 below describes the starting and ending position of this segment on each transcript.

TABLE 68
Segment location on transcripts

| | Segment | Segment |
|---|---|---|
| | starting | ending |
| Transcript name | position | position |
| HUMCEA_PEA_1_T8 (SEQ ID NO: 806) | 2568 | 2659 |
| HUMCEA_PEA_1_T12 (SEQ ID NO: 808) | 2141 | 2232 |
| HUMCEA_PEA_1_T14 (SEQ ID NO: 809) | 2888 | 2979 |
| HUMCEA_PEA_1_T16 (SEQ ID NO: 810) | 1634 | 1725 |
| HUMCEA_PEA_1_T25 (SEQ ID NO: 812) | 1100 | 1191 |
| HUMCEA_PEA_1_T26 (SEQ ID NO: 813) | 1100 | 1191 |
| HUMCEA_PEA_1_T29 (SEQ ID NO: 814) | 543 | 634 |
| HUMCEA_PEA_1_T30 (SEQ ID NO: 815) | 1796 | 1887 |

[2956] Segment cluster HUMCEA_PEA_{—}1_node_{—}56 (SEQ ID NO:856) according to the present invention is supported by 75 libraries. The number of libraries was determined as previously described. This segment can be found in the following transcript(s): HUMCEA_PEA_{—}1_T8 (SEQ ID NO:806), HUMCEA_PEA_{—}1_T12 (SEQ ID NO:808), HUMCEA_PEA_{—}1_T14 (SEQ ID NO:809), HUMCEA_PEA_{—}1_T16 (SEQ ID NO:810), HUMCEA_PEA_{—}1_T25 (SEQ ID NO:812), HUMCEA_PEA_{—}1_T26 (SEQ ID NO:813), HUMCEA_PEA_{—}1_T29 (SEQ ID NO:814) and HUMCEA_PEA_{—}1_T30 (SEQ ID NO:815). Table 69 below describes the starting and ending position of this segment on each transcript.

TABLE 69
Segment location on transcripts

| | Segment | Segment |
|---|---|---|
| | starting | ending |
| Transcript name | position | position |
| HUMCEA_PEA_1_T8 (SEQ ID NO: 806) | 2660 | 2685 |
| HUMCEA_PEA_1_T12 (SEQ ID NO: 808) | 2233 | 2258 |
| HUMCEA_PEA_1_T14 (SEQ ID NO: 809) | 2980 | 3005 |
| HUMCEA_PEA_1_T16 (SEQ ID NO: 810) | 1726 | 1751 |
| HUMCEA_PEA_1_T25 (SEQ ID NO: 812) | 1192 | 1217 |
| HUMCEA_PEA_1_T26 (SEQ ID NO: 813) | 1192 | 1217 |
| HUMCEA_PEA_1_T29 (SEQ ID NO: 814) | 635 | 660 |
| HUMCEA_PEA_1_T30 (SEQ ID NO: 815) | 1888 | 1913 |

[2957] Segment cluster HUMCEA_PEA_{—}1_node_{—}57 (SEQ ID NO:857) according to the present invention is supported by 82 libraries. The number of libraries was determined as previously described. This segment can be found in the following transcript(s): HUMCEA_PEA_{—}1_T8 (SEQ ID NO:806), HUMCEA_PEA_{—}1_T12 (SEQ ID NO:808), HUMCEA_PEA_{—}1_T14 (SEQ ID NO:809), HUMCEA_PEA_{—}1_T16 (SEQ ID NO:810), HUMCEA_PEA_{—}1_T25 (SEQ ID NO:812), HUMCEA_PEA_{—}1_T26 (SEQ ID NO:813), HUMCEA_PEA_{—}1_T29 (SEQ ID NO:814) and HUMCEA_PEA_{—}1_T30 (SEQ ID NO:815). Table 70 below describes the starting and ending position of this segment on each transcript.

TABLE 70
Segment location on transcripts

| | Segment | Segment |
|---|---|---|
| | starting | ending |
| Transcript name | position | position |
| HUMCEA_PEA_1_T8 (SEQ ID NO: 806) | 2686 | 2786 |
| HUMCEA_PEA_1_T12 (SEQ ID NO: 808) | 2259 | 2359 |
| HUMCEA_PEA_1_T14 (SEQ ID NO: 809) | 3006 | 3106 |
| HUMCEA_PEA_1_T16 (SEQ ID NO: 810) | 1752 | 1852 |
| HUMCEA_PEA_1_T25 (SEQ ID NO: 812) | 1218 | 1318 |
| HUMCEA_PEA_1_T26 (SEQ ID NO: 813) | 1218 | 1318 |
| HUMCEA_PEA_1_T29 (SEQ ID NO: 814) | 661 | 761 |
| HUMCEA_PEA_1_T30 (SEQ ID NO: 815) | 1914 | 2014 |

[2958] Segment cluster HUMCEA_PEA_{—}1_node_{—}58 (SEQ ID NO:858) according to the present invention is supported by 63 libraries. The number of libraries was determined as previously described. This segment can be found in the following transcript(s): HUMCEA_PEA_{—}1_T8 (SEQ ID NO:806), HUMCEA_PEA_{—}1_T12 (SEQ ID NO:808), HUMCEA_PEA_{—}1_T14 (SEQ ID NO:809), HUMCEA_PEA_{—}1_T16 (SEQ ID NO:810), HUMCEA_PEA_{—}1_T25 (SEQ ID NO:812), HUMCEA_PEA_{—}1_T26 (SEQ ID NO:813), HUMCEA_PEA_{—}1_T29 (SEQ ID NO:814) and HUMCEA_PEA_{—}1_T30 (SEQ ID NO:815). Table 71 below describes the starting and ending position of this segment on each transcript.

TABLE 71
Segment location on transcripts

| | Segment | Segment |
|---|---|---|
| | starting | ending |
| Transcript name | position | position |
| HUMCEA_PEA_1_T8 (SEQ ID NO: 806) | 2787 | 2820 |
| HUMCEA_PEA_1_T12 (SEQ ID NO: 808) | 2360 | 2393 |
| HUMCEA_PEA_1_T14 (SEQ ID NO: 809) | 3107 | 3140 |
| HUMCEA_PEA_1_T16 (SEQ ID NO: 810) | 1853 | 1886 |
| HUMCEA_PEA_1_T25 (SEQ ID NO: 812) | 1319 | 1352 |
| HUMCEA_PEA_1_T26 (SEQ ID NO: 813) | 1319 | 1352 |
| HUMCEA_PEA_1_T29 (SEQ ID NO: 814) | 762 | 795 |
| HUMCEA_PEA_1_T30 (SEQ ID NO: 815) | 2015 | 2048 |

[2959] Segment cluster HUMCEA_PEA_{—}1_node_{—}60 (SEQ ID NO:859) according to the present invention is supported by 55 libraries. The number of libraries was determined as previously described. This segment can be found in the following transcript(s): HUMCEA_PEA_{—}1_T8 (SEQ ID NO:806), HUMCEA_PEA_{—}1_T12 (SEQ ID NO:808), HUMCEA_PEA_{—}1_T14 (SEQ ID NO:809), HUMCEA_PEA_{—}1_T16 (SEQ ID NO:810), HUMCEA_PEA_{—}1_T25 (SEQ ID NO:812), HUMCEA_PEA_{—}1_T26 (SEQ ID NO:813), HUMCEA_PEA_{—}1_T29 (SEQ ID NO:814) and HUMCEA_PEA_{—}1_T30 (SEQ ID NO:815). Table 72 below describes the starting and ending position of this segment on each transcript.

TABLE 72
Segment location on transcripts

| | Segment | Segment |
|---|---|---|
| | starting | ending |
| Transcript name | position | position |
| HUMCEA_PEA_1_T8 (SEQ ID NO: 806) | 2821 | 2864 |
| HUMCEA_PEA_1_T12 (SEQ ID NO: 808) | 2394 | 2437 |
| HUMCEA_PEA_1_T14 (SEQ ID NO: 809) | 3141 | 3184 |
| HUMCEA_PEA_1_T16 (SEQ ID NO: 810) | 1887 | 1930 |
| HUMCEA_PEA_1_T25 (SEQ ID NO: 812) | 1353 | 1396 |
| HUMCEA_PEA_1_T26 (SEQ ID NO: 813) | 1353 | 1396 |
| HUMCEA_PEA_1_T29 (SEQ ID NO: 814) | 796 | 839 |
| HUMCEA_PEA_1_T30 (SEQ ID NO: 815) | 2049 | 2092 |

[2960] Segment cluster HUMCEA_PEA_{—}1_node_{—}61 (SEQ ID NO:860) according to the present invention can be found in the following transcript(s): HUMCEA_PEA_{—}1_T8 (SEQ ID NO:806), HUMCEA_PEA_{—}1_T12 (SEQ ID NO:808), HUMCEA_PEA_{—}1_T14 (SEQ ID NO:809), HUMCEA_PEA_{—}1_T16 (SEQ ID NO:810), HUMCEA_PEA_{—}1_T25 (SEQ ID NO:812), HUMCEA_PEA_{—}1_T26 (SEQ ID NO:813), HUMCEA_PEA_{—}1_T29 (SEQ ID NO:814) and HUMCEA_PEA_{—}1_T30 (SEQ ID NO:815). Table 73 below describes the starting and ending position of this segment on each transcript.

TABLE 73
Segment location on transcripts

| | Segment | Segment |
|---|---|---|
| | starting | ending |
| Transcript name | position | position |
| HUMCEA_PEA_1_T8 (SEQ ID NO: 806) | 2865 | 2868 |
| HUMCEA_PEA_1_T12 (SEQ ID NO: 808) | 2438 | 2441 |
| HUMCEA_PEA_1_T14 (SEQ ID NO: 809) | 3185 | 3188 |
| HUMCEA_PEA_1_T16 (SEQ ID NO: 810) | 1931 | 1934 |
| HUMCEA_PEA_1_T25 (SEQ ID NO: 812) | 1397 | 1400 |
| HUMCEA_PEA_1_T26 (SEQ ID NO: 813) | 1397 | 1400 |
| HUMCEA_PEA_1_T29 (SEQ ID NO: 814) | 840 | 843 |
| HUMCEA_PEA_1_T30 (SEQ ID NO: 815) | 2093 | 2096 |

[2961] Segment cluster HUMCEA_PEA_{—}1_node_{—}62 (SEQ ID NO:861) according to the present invention is supported by 60 libraries. The number of libraries was determined as previously described. This segment can be found in the following transcript(s): HUMCEA_PEA_{—}1_T8 (SEQ ID NO:806), HUMCEA_PEA_{—}1_T12 (SEQ ID NO:808), HUMCEA_PEA_{—}1_T14 (SEQ ID NO:809), HUMCEA_PEA_{—}1_T16 (SEQ ID NO:810), HUMCEA_PEA_{—}1_T25 (SEQ ID NO:812), HUMCEA_PEA_{—}1_T26 (SEQ ID NO:813), HUMCEA_PEA_{—}1_T29 (SEQ ID NO:814) and HUMCEA_PEA_{—}1_T30 (SEQ ID NO:815). Table 74 below describes the starting and ending position of this segment on each transcript.

TABLE 74
Segment location on transcripts

| | Segment | Segment |
|---|---|---|
| | starting | ending |
| Transcript name | position | position |
| HUMCEA_PEA_1_T8 (SEQ ID NO: 806) | 2869 | 2956 |
| HUMCEA_PEA_1_T12 (SEQ ID NO: 808) | 2442 | 2529 |
| HUMCEA_PEA_1_T14 (SEQ ID NO: 809) | 3189 | 3276 |
| HUMCEA_PEA_1_T16 (SEQ ID NO: 810) | 1935 | 2022 |
| HUMCEA_PEA_1_T25 (SEQ ID NO: 812) | 1401 | 1488 |
| HUMCEA_PEA_1_T26 (SEQ ID NO: 813) | 1401 | 1488 |
| HUMCEA_PEA_1_T29 (SEQ ID NO: 814) | 844 | 931 |
| HUMCEA_PEA_1_T30 (SEQ ID NO: 815) | 2097 | 2184 |

[2962] Segment cluster HUMCEA_PEA_{—}1_node_{—}64 (SEQ ID NO:862) according to the present invention is supported by 45 libraries. The number of libraries was determined as previously described. This segment can be found in the following transcript(s): HUMCEA_PEA_{—}1_T8 (SEQ ID NO:806), HUMCEA_PEA_{—}1_T12 (SEQ ID NO:808), HUMCEA_PEA_{—}1_T14 (SEQ ID NO:809), HUMCEA_PEA_{—}1_T16 (SEQ ID NO:810), HUMCEA_PEA_{—}1_T25 (SEQ ID NO:812), HUMCEA_PEA_{—}1_T26 (SEQ ID NO:813), HUMCEA_PEA_{—}1_T29 (SEQ ID NO:814) and HUMCEA_PEA_{—}1_T30 (SEQ ID NO:815). Table 75 below describes the starting and ending position of this segment on each transcript.

TABLE 75
Segment location on transcripts

| | Segment | Segment |
|---|---|---|
| | starting | ending |
| Transcript name | position | position |
| HUMCEA_PEA_1_T8 (SEQ ID NO: 806) | 3136 | 3165 |
| HUMCEA_PEA_1_T12 (SEQ ID NO: 808) | 2709 | 2738 |
| HUMCEA_PEA_1_T14 (SEQ ID NO: 809) | 3456 | 3485 |
| HUMCEA_PEA_1_T16 (SEQ ID NO: 810) | 2202 | 2231 |
| HUMCEA_PEA_1_T25 (SEQ ID NO: 812) | 1668 | 1697 |
| HUMCEA_PEA_1_T26 (SEQ ID NO: 813) | 1668 | 1697 |
| HUMCEA_PEA_1_T29 (SEQ ID NO: 814) | 1111 | 1140 |
| HUMCEA_PEA_1_T30 (SEQ ID NO: 815) | 2364 | 2393 |

### Variant Protein Alignment to the Previously Known Protein:

Sequence name: CEA5_HUMAN (SEQ ID NO:863)
Sequence documentation:
Alignment of: HUMCEA_PEA_1_P4 (SEQ ID NO:864) × CEA5_HUMAN (SEQ ID NO:863)
Alignment segment 1/1:

| | | | |
|---|---|---|---|
| Quality: | 2320.00 | Escore | 0 |
| Matching length: | 234 | Total length: | 234 |
| Matching Percent Similarity: | 100.00 | Matching Percent Identity: | 100.00 |
| Total Percent Similarity: | 100.00 | Total Percent Identity: | 100.00 |
| Gaps: | 0 | | |
| Alignment: | | | |

[chemical structure]

[chemical structure]

[chemical structure]

[chemical structure]

[chemical structure]

Sequence name: CEA5_HUMAN (SEQ ID NO:863)
Sequence documentation:
Alignment of: HUMCEA_PEA_1_P5 (SEQ ID NO:865) × CEA5_HUMAN (SEQ ID NO:863)
Alignment segment 1/1:

| | | | |
|---|---|---|---|
| Quality: | 6692.00 | Escore | 0 |
| Matching length: | 675 | Total length: | 675 |
| Matching Percent Similarity: | 100.00 | Matching Percent Identity: | 100.00 |
| Total Percent Similarity: | 100.00 | Total Percent Identity: | 100.00 |
| Caps: | 0 | | |
| Alignment: | | | |

[chemical structure]

[chemical structure]

[chemical structure]

[chemical structure]

[chemical structure]

[chemical structure]

[chemical structure]

[chemical structure]

[chemical structure]

[chemical structure]

[chemical structure]

[chemical structure]

[chemical structure]

[chemical structure]

Sequence name: CEA5_HUMAN (SEQ ID NO:863)
Sequence documentation:
Alignment of: HUMCEA_PEA_1_P7 (SEQ ID NO:866) × CEA5_HUMAN (SEQ ID NO:863)
Alignment segment 1/1:

| | | | |
|---|---|---|---|
| Quality: | 6745.00 | Escore | 0 |
| Matching length: | 693 | Total length: | 702 |
| Matching Percent Similarity: | 100.00 | Matching Percent Identity: | 100.00 |
| Total Percent Similarity: | 98.72 | Total Percent Identity: | 98.72 |
| Gaps: | 1 | | |
| Alignment: | | | |

[chemical structure]

[chemical structure]

[chemical structure]

[chemical structure]

[chemical structure]

[chemical structure]

[chemical structure]

[chemical structure]

[chemical structure]

[chemical structure]

[chemical structure]

[chemical structure]

[chemical structure]

[chemical structure]

[chemical structure]

Sequence name: CEA5_HUMAN (SEQ ID NO:863)
Sequence documentation:
Alignment of: HUMCEA_PEA_1_P10 (SEQ ID NO:867) × CEA5_HUMAN (SEQ ID NO:863)
Alignment segment 1/1:

| | | | |
|---|---|---|---|
| Quality: | 5057.00 | Escore | 0 |
| Matching length: | 524 | Total length: | 702 |
| Matching Percent Similarity: | 100.00 | Matching Percent Identity: | 100.00 |
| Total Percent Similarity: | 74.64 | Total Percent Identity: | 74.64 |
| Gaps: | 1 | | |
| Alignment: | | | |

[chemical structure]

[chemical structure]

[chemical structure]

[chemical structure]

[chemical structure]

[chemical structure]

[chemical structure]

[chemical structure]

[chemical structure]

[chemical structure]

[chemical structure]

[chemical structure]

[chemical structure]

[chemical structure]

[chemical structure]

Sequence name: CEA5_HUMAN (SEQ ID NO:863)
Sequence documentation:
Alignment of: HUMCEA_PEA_1_P19 (SEQ ID NO:869) × CEA5_HUMAN (SEQ ID NO:863)
Alignment segment 1/1:

| | | | |
|---|---|---|---|
| Quality: | 3298.00 | Escore | 0 |
| Matching length: | 346 | Total length: | 702 |
| Matching Percent Similarity: | 100.00 | Matching Percent Identity: | 100.00 |
| Total Percent Similarity: | 49.29 | Total Percent Identity: | 49.29 |
| Gaps: | 1 | | |
| Alignment: | | | |

[chemical structure]

[chemical structure]

[chemical structure]

[chemical structure]

[chemical structure]

[chemical structure]

[chemical structure]

[chemical structure]

[chemical structure]

[chemical structure]

[chemical structure]

[chemical structure]

[chemical structure]

[chemical structure]

[chemical structure]

Sequence name: CEA5_HUMAN (SEQ ID NO:863)
Sequence documentation:
Alignment of: HUMCEA_PEA_1_P20 (SEQ ID NO:870) × CEA5_HUMAN (SEQ ID NO:863)
Alignment segment 1/1:

| | | | |
|---|---|---|---|
| Quality: | 3294.00 | Escore | 0 |
| Matching length: | 346 | Total length: | 702 |
| Matching Percent Similarity: | 100.00 | Matching Percent Identity: | 100.00 |
| Total Percent Similarity: | 49.29 | Total Percent Identity: | 49.29 |
| Gaps: | 1 | | |
| Alignment: | | | |

[chemical structure]

[chemical structure]

[chemical structure]

[chemical structure]

[chemical structure]

[chemical structure]

[chemical structure]

[chemical structure]

[chemical structure]

[chemical structure]

[chemical structure]

[chemical structure]

[chemical structure]

[chemical structure]

[chemical structure]

### Expression of Carcinoembryonic Antigen-Related Cell Adhesion Molecule 5 Transcripts which are Detectable by Seg12 and Seg9, in Normal, and Cancerous Colon Tissues

[2964] Expression of Carcinoembryonic antigen-related cell adhesion molecule 5 transcripts detectable by or according to seg12 (SEQ ID NO: 1338) and seg9 (SEQ ID NO: 1339), was measured with oligonucleotide-based micro-arrays. The results of image intensities for each feature were normalized according to the ninetieth percentile of the image intensities of all the features on the chip. Then, feature image intensities for replicates of the same oligonucleotide on the chip and replicates of the same sample were averaged. Outlying results were discarded.

[2965] For every oligonucleotide HUMCEA_{—}0_{—}0_{—}96 (seg12, SEQ ID NO: 1338) and HUMCEA_{—}0_{—}0_{—}15168 (seg9, SEQ ID NO: 1339) the averaged intensity determined for every sample was divided by the averaged intensity of all the normal samples (Sample Nos. 62-66 and 69, Table 1, above, “Tissue samples in testing panel”), to obtain a value of fold up-regulation for each sample relative to the averaged normal samples. These data are presented in a histogram bellow, in FIG. 50. As is evident from the histogram (FIG. 50), the expression of Voltage-dependent L-type calcium channel alpha-1D subunit Calcium channel, L type, alpha-1 polypeptide, isoform 2 transcripts detectable with the above oligonucleotides in cancer samples was higher than in the normal samples.

HUMCEA_0_0_96-

(SEQ ID NO: 1338)

CAAGAGGGGTTTGGCTGAGACTTTAGGATTGTGATTCAGCTTAGAGGGAC
HUMCEA_0_0_15168-

(SEQ ID NO: 1339)

TCCTGCCTGTCACCTGAAGTTCTAGATCATTCCCTGGACTCCACTCTATC

### Expression of Carcinoembryonic Antigen-Related Cell Adhesion Molecule 5 CEACAM5 HUMCEA Transcripts which are Detectable by Amplicon as Depicted in Sequence Name HUMCEA Seg31 (SEQ ID NO: 1342) in Normal and Cancerous Colon Tissues

[2966] Expression of CEACAM5 transcripts detectable by or according to seg31, HUMCEA (ver 3.4 T10888) seg31 amplicon (SEQ ID NO: 1342) and HUMCEA seg31-F (SEQ ID NO: 1340) HUMCEA seg31-R (SEQ ID NO: 1341) primers was measured by real time PCR. In parallel the expression of four housekeeping genes —PBGD (GenBank Accession No. BC019323 (SEQ ID NO:1576); amplicon—PBGD-amplicon, SEQ ID NO:531), HPRT1 (GenBank Accession No. NM_{—}000194 (SEQ ID NO:1577); amplicon—HPRT1-amplicon, SEQ ID NO:612), G6PD (GenBank Accession No. NM_{—}000402 (SEQ ID NO:1578); G6PD amplicon, SEQ ID NO:615), RPS27A (GenBank Accession No. NM_{—}002954 (SEQ ID NO:1579); RPS27A amplicon, SEQ ID NO:1261), was measured similarly. For each RT sample, the expression of the above amplicon was normalized to the geometric mean of the quantities of the housekeeping genes. The normalized quantity of each RT sample was then divided by the median of the quantities of the normal post-mortem (PM) samples (Sample Nos. 41, 52, 62-67, 69-71, Table 1, above, “Tissue samples in testing panel”), to obtain a value of fold up-regulation for each sample relative to median of the normal PM samples.

[2967] FIG. 51 is a histogram showing over expression of the above-indicated CEACAM5 transcripts in cancerous colon samples relative to the normal samples. The number and percentage of samples that exhibit at least 3 fold over-expression, out of the total number of samples tested is indicated in the bottom.

[2968] As is evident from FIG. 51, the expression of CEACAM5 transcripts detectable by the above amplicon in cancer samples was significantly higher than in the non-cancerous samples (Sample Nos. 41, 52, 62-67, 69-71, Table 1, “Tissue samples in testing panel”). Notably an over-expression of at least 3 fold was found in 9 out of 37 adenocarcinoma samples.

[2969] Statistical analysis was applied to verify the significance of these results, as described below.

[2970] The P value for the difference in the expression levels of CEACAM5 transcripts detectable by the above amplicon in colon cancer samples versus the normal tissue samples was determined by T test as 6.24E-04. Threshold of 3 fold overexpression was found to differentiate between cancer and normal samples with P value of 7.42E-02 as checked by exact fisher test. The above values demonstrate statistical significance of the results.

[2971] Primer pairs are also optionally and preferably encompassed within the present invention; for example, for the above experiment, the following primer pair was used as a non-limiting illustrative example only of a suitable primer pair: HUMCEA seg31F forward primer (SEQ ID NO: 1340); and HUMCEA seg31 R reverse primer (SEQ ID NO: 1341).

[2972] The present invention also preferably encompasses any amplicon obtained through the use of any suitable primer pair; for example, for the above experiment, the following amplicon was obtained as a non-limiting illustrative example only of a suitable amplicon: HUMCEA seg31 (SEQ ID NO: 1342).

Forward primer (SEQ ID NO: 1340):
CGGCCTCCCAAAGTGCT
Reverse primer (SEQ ID NO: 1341):
GGGAAGCTCCTGATTGTAGAAGG
Amplicon (SEQ ID NO: 1342):
CGGCCTCCCAAAGTGCTGGGATTACAGGCGTGAGCCACCGCACCCGGCCG
ATTTGGACTTTTTAACACAGGATTGGGACAGGATTCAGAGGGACACTGTG
GCCCTTCTACAATCAGGAGCTTCCC

### Expression of Carcinoembryonic Antigen-Related Cell Adhesion Molecule 5 CEACAM5 HUMCEA Transcripts which are Detectable by Amplicon as Depicted in Sequence Name HUMCEA Seg33 (SEQ ID NO: 1345) in Normal and Cancerous Colon Tissues

[2973] Expression of CEACAM5 transcripts detectable by or according to seg33, HUMCEA (ver 3.4 T10888) seg33 amplicon (SEQ ID NO: 1345) and HUMCEA seg33 F (SEQ ID NO: 1343) and HUMCEA seg33 R (SEQ ID NO: 1344) primers was measured by real time PCR. In parallel the expression of four housekeeping genes —PBGD (GenBank Accession No. BC019323 (SEQ ID NO:1576); amplicon—PBGD-amplicon, SEQ ID NO:531), HPRT1 (GenBank Accession No. NM_{—}000194 (SEQ ID NO:1577); amplicon—HPRT1-amplicon, SEQ ID NO:612), G6PD (GenBank Accession No. NM_{—}000402 (SEQ ID NO:1578); G6PD amplicon, SEQ ID NO:615), RPS27A (GenBank Accession No. NM_{—}002954 (SEQ ID NO:1579); RPS27A amplicon, SEQ ID NO:1261), was measured similarly. For each RT sample, the expression of the above amplicon was normalized to the geometric mean of the quantities of the housekeeping genes. The normalized quantity of each RT sample was then divided by the median of the quantities of the normal post-mortem (PM) samples (Sample Nos. 41, 52, 62-67, 69-71, Table 1, above, “Tissue samples in testing panel”), to obtain a value of fold up-regulation for each sample relative to median of the normal PM samples.

[2974] FIG. 52 is a histogram showing over expression of the above-indicated CEACAM5 transcripts in cancerous colon samples relative to the normal samples. The number and percentage of samples that exhibit at least 3 fold over-expression, out of the total number of samples tested is indicated in the bottom.

[2975] As is evident from FIG. 52, the expression of CEACAM5 transcripts detectable by the above amplicon in cancer samples was significantly higher than in the non-cancerous samples (Sample Nos. 41, 52, 62-67, 69-71, Table 1, “Tissue samples in testing panel”). Notably an over-expression of at least 3 fold was found in 11 out of 37 adenocarcinoma samples,

[2976] Statistical analysis was applied to verify the significance of these results, as described below.

[2977] The P value for the difference in the expression levels of CEACAM5 transcripts detectable by the above amplicon in colon cancer samples versus the normal tissue samples was determined by T test as 4.01E-04. Threshold of 3 fold overexpression was found to differentiate between cancer and normal samples with P value of 3.78E-02 as checked by exact fisher test. The above values demonstrate statistical significance of the results.

[2978] Primer pairs are also optionally and preferably encompassed within the present invention; for example, for the above experiment, the following primer pair was used as a non-limiting illustrative example only of a suitable primer pair: HUMCEA seg33F forward primer (SEQ ID NO: 1343); and HUMCEA seg33 R reverse primer (SEQ ID NO: 1344).

[2979] The present invention also preferably encompasses any amplicon obtained through the use of any suitable primer pair; for example, for the above experiment, the following amplicon was obtained as a non-limiting illustrative example only of a suitable amplicon: HUMCEA seg33 (SEQ ID NO: 1345).

Forward primer (SEQ ID NO: 1343):
CTGGAGCATCAGCATCATATTCTG
Reverse primer (SEQ ID NO: 1344):
GAGAGTTGGCCGAGATGGAG
Amplicon (SEQ ID NO: 1345):
CTGGAGCATCAGCATCATATTCTGGGGTGGAGTCTATCTGGTTCTCACCA
AAGAGCCAAGAAGACATTTTCTTTCCCAGTCTGTGTTCCATGGGCACAAG
GAAATCCCAAATTCTATCCTGAGCCCCCTCACTCCATCTCGGCCAACTCT
C

### Expression of Carcinoembryonic Antigen-Related Cell Adhesion Molecule 5 CEACAM5 HUMCEA Transcripts which are Detectable by Amplicon as Depicted in Sequence Name HUMCEA Seg35 (SEQ ID NO: 1348) in Normal and Cancerous Colon Tissues

[2980] Expression of CEACAM5 transcripts detectable by or according to seg35, HUMCEA (ver 3.4 T10888) seg35 amplicon (SEQ ID NO: 1348) and HUMCEA seg35 F (SEQ ID NO: 1346) and HUMCEA seg35 R (SEQ ID NO: 1347) primers was measured by real time PCR. In parallel the expression of four housekeeping genes —PBGD (GenBank Accession No. BC019323 (SEQ ID NO:1576); amplicon—PBGD-amplicon, SEQ ID NO:531), HPRT1 (GenBank Accession No. NM_{—}000194 (SEQ ID NO:1577); amplicon—HPRT1-amplicon, SEQ ID NO:612), G6PD (GenBank Accession No. NM_{—}000402 (SEQ ID NO:1578); G6PD amplicon, SEQ ID NO:615), RPS27A (GenBank Accession No. NM_{—}002954 (SEQ ID NO:1579); RPS27A amplicon, SEQ ID NO:1261), was measured similarly. For each RT sample, the expression of the above amplicon was normalized to the geometric mean of the quantities of the housekeeping genes. The normalized quantity of each RT sample was then divided by the median of the quantities of the normal post-mortem (PM) samples (Sample Nos. 41, 52, 62-67, 69-71, Table 1, above, “Tissue samples in testing panel”), to obtain a value of fold up-regulation for each sample relative to median of the normal PM samples.

[2981] FIG. 53 is a histogram showing over expression of the above-indicated CEACAM5 transcripts in cancerous colon samples relative to the normal samples. The number and percentage of samples that exhibit at least 3 fold over-expression, out of the total number of samples tested is indicated in the bottom.

[2982] As is evident from FIG. 53, the expression of CEACAM5 transcripts detectable by the above amplicon in cancer samples was significantly higher than in the non-cancerous samples (Sample Nos. 41, 52, 62-67, 69-71, Table 1, “Tissue samples in testing panel”). Notably an over-expression of at least 3 fold was found in 15 out of 37 adenocarcinoma samples,

[2983] Statistical analysis was applied to verify the significance of these results, as described below.

[2984] The P value for the difference in the expression levels of CEACAM5 transcripts detectable by the above amplicon in colon cancer samples versus the normal tissue samples was determined by T test as 8.96E-04. Threshold of 3 fold overexpression was found to differentiate between cancer and normal samples with P value of 1.27E-02 as checked by exact fisher test. The above values demonstrate statistical significance of the results.

[2985] Primer pairs are also optionally and preferably encompassed within the present invention; for example, for the above experiment, the following primer pair was used as a non-limiting illustrative example only of a suitable primer pair: HUMCEA seg35F forward primer (SEQ ID NO: 1346); and HUMCEA seg35 R reverse primer (SEQ ID NO: 1347).

[2986] The present invention also preferably encompasses any amplicon obtained through the use of any suitable primer pair; for example, for the above experiment, the following amplicon was obtained as a non-limiting illustrative example only of a suitable amplicon: HUMCEA seg35 (SEQ ID NO: 1348).

Forward primer (SEQ ID NO: 1346):
GAAGCAGAGTCCCCCAGAACT
Reverse primer (SEQ ID NO: 1347):
AAGGCCCAGGCTAGTGCATT
Amplicon (SEQ ID NO: 1348):
GAAGCAGAGTCCCCCAGAACTGGGCTTTTCATTCCCCTGGTGGGAGCCCA
TGAGAAGCGAGTTCTCTGTGCAACGGACTTAGTAAATACAGAATGCACTA
GCCTGGGCCTT

### Description for Cluster M78035

[2987] Cluster M78035 features 12 transcript(s) and 39 segment(s) of interest, the names for which are given in Tables 1 and 2, respectively, the sequences themselves are given at the end of the application. The selected protein variants are given in table 3.

TABLE 1
Transcripts of interest

| Transcript Name | SEQ ID NO: |
|---|---|
| M78035_T0 | 871 |
| M78035_T3 | 872 |
| M78035_T4 | 873 |
| M78035_T7 | 874 |
| M78035_T9 | 875 |
| M78035_T11 | 876 |
| M78035_T17 | 877 |
| M78035_T18 | 878 |
| M78035_T19 | 879 |
| M78035_T20 | 880 |
| M78035_T27 | 881 |
| M78035_T28 | 882 |

TABLE 2
Segments of interest

| Segment Name | SEQ ID NO: |
|---|---|
| M78035_node_4 | 883 |
| M78035_node_6 | 884 |
| M78035_node_10 | 885 |
| M78035_node_17 | 886 |
| M78035_node_18 | 887 |
| M78035_node_21 | 888 |
| M78035_node_25 | 889 |
| M78035_node_33 | 890 |
| M78035_node_55 | 891 |
| M78035_node_58 | 892 |
| M78035_node_60 | 893 |
| M78035_node_62 | 894 |
| M78035_node_63 | 895 |
| M78035_node_64 | 896 |
| M78035_node_65 | 897 |
| M78035_node_69 | 898 |
| M78035_node_71 | 899 |
| M78035_node_14 | 900 |
| M78035_node_15 | 901 |
| M78035_node_20 | 902 |
| M78035_node_24 | 903 |
| M78035_node_26 | 904 |
| M78035_node_28 | 905 |
| M78035_node_29 | 906 |
| M78035_node_30 | 907 |
| M78035_node_31 | 908 |
| M78035_node_34 | 909 |
| M78035_node_35 | 910 |
| M78035_node_37 | 911 |
| M78035_node_40 | 912 |
| M78035_node_48 | 913 |
| M78035_node_49 | 914 |
| M78035_node_50 | 915 |
| M78035_node_52 | 916 |
| M78035_node_53 | 917 |
| M78035_node_54 | 918 |
| M78035_node_56 | 919 |
| M78035_node_57 | 920 |
| M78035_node_59 | 921 |

TABLE 3
Proteins of interest

| Protein Name | SEQ ID NO: | Corresponding Transcript(s) |
|---|---|---|
| M78035_P2 | 923 | M78035_T0 (SEQ ID NO: 871); |
| | | M78035_T17 (SEQ ID NO: 877); |
| | | M78035_T18 (SEQ ID NO: 878); |
| | | M78035_T19 (SEQ ID NO: 879); |
| | | M78035_T20 (SEQ ID NO: 880) |
| M78035_P4 | 924 | M78035_T3 (SEQ ID NO: 872); |
| | | M78035_T4 (SEQ ID NO: 873) |
| M78035_P6 | 925 | M78035_T7 (SEQ ID NO: 874); |
| | | M78035_T9 (SEQ ID NO: 875) |
| M78035_P8 | 926 | M78035_T11 (SEQ ID NO: 876) |
| M78035_P18 | 927 | M78035_T27 (SEQ ID NO: 881) |
| M78035_P19 | 928 | M78035_T28 (SEQ ID NO: 882) |

[2988] These sequences are variants of the known protein Adenosylhomocysteinase (SwissProt accession identifier SAHH_HUMAN; known also according to the synonyms EC 3.3.1.1; S-adenosyl-L-homocysteine hydrolase; AdoHcyase), SEQ ID NO: 922, referred to herein as the previously known protein.

[2989] Protein Adenosylhomocysteinase (SEQ ID NO:922) is known or believed to have the following function(s): Adenosylhomocysteine is a competitive inhibitor of S-adenosyl-L-methionine-dependent methyl transferase reactions; therefore adenosylhomocysteinase may play a key role in the control of methylations via regulation of the intracellular concentration of adenosylhomocysteine. The sequence for protein Adenosylhomocysteinase is given at the end of the application, as “Adenosylhomocysteinase amino acid sequence”. Known polymorphisms for this sequence are as shown in Table 4.

TABLE 4
Amino acid mutations for Known Protein

| SNP position(s) on amino | |
|---|---|
| acid sequence | Comment |
| 86 | D -> N. /FTId = VAR_006934. |

[2990] Protein Adenosylhomocysteinase (SEQ ID NO:922) localization is believed to be Cytoplasmic.

[2991] The following GO Annotation(s) apply to the previously known protein. The following annotation(s) were found: one-carbon compound metabolism, which are annotation(s) related to Biological Process; adenosylhomocysteinase; hydrolase, which are annotation(s) related to Molecular Function; and cytoplasm, which are annotation(s) related to Cellular Component.

[2992] The GO assignment relies on information from one or more of the SwissProt/TremB1 Protein knowledgebase, available from <http://www.expasy.ch/sprot/>; or Locuslink, available from <http://www.ncbi.nlm.nih.gov/projects/LocusLink/>.

[2993] Cluster M78035 can be used as a diagnostic marker according to overexpression of transcripts of this cluster in cancer. Expression of such transcripts in normal tissues is also given according to the previously described methods. The term “number” in the left hand column of the table and the numbers on the y-axis of the figure below refer to weighted expression of ESTs in each category, as “parts per million” (ratio of the expression of ESTs for a particular cluster to the expression of all ESTs in that category, according to parts per million).

[2994] Overall, the following results were obtained as shown with regard to the histograms in FIG. 54 and Table 5. This cluster is overexpressed (at least at a minimum level) in the following pathological conditions: brain malignant tumors, colorectal cancer, epithelial malignant tumors, a mixture of malignant tumors from different tissues, malignant tumors involving the lymph nodes and pancreas carcinoma.

TABLE 5
Normal tissue distribution

| Name of Tissue | Number |
|---|---|
| adrenal | 0 |
| bladder | 0 |
| bone | 97 |
| brain | 71 |
| colon | 6 |
| epithelial | 74 |
| general | 72 |
| head and neck | 10 |
| kidney | 85 |
| liver | 48 |
| lung | 64 |
| lymph nodes | 49 |
| breast | 101 |
| bone marrow | 62 |
| muscle | 57 |
| ovary | 36 |
| pancreas | 30 |
| prostate | 76 |
| skin | 204 |
| stomach | 109 |
| T cells | 0 |
| Thyroid | 283 |
| uterus | 118 |

TABLE 6
P values and ratios for expression in cancerous tissue

| Name of Tissue | P1 | P2 | SP1 | R3 | SP2 | R4 |
|---|---|---|---|---|---|---|
| adrenal | 1.5e−01 | 7.0e−02 | 2.1e−01 | 3.4 | 1.5e−01 | 3.6 |
| bladder | 5.4e−01 | 3.4e−01 | 5.6e−01 | 1.8 | 2.1e−01 | 2.4 |
| bone | 9.2e−01 | 3.7e−02 | 1 | 0.2 | 2.1e−01 | 1.4 |
| brain | 1.5e−01 | 2.5e−02 | 3.8e−03 | 2.0 | 1.2e−12 | 3.7 |
| colon | 5.2e−02 | 2.3e−02 | 8.0e−02 | 3.7 | 2.0e−03 | 3.9 |
| epithelial | 3.1e−02 | 6.2e−05 | 1.7e−02 | 1.5 | 3.6e−25 | 3.4 |
| general | 6.7e−03 | 5.9e−10 | 3.8e−06 | 1.6 | 1.3e−66 | 3.8 |
| head and neck | 6.4e−01 | 2.5e−01 | 1 | 0.9 | 1.3e−01 | 2.1 |
| kidney | 7.6e−01 | 7.4e−01 | 2.5e−01 | 1.3 | 5.4e−02 | 1.7 |
| liver | 5.5e−02 | 1.1e−01 | 4.2e−02 | 5.1 | 4.4e−05 | 2.7 |
| lung | 8.0e−01 | 7.6e−01 | 6.4e−01 | 1.1 | 2.3e−04 | 2.6 |
| lymph nodes | 4.0e−01 | 1.6e−02 | 6.3e−01 | 1.1 | 2.5e−06 | 4.7 |
| breast | 3.4e−01 | 2.8e−01 | 4.3e−01 | 1.2 | 1.3e−01 | 1.3 |
| bone marrow | 7.5e−01 | 5.4e−01 | 1 | 0.3 | 1.9e−01 | 2.1 |
| muscle | 6.3e−01 | 5.0e−01 | 4.7e−01 | 1.6 | 7.1e−05 | 1.4 |
| ovary | 2.0e−01 | 1.1e−01 | 4.9e−01 | 1.5 | 3.5e−03 | 2.7 |
| pancreas | 4.5e−02 | 7.4e−03 | 2.3e−02 | 3.0 | 5.9e−04 | 3.2 |
| prostate | 4.7e−01 | 3.8e−01 | 1.4e−01 | 1.5 | 3.7e−02 | 1.6 |
| skin | 4.7e−01 | 5.3e−01 | 7.2e−01 | 0.8 | 6.9e−05 | 1.2 |
| stomach | 1.8e−01 | 1.7e−02 | 5.0e−01 | 1.2 | 6.2e−03 | 2.8 |
| T cells | 1 | 6.7e−01 | 1 | 1.0 | 7.2e−01 | 1.4 |
| Thyroid | 6.9e−01 | 6.9e−01 | 1 | 0.5 | 1 | 0.5 |
| uterus | 7.0e−01 | 3.4e−01 | 8.1e−01 | 0.7 | 5.6e−02 | 1.4 |

[2995] As noted above, cluster M178035 features 12 transcripts(s), which were listed in Table 1 above. These transcript(s) encode for protein(s) which are variant(s) of protein Adenosylhomocysteinase (SEQ ID NO:922). A description of each variant protein according to the present invention is now provided.

[2996] Variant protein M78035_P2 (SEQ ID NO:923) according to the present invention has an amino acid sequence as given at the end of the application; it is encoded by transcript(s) M78035_T0 (SEQ ID NO:871), M78035_T17 (SEQ ID NO:877), M78035_T18 (SEQ ID NO:878), M78035_T19 (SEQ ID NO:879) and M78035_T20 (SEQ ID NO:880). The location of the variant protein was determined according to results from a number of different software programs and analyses, including analyses from SignalP and other specialized programs. The variant protein is believed to be located as follows with regard to the cell: intracellularly. The protein localization is believed to be intracellularly because neither of the trans-membrane region prediction programs predicted a trans-membrane region for this protein. In addition both signal-peptide prediction programs predict that this protein is a non-secreted protein.

[2997] Variant protein M78035_P2 (SEQ ID NO:923) also has the following non-silent SNPs (Single Nucleotide Polymorphisms) as listed in Table 7, (given according to their position(s) on the amino acid sequence, with the alternative amino acid(s) listed; the last column indicates whether the SNP is known or not; the presence of known SNPs in variant protein M78035_P2 (SEQ ID NO:923) sequence provides support for the deduced sequence of this variant protein according to the present invention).

TABLE 7
Amino acid mutations

| SNP position(s) on | Alternative | Previously |
|---|---|---|
| amino acid sequence | amino acid(s) | known SNP? |
| 19 | R -> H | No |
| 36 | R -> L | No |
| 38 | R -> W | Yes |
| 65 | E -> D | No |
| 74 | V -> L | No |
| 77 | S -> | No |
| 91 | A -> | No |
| 111 | L -> P | No |
| 135 | L -> I | Yes |
| 206 | A -> | No |
| 206 | A -> G | No |
| 211 | I -> | No |
| 214 | K -> R | Yes |
| 226 | K -> | No |
| 226 | K -> Q | No |
| 265 | A -> | No |
| 325 | V -> L | No |
| 325 | V -> | No |
| 325 | V -> G | No |
| 353 | H -> Q | No |
| 353 | H -> | No |
| 374 | T -> | No |
| 383 | V -> G | No |
| 383 | V -> | No |
| 407 | T -> S | No |
| 407 | T -> | No |
| 414 | A -> T | No |

[2998] Variant protein M78035_P2 (SEQ ID NO:923) is encoded by the following transcript(s): M78035_T0 (SEQ ID NO:871), M78035_T17 (SEQ ID NO:877), M78035_T18 (SEQ ID NO:878), M78035_T19 (SEQ ID NO:879) and M78035_T20 (SEQ ID NO:880), for which the sequence(s) is/are given at the end of the application.

[2999] The coding portion of transcript M78035_T0 (SEQ ID NO:871) is shown in bold; this coding portion starts at position 132 and ends at position 1427. The transcript also has the following SNPs as listed in Table 8 (given according to their position on the nucleotide sequence, with the alternative nucleic acid listed; the last column indicates whether the SNP is known or not; the presence of known SNPs in variant protein M78035_P2 (SEQ ID NO:923) sequence provides support for the deduced sequence of this variant protein according to the present invention).

TABLE 8
Nucleic acid SNPs

| SNP position on | Alternative | Previously |
|---|---|---|
| nucleotide sequence | nucleic acid | known SNP? |
| 8 | C -> A | Yes |
| 140 | C -> T | No |
| 187 | G -> A | No |
| 197 | G -> A | No |
| 238 | G -> T | No |
| 243 | C -> T | Yes |
| 326 | G -> T | No |
| 335 | C -> T | No |
| 351 | G -> C | No |
| 361 | C -> | No |
| 403 | C -> | No |
| 463 | T -> C | No |
| 476 | G -> A | No |
| 482 | C -> A | No |
| 506 | C -> T | Yes |
| 534 | C -> A | Yes |
| 748 | C -> | No |
| 748 | C -> G | No |
| 763 | T -> | No |
| 772 | A -> G | Yes |
| 807 | A -> | No |
| 807 | A -> C | No |
| 925 | C -> | No |
| 1016 | T -> C | No |
| 1085 | G -> A | Yes |
| 1104 | G -> | No |
| 1104 | G -> T | No |
| 1105 | T -> G | No |
| 1190 | C -> | No |
| 1190 | C -> A | No |
| 1252 | C -> | No |
| 1279 | T -> | No |
| 1279 | T -> G | No |
| 1351 | C -> | No |
| 1351 | C -> G | No |
| 1371 | G -> A | No |
| 1505 | C -> | No |
| 1554 | C -> | No |
| 1554 | C -> G | No |
| 1563 | T -> C | No |
| 1573 | C -> | No |
| 1573 | C -> G | No |
| 1624 | C -> | No |
| 1624 | C -> A | No |
| 1638 | C -> G | No |
| 1664 | G -> | No |
| 1664 | G -> A | No |
| 1686 | T -> | No |
| 1712 | T -> C | No |
| 1719 | C -> | No |
| 1731 | T -> G | Yes |
| 1741 | A -> | No |
| 1741 | A -> C | No |
| 1755 | T -> | No |
| 1775 | C -> | No |
| 1775 | C -> A | No |
| 1807 | T -> | No |
| 1807 | T -> G | No |
| 1881 | T -> | No |
| 1881 | T -> G | No |
| 1937 | A -> | No |
| 1937 | A -> C | No |
| 1958 | C -> | No |
| 1969 | -> C | No |
| 1969 | -> G | No |
| 2001 | A -> C | Yes |
| 2008 | A -> C | Yes |
| 2009 | C -> G | Yes |
| 2011 | G -> C | Yes |
| 2016 | G -> T | Yes |
| 2041 | C -> T | No |
| 2043 | G -> T | No |
| 2047 | A -> C | Yes |
| 2084 | A -> C | Yes |
| 2086 | T -> | No |
| 2109 | A -> T | Yes |
| 2153 | A -> C | No |
| 2192 | T -> C | No |

[3000] The coding portion of transcript M78035_T17 (SEQ ID NO:877) is shown in bold; this coding portion starts at position 132 and ends at position 1427. The transcript also has the following SNPs as listed in Table 9 (given according to their position on the nucleotide sequence, with the alternative nucleic acid listed; the last column indicates whether the SNP is known or not; the presence of known SNPs in variant protein M78035_P2 (SEQ ID NO:923) sequence provides support for the deduced sequence of this variant protein according to the present invention).

TABLE 9
Nucleic acid SNPs

| SNP position on | Alternative | Previously |
|---|---|---|
| nucleotide sequence | nucleic acid | known SNP? |
| 8 | C -> A | Yes |
| 140 | C -> T | No |
| 187 | G -> A | No |
| 197 | G -> A | No |
| 238 | G -> T | No |
| 243 | C -> T | Yes |
| 326 | G -> T | No |
| 335 | C -> T | No |
| 351 | G -> C | No |
| 361 | C -> | No |
| 403 | C -> | No |
| 463 | T -> C | No |
| 476 | G -> A | No |
| 482 | C -> A | No |
| 506 | C -> T | Yes |
| 534 | C -> A | Yes |
| 748 | C -> | No |
| 748 | C -> G | No |
| 763 | T -> | No |
| 772 | A -> G | Yes |
| 807 | A -> | No |
| 807 | A -> C | No |
| 925 | C -> | No |
| 1016 | T -> C | No |
| 1085 | G -> A | Yes |
| 1104 | G -> | No |
| 1104 | G -> T | No |
| 1105 | T -> G | No |
| 1190 | C -> | No |
| 1190 | C -> A | No |
| 1252 | C -> | No |
| 1279 | T -> | No |
| 1279 | T -> G | No |
| 1351 | C -> | No |
| 1351 | C -> G | No |
| 1371 | G -> A | No |
| 1567 | C -> T | Yes |
| 1668 | G -> A | Yes |
| 2289 | G -> A | Yes |
| 2815 | T -> C | Yes |
| 3258 | G -> A | No |
| 3260 | G -> A | No |

[3001] The coding portion of transcript M78035_T18 (SEQ ID NO:878) is shown in bold; this coding portion starts at position 132 and ends at position 1427. The transcript also has the following SNPs as listed in Table 10 (given according to their position on the nucleotide sequence, with the alternative nucleic acid listed; the last column indicates whether the SNP is known or not; the presence of known SNPs in variant protein M78035_P2 (SEQ ID NO:923) sequence provides support for the deduced sequence of this variant protein according to the present invention).

TABLE 10
Nucleic acid SNPs

| SNP position | | |
|---|---|---|
| on nucleotide | Alternative | Previously |
| sequence | nucleic acid | known SNP? |
| 8 | C -> A | Yes |
| 140 | C -> T | No |
| 187 | G -> A | No |
| 197 | G -> A | No |
| 238 | G -> T | No |
| 243 | C -> T | Yes |
| 326 | G -> T | No |
| 335 | C -> T | No |
| 351 | G -> C | No |
| 361 | C -> | No |
| 403 | C -> | No |
| 463 | T -> C | No |
| 476 | G -> A | No |
| 482 | C -> A | No |
| 506 | C -> T | Yes |
| 534 | C -> A | Yes |
| 748 | C -> | No |
| 748 | C -> G | No |
| 763 | T -> | No |
| 772 | A -> G | Yes |
| 807 | A -> | No |
| 807 | A -> C | No |
| 925 | C -> | No |
| 1016 | T -> C | No |
| 1085 | G -> A | Yes |
| 1104 | G -> | No |
| 1104 | G -> T | No |
| 1105 | T -> G | No |
| 1190 | C -> | No |
| 1190 | C -> A | No |
| 1252 | C -> | No |
| 1279 | T -> | No |
| 1279 | T -> G | No |
| 1351 | C -> | No |
| 1351 | C -> G | No |
| 1371 | G -> A | No |
| 1707 | C -> T | Yes |
| 1808 | G -> A | Yes |
| 2429 | G -> A | Yes |
| 2955 | T -> C | Yes |
| 3398 | G -> A | No |
| 3400 | G -> A | No |

[3002] The coding portion of transcript M78035_T19 (SEQ ID NO:879) is shown in bold; this coding portion starts at position 132 and ends at position 1427. The transcript also has the following SNPs as listed in Table 11 (given according to their position on the nucleotide sequence, with the alternative nucleic acid listed; the last column indicates whether the SNP is known or not; the presence of known SNPs in variant protein M78035_P2 (SEQ ID NO:923) sequence provides support for the deduced sequence of this variant protein according to the present invention).

TABLE 11
Nucleic acid SNPs

| SNP position | | |
|---|---|---|
| on nucleotide | Alternative | Previously |
| sequence | nucleic acid | known SNP? |
| 8 | C -> A | Yes |
| 140 | C -> T | No |
| 187 | G -> A | No |
| 197 | G -> A | No |
| 238 | G -> T | No |
| 243 | C -> T | Yes |
| 326 | G -> T | No |
| 335 | C -> T | No |
| 351 | G -> C | No |
| 361 | C -> | No |
| 403 | C -> | No |
| 463 | T -> C | No |
| 476 | G -> A | No |
| 482 | C -> A | No |
| 506 | C -> T | Yes |
| 534 | C -> A | Yes |
| 748 | C -> | No |
| 748 | C -> G | No |
| 763 | T -> | No |
| 772 | A -> G | Yes |
| 807 | A -> | No |
| 807 | A -> C | No |
| 925 | C -> | No |
| 1016 | T -> C | No |
| 1085 | G -> A | Yes |
| 1104 | G -> | No |
| 1104 | G -> T | No |
| 1105 | T -> G | No |
| 1190 | C -> | No |
| 1190 | C -> A | No |
| 1252 | C -> | No |
| 1279 | T -> | No |
| 1279 | T -> G | No |
| 1351 | C -> | No |
| 1351 | C -> G | No |
| 1371 | G -> A | No |
| 1569 | A -> C | Yes |
| 2440 | G -> A | Yes |
| 3110 | G -> C | Yes |
| 3323 | C -> T | Yes |
| 3630 | G -> A | No |

[3003] The coding portion of transcript M78035_T20 (SEQ ID NO:880) is shown in bold; this coding portion starts at position 132 and ends at position 1427. The transcript also has the following SNPs as listed in Table 12 (given according to their position on the nucleotide sequence, with the alternative nucleic acid listed; the last column indicates whether the SNP is known or not; the presence of known SNPs in variant protein M78035_P2 (SEQ ID NO:923) sequence provides support for the deduced sequence of this variant protein according to the present invention).

TABLE 12
Nucleic acid SNPs

| SNP position | | |
|---|---|---|
| on nucleotide | Alternative | Previously |
| sequence | nucleic acid | known SNP? |
| 8 | C -> A | Yes |
| 140 | C -> T | No |
| 187 | G -> A | No |
| 197 | G -> A | No |
| 238 | G -> T | No |
| 243 | C -> T | Yes |
| 326 | G -> T | No |
| 335 | C -> T | No |
| 351 | G -> C | No |
| 361 | C -> | No |
| 403 | C -> | No |
| 463 | T -> C | No |
| 476 | G -> A | No |
| 482 | C -> A | No |
| 506 | C -> T | Yes |
| 534 | C -> A | Yes |
| 748 | C -> | No |
| 748 | C -> G | No |
| 763 | T -> | No |
| 772 | A -> G | Yes |
| 807 | A -> | No |
| 807 | A -> C | No |
| 925 | C -> | No |
| 1016 | T -> C | No |
| 1085 | G -> A | Yes |
| 1104 | G -> | No |
| 1104 | G -> T | No |
| 1105 | T -> G | No |
| 1190 | C -> | No |
| 1190 | C -> A | No |
| 1252 | C -> | No |
| 1279 | T -> | No |
| 1279 | T -> G | No |
| 1351 | C -> | No |
| 1351 | C -> G | No |
| 1371 | G -> A | No |
| 1569 | A -> C | Yes |
| 2440 | G -> A | Yes |
| 2649 | G -> C | Yes |
| 2862 | C -> T | Yes |
| 3169 | G -> A | No |

[3004] Variant protein M78035_P4 (SEQ ID NO:924) according to the present invention has an amino acid sequence as given at the end of the application; it is encoded by transcript(s) M78035_T3 (SEQ ID NO:872) and M78035_T4 (SEQ ID NO:873). An alignment is given to the known protein (Adenosylhomocysteinase (SEQ ID NO:922)) at the end of the application. One or more alignments to one or more previously published protein sequences are given at the end of the application. A brief description of the relationship of the variant protein according to the present invention to each such aligned protein is as follows:

[3005] Comparison Report Between M78035_P4 (SEQ ID NO:924) and SAHH_HUMAN (SEQ ID NO:922):

[3006] 1. An isolated chimeric polypeptide encoding for M78035_P4 (SEQ ID NO:924), comprising a first amino acid sequence being at least 90% homologous to MPGLMRMRERYSASKPLKGARIAGCLHMTVETAVLIETLVTLGAEVQWSSCNIFSTQDHAAAAIAKAGIP VYAWKGETDEEYLWCIEQTLYFKDGPLNMILDDGGDLTNLIHTKYPQLLPGIRGISEETTTGVHNLYKMM ANGILKVPAINVNDSVTKSKFDNLYGCRESLIDGIKRATDVMIAGKVAVVAGYGDVGKGCAQALRGFGA RVIITEIDPINALQAAMEGYEVTTMDEACQEGNIFVTTTGCIDIILGRHFEQMKDDAIVCNIGHFDVEIDVK WLNENAVEKVNIKPQVDRYRLKNGRRIILLAEGRLVNLGCAMGHPSFVMSNSFTNQVMAQIELWTHPDK YPVGVHFLPKKLDEAVAEAHLGKLNVKLTKLTEKQAQYLGMSCDGPFKPDHYRY corresponding to amino acids 29-432 of SAHH_HUMAN (SEQ ID NO:922), which also corresponds to amino acids 1-404 of M78035_P4 (SEQ ID NO:924).

[3007] The location of the variant protein was determined according to results from a number of different software programs and analyses, including analyses from SignalP and other specialized programs. The variant protein is believed to be located as follows with regard to the cell: intracellularly. The protein localization is believed to be intracellularly because neither of the trans-membrane region prediction programs predicted a trans-membrane region for this protein. In addition both signal-peptide prediction programs predict that this protein is a non-secreted protein.

[3008] Variant protein M78035_P4 (SEQ ID NO:924) also has the following non-silent SNPs (Single Nucleotide Polymorphisms) as listed in Table 13, (given according to their position(s) on the amino acid sequence, with the alternative amino acid(s) listed; the last column indicates whether the SNP is known or not; the presence of known SNPs in variant protein M78035_P4 (SEQ ID NO:924) sequence provides support for the deduced sequence of this variant protein according to the present invention).

TABLE 13
Amino acid mutations

| SNP position(s) | | |
|---|---|---|
| on amino acid | Alternative | Previously |
| sequence | amino acid(s) | known SNP? |
| 8 | R -> L | No |
| 10 | R -> W | Yes |
| 37 | E -> D | No |
| 46 | V -> L | No |
| 49 | S -> | No |
| 63 | A -> | No |
| 83 | L -> P | No |
| 107 | L -> I | Yes |
| 178 | A -> | No |
| 178 | A -> G | No |
| 183 | I -> | No |
| 186 | K -> R | Yes |
| 198 | K -> | No |
| 198 | K -> Q | No |
| 237 | A -> | No |
| 297 | V -> G | No |
| 297 | V -> L | No |
| 297 | V -> | No |
| 325 | H -> Q | No |
| 325 | H -> | No |
| 346 | T -> | No |
| 355 | V -> | No |
| 355 | V -> G | No |
| 379 | T -> | No |
| 379 | T -> S | No |
| 386 | A -> T | No |

[3009] Variant protein M78035_P4 (SEQ ID NO:924) is encoded by the following transcript(s): M78035_T3 (SEQ ID NO:872) and M78035_T4 (SEQ ID NO:873), for which the sequence(s) is/are given at the end of the application.

[3010] The coding portion of transcript M78035_T3 (SEQ ID NO:872) is shown in bold; this coding portion starts at position 301 and ends at position 1512. The transcript also has the following SNPs as listed in Table 14 (given according to their position on the nucleotide sequence, with the alternative nucleic acid listed; the last column indicates whether the SNP is known or not; the presence of known SNPs in variant protein M78035_P4 (SEQ ID NO:924) sequence provides support for the deduced sequence of this variant protein according to the present invention).

TABLE 14
Nucleic acid SNPs

| SNP position | | |
|---|---|---|
| on nucleotide | Alternative | Previously |
| sequence | nucleic acid | known SNP? |
| 104 | A -> G | Yes |
| 272 | G -> A | No |
| 282 | G -> A | No |
| 323 | G -> T | No |
| 328 | C -> T | Yes |
| 411 | G -> T | No |
| 420 | C -> T | No |
| 436 | G -> C | No |
| 446 | C -> | No |
| 488 | C -> | No |
| 548 | T -> C | No |
| 561 | G -> A | No |
| 567 | C -> A | No |
| 591 | C -> T | Yes |
| 619 | C -> A | Yes |
| 833 | C -> | No |
| 833 | C -> G | No |
| 848 | T -> | No |
| 857 | A -> G | Yes |
| 892 | A -> | No |
| 892 | A -> C | No |
| 1010 | C -> | No |
| 1101 | T -> C | No |
| 1170 | G -> A | Yes |
| 1189 | G -> | No |
| 1189 | G -> T | No |
| 1190 | T -> G | No |
| 1275 | C -> | No |
| 1275 | C -> A | No |
| 1337 | C -> | No |
| 1364 | T -> | No |
| 1364 | T -> G | No |
| 1436 | C -> | No |
| 1436 | C -> G | No |
| 1456 | G -> A | No |
| 1590 | C -> | No |
| 1639 | C -> | No |
| 1639 | C -> G | No |
| 1648 | T -> C | No |
| 1658 | C -> | No |
| 1658 | C -> G | No |
| 1709 | C -> | No |
| 1709 | C -> A | No |
| 1723 | C -> G | No |
| 1749 | G -> | No |
| 1749 | G -> A | No |
| 1771 | T -> | No |
| 1797 | T -> C | No |
| 1804 | C -> | No |
| 1816 | T -> G | Yes |
| 1826 | A -> | No |
| 1826 | A -> C | No |
| 1840 | T -> | No |
| 1860 | C -> | No |
| 1860 | C -> A | No |
| 1892 | T -> | No |
| 1892 | T -> G | No |
| 1966 | T -> | No |
| 1966 | T -> G | No |
| 2022 | A -> | No |
| 2022 | A -> C | No |
| 2043 | C -> | No |
| 2054 | -> C | No |
| 2054 | -> G | No |
| 2086 | A -> C | Yes |
| 2093 | A -> C | Yes |
| 2094 | C -> G | Yes |
| 2096 | G -> C | Yes |
| 2101 | G -> T | Yes |
| 2126 | C -> T | No |
| 2128 | G -> T | No |
| 2132 | A -> C | Yes |
| 2169 | A -> C | Yes |
| 2171 | T -> | No |
| 2194 | A -> T | Yes |
| 2238 | A -> C | No |
| 2277 | T -> C | No |

[3011] The coding portion of transcript M78035_T4 (SEQ ID NO:873) is shown in bold; this coding portion starts at position 897 and ends at position 2108. The transcript also has the following SNPs as listed in Table 15 (given according to their position on the nucleotide sequence, with the alternative nucleic acid listed; the last column indicates whether the SNP is known or not; the presence of known SNPs in variant protein M78035_P4 (SEQ ID NO:924) sequence provides support for the deduced sequence of this variant protein according to the present invention).

TABLE 15
Nucleic acid SNPs

| SNP position | | |
|---|---|---|
| on nucleotide | Alternative | Previously |
| sequence | nucleic acid | known SNP? |
| 654 | G -> A | Yes |
| 868 | G -> A | No |
| 878 | G -> A | No |
| 919 | G -> T | No |
| 924 | C -> T | Yes |
| 1007 | G -> T | No |
| 1016 | C -> T | No |
| 1032 | G -> C | No |
| 1042 | C -> | No |
| 1084 | C -> | No |
| 1144 | T -> C | No |
| 1157 | G -> A | No |
| 1163 | C -> A | No |
| 1187 | C -> T | Yes |
| 1215 | C -> A | Yes |
| 1429 | C -> | No |
| 1429 | C -> G | No |
| 1444 | T -> | No |
| 1453 | A -> G | Yes |
| 1488 | A -> | No |
| 1488 | A -> C | No |
| 1606 | C -> | No |
| 1697 | T -> C | No |
| 1766 | G -> A | Yes |
| 1785 | G -> | No |
| 1785 | G -> T | No |
| 1786 | T -> G | No |
| 1871 | C -> | No |
| 1871 | C -> A | No |
| 1933 | C -> | No |
| 1960 | T -> | No |
| 1960 | T -> G | No |
| 2032 | C -> | No |
| 2032 | C -> G | No |
| 2052 | G -> A | No |
| 2186 | C -> | No |
| 2235 | C -> | No |
| 2235 | C -> G | No |
| 2244 | T -> C | No |
| 2254 | C -> | No |
| 2254 | C -> G | No |
| 2305 | C -> | No |
| 2305 | C -> A | No |
| 2319 | C -> G | No |
| 2345 | G -> | No |
| 2345 | G -> A | No |
| 2367 | T -> | No |
| 2393 | T -> C | No |
| 2400 | C -> | No |
| 2412 | T -> G | Yes |
| 2422 | A -> | No |
| 2422 | A -> C | No |
| 2436 | T -> | No |
| 2456 | C -> | No |
| 2456 | C -> A | No |
| 2488 | T -> | No |
| 2488 | T -> G | No |
| 2562 | T -> | No |
| 2562 | T -> G | No |
| 2618 | A -> | No |
| 2618 | A -> C | No |
| 2639 | C -> | No |
| 2650 | -> C | No |
| 2650 | -> G | No |
| 2682 | A -> C | Yes |
| 2689 | A -> C | Yes |
| 2690 | C -> G | Yes |
| 2692 | G -> C | Yes |
| 2697 | G -> T | Yes |
| 2722 | C -> T | No |
| 2724 | G -> T | No |
| 2728 | A -> C | Yes |
| 2765 | A -> C | Yes |
| 2767 | T -> | No |
| 2790 | A -> T | Yes |
| 2834 | A -> C | No |
| 2873 | T -> C | No |

[3012] Variant protein M78035_P6 (SEQ ID NO:925) according to the present invention has an amino acid sequence as given at the end of the application; it is encoded by transcript(s) M78035_T7 (SEQ ID NO:874) and M78035_T9 (SEQ ID NO:875). An alignment is given to the known protein (Adenosylhomocysteinase (SEQ ID NO:922)) at the end of the application. One or more alignments to one or more previously published protein sequences are given at the end of the application. A brief description of the relationship of the variant protein according to the present invention to each such aligned protein is as follows:

[3013] Comparison Report Between M78035_P6 (SEQ ID NO:925) and SAHH_HUMAN (SEQ ID NO:922):

[3014] 1. An isolated chimeric polypeptide encoding for M78035_P6 (SEQ ID NO:925), comprising a first amino acid sequence being at least 90% homologous to MILDDGGDLTNLIHTKYPQLLPGIRGISEETTTGVHNLYKMMANGILKVPAINVNDSVTKSKFDNLYGCRE SLIDGIKRATDVMIAGKVAVVAGYGDVGKGCAQALRGFGARVIITEIDPINALQAAMEGYEVTTMDEACQ EGNIFVTTTGCIDIILGRHFEQMKDDAIVCNIGHFDVEIDVKWLNENAVEKVNIKPQVDRYRLKNGRRIILL AEGRLVNLGCAMGHPSFVMSNSFTNQVMAQIELWTHPDKYPVGVHFLPKKLDEAVAEAHLGKLNVKLT KLTEKQAQYLGMSCDGPFKPDHYRY corresponding to amino acids 127-432 of SAHH_HUMAN (SEQ ID NO:922), which also corresponds to amino acids 1-306 of M78035_P6 (SEQ ID NO:925).

[3015] The location of the variant protein was determined according to results from a number of different software programs and analyses, including analyses from SignalP and other specialized programs. The variant protein is believed to be located as follows with regard to the cell: intracellularly. The protein localization is believed to be intracellularly because neither of the trans-membrane region prediction programs predicted a trans-membrane region for this protein. In addition both signal-peptide prediction programs predict that this protein is a non-secreted protein.

[3016] Variant protein M78035_P6 (SEQ ID NO:925) also has the following non-silent SNPs (Single Nucleotide Polymorphisms) as listed in Table 16, (given according to their position(s) on the amino acid sequence, with the alternative amino acid(s) listed; the last column indicates whether the SNP is known or not; the presence of known SNPs in variant protein M78035_P6 (SEQ ID NO:925) sequence provides support for the deduced sequence of this variant protein according to the present invention).

TABLE 16
Amino acid mutations

| SNP position(s) | | |
|---|---|---|
| on amino acid | Alternative | Previously |
| sequence | amino acid(s) | known SNP? |
| 9 | L -> I | Yes |
| 80 | A -> G | No |
| 80 | A -> | No |
| 85 | I -> | No |
| 88 | K -> R | Yes |
| 100 | K -> | No |
| 100 | K -> Q | No |
| 139 | A -> | No |
| 199 | V -> | No |
| 199 | V -> L | No |
| 199 | V -> G | No |
| 227 | H -> | No |
| 227 | H -> Q | No |
| 248 | T -> | No |
| 257 | V -> G | No |
| 257 | V -> | No |
| 281 | T -> S | No |
| 281 | T -> | No |
| 288 | A -> T | No |

[3017] Variant protein M78035_P6 (SEQ ID NO:925) is encoded by the following transcript(s): M78035_T7 (SEQ ID NO:874) and M78035_T9 (SEQ ID NO:875), for which the sequence(s) is/are given at the end of the application.

[3018] The coding portion of transcript M78035_T7 (SEQ ID NO:874) is shown in bold; this coding portion starts at position 556 and ends at position 1473. The transcript also has the following SNPs as listed in Table 17 (given according to their position on the nucleotide sequence, with the alternative nucleic acid listed; the last column indicates whether the SNP is known or not; the presence of known SNPs in variant protein M78035_P6 (SEQ ID NO:925) sequence provides support for the deduced sequence of this variant protein according to the present invention).

TABLE 17
Nucleic acid SNPs

| SNP position | | |
|---|---|---|
| on nucleotide | Alternative | Previously |
| sequence | nucleic acid | known SNP? |
| 8 | C -> A | Yes |
| 140 | C -> T | No |
| 187 | G -> A | No |
| 197 | G -> A | No |
| 238 | G -> T | No |
| 243 | C -> T | Yes |
| 326 | G -> T | No |
| 335 | C -> T | No |
| 351 | G -> C | No |
| 361 | C -> | No |
| 403 | C -> | No |
| 509 | T -> C | No |
| 522 | G -> A | No |
| 528 | C -> A | No |
| 552 | C -> T | Yes |
| 580 | C -> A | Yes |
| 794 | C -> | No |
| 794 | C -> G | No |
| 809 | T -> | No |
| 818 | A -> G | Yes |
| 853 | A -> | No |
| 853 | A -> C | No |
| 971 | C -> | No |
| 1062 | T -> C | No |
| 1131 | G -> A | Yes |
| 1150 | G -> | No |
| 1150 | G -> T | No |
| 1151 | T -> G | No |
| 1236 | C -> | No |
| 1236 | C -> A | No |
| 1298 | C -> | No |
| 1325 | T -> | No |
| 1325 | T -> G | No |
| 1397 | C -> | No |
| 1397 | C -> G | No |
| 1417 | G -> A | No |
| 1551 | C -> | No |
| 1600 | C -> | No |
| 1600 | C -> G | No |
| 1609 | T -> C | No |
| 1619 | C -> | No |
| 1619 | C -> G | No |
| 1670 | C -> | No |
| 1670 | C -> A | No |
| 1684 | C -> G | No |
| 1710 | G -> | No |
| 1710 | G -> A | No |
| 1732 | T -> | No |
| 1758 | T -> C | No |
| 1765 | C -> | No |
| 1777 | T -> G | Yes |
| 1787 | A -> | No |
| 1787 | A -> C | No |
| 1801 | T -> | No |
| 1821 | C -> | No |
| 1821 | C -> A | No |
| 1853 | T -> | No |
| 1853 | T -> G | No |
| 1927 | T -> | No |
| 1927 | T -> G | No |
| 1983 | A -> | No |
| 1983 | A -> C | No |
| 2004 | C -> | No |
| 2015 | -> C | No |
| 2015 | -> G | No |
| 2047 | A -> C | Yes |
| 2054 | A -> C | Yes |
| 2055 | C -> G | Yes |
| 2057 | G -> C | Yes |
| 2062 | G -> T | Yes |
| 2087 | C -> T | No |
| 2089 | G -> T | No |
| 2093 | A -> C | Yes |
| 2130 | A -> C | Yes |
| 2132 | T -> | No |
| 2155 | A -> T | Yes |
| 2199 | A -> C | No |
| 2238 | T -> C | No |

[3019] The coding portion of transcript M78035_T9 (SEQ ID NO:875) is shown in bold; this coding portion starts at position 768 and ends at position 1685. The transcript also has the following SNPs as listed in Table 18 (given according to their position on the nucleotide sequence, with the alternative nucleic acid listed; the last column indicates whether the SNP is known or not; the presence of known SNPs in variant protein M78035_P6 (SEQ ID NO:925) sequence provides support for the deduced sequence of this variant protein according to the present invention).

TABLE 18
Nucleic acid SNPs

| SNP position | | |
|---|---|---|
| on nucleotide | Alternative | Previously |
| sequence | nucleic acid | known SNP? |
| 104 | A -> G | Yes |
| 272 | G -> A | No |
| 282 | G -> A | No |
| 323 | G -> T | No |
| 328 | C -> T | Yes |
| 411 | G -> T | No |
| 420 | C -> T | No |
| 609 | G -> C | No |
| 619 | C -> | No |
| 661 | C -> | No |
| 721 | T -> C | No |
| 734 | G -> A | No |
| 740 | C -> A | No |
| 764 | C -> T | Yes |
| 792 | C -> A | Yes |
| 1006 | C -> | No |
| 1006 | C -> G | No |
| 1021 | T -> | No |
| 1030 | A -> G | Yes |
| 1065 | A -> | No |
| 1065 | A -> C | No |
| 1183 | C -> | No |
| 1274 | T -> C | No |
| 1343 | G -> A | Yes |
| 1362 | G -> | No |
| 1362 | G -> T | No |
| 1363 | T -> G | No |
| 1448 | C -> | No |
| 1448 | C -> A | No |
| 1510 | C -> | No |
| 1537 | T -> | No |
| 1537 | T -> G | No |
| 1609 | C -> | No |
| 1609 | C -> G | No |
| 1629 | G -> A | No |
| 1763 | C -> | No |
| 1812 | C -> | No |
| 1812 | C -> G | No |
| 1821 | T -> C | No |
| 1831 | C -> | No |
| 1831 | C -> G | No |
| 1882 | C -> | No |
| 1882 | C -> A | No |
| 1896 | C -> G | No |
| 1922 | G -> | No |
| 1922 | G -> A | No |
| 1944 | T -> | No |
| 1970 | T -> C | No |
| 1977 | C -> | No |
| 1989 | T -> G | Yes |
| 1999 | A -> | No |
| 1999 | A -> C | No |
| 2013 | T -> | No |
| 2033 | C -> | No |
| 2033 | C -> A | No |
| 2065 | T -> | No |
| 2065 | T -> G | No |
| 2139 | T -> | No |
| 2139 | T -> G | No |
| 2195 | A -> | No |
| 2195 | A -> C | No |
| 2216 | C -> | No |
| 2227 | -> C | No |
| 2227 | -> G | No |
| 2259 | A -> C | Yes |
| 2266 | A -> C | Yes |
| 2267 | C -> G | Yes |
| 2269 | G -> C | Yes |
| 2274 | G -> T | Yes |
| 2299 | C -> T | No |
| 2301 | G -> T | No |
| 2305 | A -> C | Yes |
| 2342 | A -> C | Yes |
| 2344 | T -> | No |
| 2367 | A -> T | Yes |
| 2411 | A -> C | No |
| 2450 | T -> C | No |

[3020] Variant protein M78035_P8 (SEQ ID NO:926) according to the present invention has an amino acid sequence as given at the end of the application; it is encoded by transcript(s) M78035_T11 (SEQ ID NO:876). An alignment is given to the known protein (Adenosylhomocysteinase (SEQ ID NO:922)) at the end of the application. One or more alignments to one or more previously published protein sequences are given at the end of the application. A brief description of the relationship of the variant protein according to the present invention to each such aligned protein is as follows:

[3021] Comparison Report Between M78035_P8 (SEQ ID NO:926) and SAHH_HUMAN (SEQ ID NO:922):

[3022] 1. An isolated chimeric polypeptide encoding for M78035_P8 (SEQ ID NO:926), comprising a first amino acid sequence being at least 70%, optionally at least 80%, preferably at least 85%, more preferably at least 90% and most preferably at least 95% homologous to a polypeptide having the sequence MSDKLPYKV (SEQ ID NO:1474) corresponding to amino acids 1-9 of M78035_P8 (SEQ ID NO:926), and a second amino acid sequence being at least 90% homologous to VYAWKGETDEEYLWCIEQTLYFKDGPLNMILDDGGDLTNLIHTKYPQLLPGIRGISEETTTGVHNLYKMM ANGILKVPAINVNDSVTKSKFDNLYGCRESLIDGIKRATDVMIAGKVAVVAGYGDVGKGCAQALRGFGA RVIITEIDPINALQAAMEGYEVTTMDEACQEGNIFVTTTGCIDIILGRHFEQMKDDAIVCNIGHFDVEIDVK WLNENAVEKVNIKPQVDRYRLKNGRRIILLAEGRLVNLGCAMGHPSFVMSNSFTNQVMAQIELWTHPDK YPVGVHFLPKKLDEAVAEAHLGKLNVKLTKLTEKQAQYLGMSCDGPFKPDHYRY corresponding to amino acids 99-432 of SAHH_HUMAN (SEQ ID NO:922), which also corresponds to amino acids 10-343 of M78035_P8 (SEQ ID NO:926), wherein said first amino acid sequence and second amino acid sequence are contiguous and in a sequential order.

[3023] 2. An isolated polypeptide encoding for a head of M78035_P8 (SEQ ID NO:926), comprising a polypeptide being at least 70%, optionally at least about 80%, preferably at least about 85%, more preferably at least about 90% and most preferably at least about 95% homologous to the sequence MSDKLPYKV (SEQ ID NO:1474) of M78035_P8 (SEQ ID NO:926).

[3024] The location of the variant protein was determined according to results from a number of different software programs and analyses, including analyses from SignalP and other specialized programs. The variant protein is believed to be located as follows with regard to the cell: intracellularly. The protein localization is believed to be intracellularly because neither of the trans-membrane region prediction programs predicted a trans-membrane region for this protein. In addition both signal-peptide prediction programs predict that this protein is a non-secreted protein.

[3025] Variant protein M78035_P8 (SEQ ID NO:926) also has the following non-silent SNPs (Single Nucleotide Polymorphisms) as listed in Table 19, (given according to their position(s) on the amino acid sequence, with the alternative amino acid(s) listed; the last column indicates whether the SNP is known or not; the presence of known SNPs in variant protein M78035_P8 (SEQ ID NO:926) sequence provides support for the deduced sequence of this variant protein according to the present invention).

TABLE 19
Amino acid mutations

| SNP position(s) | | |
|---|---|---|
| on amino acid | Alternative | Previously |
| sequence | amino acid(s) | known SNP? |
| 22 | L -> P | No |
| 46 | L -> I | Yes |
| 117 | A -> | No |
| 117 | A -> G | No |
| 122 | I -> | No |
| 125 | K -> R | Yes |
| 137 | K -> | No |
| 137 | K -> Q | No |
| 176 | A -> | No |
| 236 | V -> G | No |
| 236 | V -> L | No |
| 236 | V -> | No |
| 264 | H -> Q | No |
| 264 | H -> | No |
| 285 | T -> | No |
| 294 | V -> | No |
| 294 | V -> G | No |
| 318 | T -> | No |
| 318 | T -> S | No |
| 325 | A -> T | No |

[3026] Variant protein M78035_P8 (SEQ ID NO:926) is encoded by the following transcript(s): M78035_T11 (SEQ ID NO:876), for which the sequence(s) is/are given at the end of the application. The coding portion of transcript M78035_T11 (SEQ ID NO:876) is shown in bold; this coding portion starts at position 132 and ends at position 1160. The transcript also has the following SNPs as listed in Table 20 (given according to their position on the nucleotide sequence, with the alternative nucleic acid listed; the last column indicates whether the SNP is known or not; the presence of known SNPs in variant protein M78035_P8 (SEQ ID NO:926) sequence provides support for the deduced sequence of this variant protein according to the present invention).

TABLE 20
Nucleic acid SNPs

| SNP position on nucleotide | | Previously |
|---|---|---|
| sequence | Alternative nucleic acid | known SNP? |
| 8 | C -> A | Yes |
| 140 | C -> T | No |
| 196 | T -> C | No |
| 209 | G -> A | No |
| 215 | C -> A | No |
| 239 | C -> T | Yes |
| 267 | C -> A | Yes |
| 481 | C -> | No |
| 481 | C -> G | No |
| 496 | T -> | No |
| 505 | A -> G | Yes |
| 540 | A -> | No |
| 540 | A -> C | No |
| 658 | C -> | No |
| 749 | T -> C | No |
| 818 | G -> A | Yes |
| 837 | G -> | No |
| 837 | G -> T | No |
| 838 | T -> G | No |
| 923 | C -> | No |
| 923 | C -> A | No |
| 985 | C -> | No |
| 1012 | T -> | No |
| 1012 | T -> G | No |
| 1084 | C -> | No |
| 1084 | C -> G | No |
| 1104 | G -> A | No |
| 1238 | C -> | No |
| 1287 | C -> | No |
| 1287 | C -> G | No |
| 1296 | T -> C | No |
| 1306 | C -> | No |
| 1306 | C -> G | No |
| 1357 | C -> | No |
| 1357 | C -> A | No |
| 1371 | C -> G | No |
| 1397 | G -> | No |
| 1397 | G -> A | No |
| 1419 | T -> | No |
| 1445 | T -> C | No |
| 1452 | C -> | No |
| 1464 | T -> G | Yes |
| 1474 | A -> | No |
| 1474 | A -> C | No |
| 1488 | T -> | No |
| 1508 | C -> | No |
| 1508 | C -> A | No |
| 1540 | T -> | No |
| 1540 | T -> G | No |
| 1614 | T -> | No |
| 1614 | T -> G | No |
| 1670 | A -> | No |
| 1670 | A -> C | No |
| 1691 | C -> | No |
| 1702 | -> C | No |
| 1702 | -> G | No |
| 1734 | A -> C | Yes |
| 1741 | A -> C | Yes |
| 1742 | C -> G | Yes |
| 1744 | G -> C | Yes |
| 1749 | G -> T | Yes |
| 1774 | C -> T | No |
| 1776 | G -> T | No |
| 1780 | A -> C | Yes |
| 1817 | A -> C | Yes |
| 1819 | T -> | No |
| 1842 | A -> T | Yes |
| 1886 | A -> C | No |
| 1925 | T -> C | No |

[3027] Variant protein M78035_P18 (SEQ ID NO:927) according to the present invention has an amino acid sequence as given at the end of the application; it is encoded by transcript(s) M78035_T27 (SEQ ID NO:881). The location of the variant protein was determined according to results from a number of different software programs and analyses, including analyses from SignalP and other specialized programs. The variant protein is believed to be located as follows with regard to the cell: intracellularly. The protein localization is believed to be intracellularly because neither of the trans-membrane region prediction programs predicted a trans-membrane region for this protein. In addition both signal-peptide prediction programs predict that this protein is a non-secreted protein.

[3028] Variant protein M78035_P18 (SEQ ID NO:927) also has the following non-silent SNPs (Single Nucleotide Polymorphisms) as listed in Table 21, (given according to their position(s) on the amino acid sequence, with the alternative amino acid(s) listed; the last column indicates whether the SNP is known or not; the presence of known SNPs in variant protein M78035_P18 (SEQ ID NO:927) sequence provides support for the deduced sequence of this variant protein according to the present invention).

TABLE 21
Amino acid mutations

| SNP position(s) on amino acid | | Previously |
|---|---|---|
| sequence | Alternative amino acid(s) | known SNP? |
| 19 | R -> H | No |
| 36 | R -> L | No |
| 38 | R -> W | Yes |
| 65 | E -> D | No |
| 131 | W -> C | No |
| 135 | P -> | No |
| 149 | P -> | No |

[3029] Variant protein M78035_P18 (SEQ ID NO:927) is encoded by the following transcript(s): M78035_T27 (SEQ ID NO:881), for which the sequence(s) is/are given at the end of the application. The coding portion of transcript M78035_T27 (SEQ ID NO:881) is shown in bold; this coding portion starts at position 132 and ends at position 617. The transcript also has the following SNPs as listed in Table 22 (given according to their position on the nucleotide sequence, with the alternative nucleic acid listed; the last column indicates whether the SNP is known or not; the presence of known SNPs in variant protein M78035_P18 (SEQ ID NO:927) sequence provides support for the deduced sequence of this variant protein according to the present invention).

TABLE 22
Nucleic acid SNPs

| SNP position on nucleotide | | Previously |
|---|---|---|
| sequence | Alternative nucleic acid | known SNP? |
| 8 | C -> A | Yes |
| 140 | C -> T | No |
| 187 | G -> A | No |
| 197 | G -> A | No |
| 238 | G -> T | No |
| 243 | C -> T | Yes |
| 326 | G -> T | No |
| 335 | C -> T | No |
| 524 | G -> C | No |
| 534 | C -> | No |
| 576 | C -> | No |
| 980 | G -> A | Yes |

[3030] Variant protein M78035_P19 (SEQ ID NO:928) according to the present invention has an amino acid sequence as given at the end of the application; it is encoded by transcript(s) M78035_T28 (SEQ ID NO:882). The location of the variant protein was determined according to results from a number of different software programs and analyses, including analyses from SignalP and other specialized programs. The variant protein is believed to be located as follows with regard to the cell: intracellularly. The protein localization is believed to be intracellularly because neither of the trans-membrane region prediction programs predicted a trans-membrane region for this protein. In addition both signal-peptide prediction programs predict that this protein is a non-secreted protein.

[3031] Variant protein M78035_P19 (SEQ ID NO:928) is encoded by the following transcript(s): M78035_T28 (SEQ ID NO:882), for which the sequence(s) is/are given at the end of the application. The coding portion of transcript M78035_T28 (SEQ ID NO:882) is shown in bold; this coding portion starts at position 585 and ends at position 902. The transcript also has the following SNPs as listed in Table 23 (given according to their position on the nucleotide sequence, with the alternative nucleic acid listed; the last column indicates whether the SNP is known or not; the presence of known SNPs in variant protein M78035_P19 (SEQ ID NO:928) sequence provides support for the deduced sequence of this variant protein according to the present invention).

TABLE 23
Nucleic acid SNPs

| SNP position on nucleotide | | Previously |
|---|---|---|
| sequence | Alternative nucleic acid | known SNP? |
| 483 | G -> A | Yes |
| 1153 | G -> C | Yes |
| 1366 | C -> T | Yes |
| 1673 | G -> A | No |

[3032] As noted above, cluster M78035 features 39 segment(s), which were listed in Table 2 above and for which the sequence(s) are given at the end of the application. These segment(s) are portions of nucleic acid sequence(s) which are described herein separately because they are of particular interest. A description of each segment according to the present invention is now provided.

[3033] Segment cluster M78035_node_{—}4 (SEQ ID NO:883) according to the present invention is supported by 163 libraries. The number of libraries was determined as previously described. This segment can be found in the following transcript(s): M78035_T0 (SEQ ID NO:871), M78035_T7 (SEQ ID NO:874), M78035_T11 (SEQ ID NO:876), M78035_T17 (SEQ ID NO:877), M78035_T18 (SEQ ID NO:878), M78035_T19 (SEQ ID NO:879), M78035_T20 (SEQ ID NO:880) and M78035_T27 (SEQ ID NO:881). Table 24 below describes the starting and ending position of this segment on each transcript.

TABLE 24
Segment location on transcripts

| | Segment | Segment |
|---|---|---|
| Transcript name | starting position | ending position |
| M78035_T0 (SEQ ID NO: 871) | 1 | 159 |
| M78035_T7 (SEQ ID NO: 874) | 1 | 159 |
| M78035_T11 (SEQ ID NO: 876) | 1 | 159 |
| M78035_T17 (SEQ ID NO: 877) | 1 | 159 |
| M78035_T18 (SEQ ID NO: 878) | 1 | 159 |
| M78035_T19 (SEQ ID NO: 879) | 1 | 159 |
| M78035_T20 (SEQ ID NO: 880) | 1 | 159 |
| M78035_T27 (SEQ ID NO: 881) | 1 | 159 |

[3034] Segment cluster M78035_node_{—}6 (SEQ ID NO:884) according to the present invention is supported by 5 libraries. The number of libraries was determined as previously described. This segment can be found in the following transcript(s): M78035_T4 (SEQ ID NO:873). Table 25 below describes the starting and ending position of this segment on each transcript.

TABLE 25
Segment location on transcripts

| | Segment | Segment |
|---|---|---|
| Transcript name | starting position | ending position |
| M78035_T4 (SEQ ID NO: 873) | 1 | 840 |

[3035] Segment cluster M78035_node_{—}10 (SEQ ID NO:885) according to the present invention is supported by 3 libraries. The number of libraries was determined as previously described. This segment can be found in the following transcript(s): M78035_T3 (SEQ ID NO:872) and M78035_T9 (SEQ ID NO:875). Table 26 below describes the starting and ending position of this segment on each transcript.

TABLE 26
Segment location on transcripts

| | Segment | Segment |
|---|---|---|
| Transcript name | starting position | ending position |
| M78035_T3 (SEQ ID NO: 872) | 1 | 244 |
| M78035_T9 (SEQ ID NO: 875) | 1 | 244 |

[3036] Segment cluster M78035_node_{—}17 (SEQ ID NO:886) according to the present invention is supported by 189 libraries. The number of libraries was determined as previously described. This segment can be found in the following transcript(s): M78035_T0 (SEQ ID NO:871), M78035_T3 (SEQ ID NO:872), M78035_T4 (SEQ ID NO:873), M78035_T7 (SEQ ID NO:874), M78035_T9 (SEQ ID NO:875), M78035_T17 (SEQ ID NO:877), M78035_T18 (SEQ ID NO:878), M78035_T19 (SEQ ID NO:879), M78035_T20 (SEQ ID NO:880) and M78035_T27 (SEQ ID NO:881). Table 27 below describes the starting and ending position of this segment on each transcript.

TABLE 27
Segment location on transcripts

| | Segment | Segment |
|---|---|---|
| Transcript name | starting position | ending position |
| M78035_T0 (SEQ ID NO: 871) | 160 | 350 |
| M78035_T3 (SEQ ID NO: 872) | 245 | 435 |
| M78035_T4 (SEQ ID NO: 873) | 841 | 1031 |
| M78035_T7 (SEQ ID NO: 874) | 160 | 350 |
| M78035_T9 (SEQ ID NO: 875) | 245 | 435 |
| M78035_T17 (SEQ ID NO: 877) | 160 | 350 |
| M78035_T18 (SEQ ID NO: 878) | 160 | 350 |
| M78035_T19 (SEQ ID NO: 879) | 160 | 350 |
| M78035_T20 (SEQ ID NO: 880) | 160 | 350 |
| M78035_T27 (SEQ ID NO: 881) | 160 | 350 |

[3037] Segment cluster M78035_node_{—}18 (SEQ ID NO:887) according to the present invention is supported by 2 libraries. The number of libraries was determined as previously described. This segment can be found in the following transcript(s): M78035_T9 (SEQ ID NO:875) and M78035_T27 (SEQ ID NO:881). Table 28 below describes the starting and ending position of this segment on each transcript.

TABLE 28
Segment location on transcripts

| | Segment | Segment |
|---|---|---|
| Transcript name | starting position | ending position |
| M78035_T9 (SEQ ID NO: 875) | 436 | 608 |
| M78035_T27 (SEQ ID NO: 881) | 351 | 523 |

[3038] Segment cluster M78035_node_{—}21 (SEQ ID NO:888) according to the present invention is supported by 3 libraries. The number of libraries was determined as previously described. This segment can be found in the following transcript(s): M78035_T27 (SEQ ID NO:881). Table 29 below describes the starting and ending position of this segment on each transcript.

TABLE 29
Segment location on transcripts

| | Segment | Segment |
|---|---|---|
| Transcript name | starting position | ending position |
| M78035_T27 (SEQ ID NO: 881) | 600 | 998 |

[3039] Segment cluster M78035_node_{—}25 (SEQ ID NO:889) according to the present invention is supported by 171 libraries. The number of libraries was determined as previously described. This segment can be found in the following transcript(s): M78035_T0 (SEQ ID NO:871), M78035_T3 (SEQ ID NO:872), M78035_T4 (SEQ ID NO:873), M78035_T7 (SEQ ID NO:874), M78035_T9 (SEQ ID NO:875), M78035_T11 (SEQ ID NO:876), M78035_T17 (SEQ ID NO:877), M78035_T18 (SEQ ID NO:878), M78035_T19 (SEQ ID NO:879) and M78035_T20 (SEQ ID NO:880). Table 30 below describes the starting and ending position of this segment on each transcript.

TABLE 30
Segment location on transcripts

| | Segment | Segment |
|---|---|---|
| Transcript name | starting position | ending position |
| M78035_T0 (SEQ ID NO: 871) | 427 | 569 |
| M78035_T3 (SEQ ID NO: 872) | 512 | 654 |
| M78035_T4 (SEQ ID NO: 873) | 1108 | 1250 |
| M78035_T7 (SEQ ID NO: 874) | 473 | 615 |
| M78035_T9 (SEQ ID NO: 875) | 685 | 827 |
| M78035_T11 (SEQ ID NO: 876) | 160 | 302 |
| M78035_T17 (SEQ ID NO: 877) | 427 | 569 |
| M78035_T18 (SEQ ID NO: 878) | 427 | 569 |
| M78035_T19 (SEQ ID NO: 879) | 427 | 569 |
| M78035_T20 (SEQ ID NO: 880) | 427 | 569 |

[3040] Segment cluster M78035_node_{—}33 (SEQ ID NO:890) according to the present invention is supported by 191 libraries. The number of libraries was determined as previously described. This segment can be found in the following transcript(s): M78035_T0 (SEQ ID NO:871), M78035_T3 (SEQ ID NO:872), M78035_T4 (SEQ ID NO:873), M78035_T7 (SEQ ID NO:874), M78035_T9 (SEQ ID NO:875), M78035_T11 (SEQ ID NO:876), M78035_T17 (SEQ ID NO:877), M78035_T18 (SEQ ID NO:878), M78035_T19 (SEQ ID NO:879) and M78035_T20 (SEQ ID NO:880). Table 31 below describes the starting and ending position of this segment on each transcript.

TABLE 31
Segment location on transcripts

| | Segment | Segment |
|---|---|---|
| Transcript name | starting position | ending position |
| M78035_T0 (SEQ ID NO: 871) | 690 | 860 |
| M78035_T3 (SEQ ID NO: 872) | 775 | 945 |
| M78035_T4 (SEQ ID NO: 873) | 1371 | 1541 |
| M78035_T7 (SEQ ID NO: 874) | 736 | 906 |
| M78035_T9 (SEQ ID NO: 875) | 948 | 1118 |
| M78035_T11 (SEQ ID NO: 876) | 423 | 593 |
| M78035_T17 (SEQ ID NO: 877) | 690 | 860 |
| M78035_T18 (SEQ ID NO: 878) | 690 | 860 |
| M78035_T19 (SEQ ID NO: 879) | 690 | 860 |
| M78035_T20 (SEQ ID NO: 880) | 690 | 860 |

[3041] Segment cluster M78035_node_{—}55 (SEQ ID NO:891) according to the present invention is supported by 238 libraries. The number of libraries was determined as previously described. This segment can be found in the following transcript(s): M78035_T0 (SEQ ID NO:871), M78035_T3 (SEQ ID NO:872), M78035_T4 (SEQ ID NO:873), M78035_T7 (SEQ ID NO:874), M78035_T9 (SEQ ID NO:875) and M78035_T11 (SEQ ID NO:876). Table 32 below describes the starting and ending position of this segment on each transcript.

TABLE 32
Segment location on transcripts

| | Segment | Segment |
|---|---|---|
| Transcript name | starting position | ending position |
| M78035_T0 (SEQ ID NO: 871) | 1438 | 1578 |
| M78035_T3 (SEQ ID NO: 872) | 1523 | 1663 |
| M78035_T4 (SEQ ID NO: 873) | 2119 | 2259 |
| M78035_T7 (SEQ ID NO: 874) | 1484 | 1624 |
| M78035_T9 (SEQ ID NO: 875) | 1696 | 1836 |
| M78035_T11 (SEQ ID NO: 876) | 1171 | 1311 |

[3042] Segment cluster M78035_node_{—}58 (SEQ ID NO:892) according to the present invention is supported by 273 libraries. The number of libraries was determined as previously described. This segment can be found in the following transcript(s): M78035_T0 (SEQ ID NO:871), M78035_T3 (SEQ ID NO:872), M78035_T4 (SEQ ID NO:873), M78035_T7 (SEQ ID NO:874), M78035_T9 (SEQ ID NO:875) and M78035_T11 (SEQ ID NO:876). Table 33 below describes the starting and ending position of this segment on each transcript.

TABLE 33
Segment location on transcripts

| | Segment | Segment |
|---|---|---|
| Transcript name | starting position | ending position |
| M78035_T0 (SEQ ID NO: 871) | 1663 | 1813 |
| M78035_T3 (SEQ ID NO: 872) | 1748 | 1898 |
| M78035_T4 (SEQ ID NO: 873) | 2344 | 2494 |
| M78035_T7 (SEQ ID NO: 874) | 1709 | 1859 |
| M78035_T9 (SEQ ID NO: 875) | 1921 | 2071 |
| M78035_T11 (SEQ ID NO: 876) | 1396 | 1546 |

[3043] Segment cluster M78035_node_{—}60 (SEQ ID NO:893) according to the present invention is supported by 268 libraries. The number of libraries was determined as previously described. This segment can be found in the following transcript(s): M78035_T0 (SEQ ID NO:871), M78035_T3 (SEQ ID NO:872), M78035_T4 (SEQ ID NO:873), M78035_T7 (SEQ ID NO:874), M78035_T9 (SEQ ID NO:875) and M78035_T11 (SEQ ID NO:876). Table 34 below describes the starting and ending position of this segment on each transcript.

TABLE 34
Segment location on transcripts

| | Segment | Segment |
|---|---|---|
| Transcript name | starting position | ending position |
| M78035_T0 (SEQ ID NO: 871) | 1899 | 2194 |
| M78035_T3 (SEQ ID NO: 872) | 1984 | 2279 |
| M78035_T4 (SEQ ID NO: 873) | 2580 | 2875 |
| M78035_T7 (SEQ ID NO: 874) | 1945 | 2240 |
| M78035_T9 (SEQ ID NO: 875) | 2157 | 2452 |
| M78035_T11 (SEQ ID NO: 876) | 1632 | 1927 |

[3044] Segment cluster M78035_node_{—}62 (SEQ ID NO:894) according to the present invention is supported by 4 libraries. The number of libraries was determined as previously described. This segment can be found in the following transcript(s): M78035_T19 (SEQ ID NO:879) and M78035_T20 (SEQ ID NO:880). Table 35 below describes the starting and ending position of this segment on each transcript.

TABLE 35
Segment location on transcripts

| | Segment | Segment |
|---|---|---|
| Transcript name | starting position | ending position |
| M78035_T19 (SEQ ID NO: 879) | 1438 | 2099 |
| M78035_T20 (SEQ ID NO: 880) | 1438 | 2099 |

[3045] Segment cluster M78035_node_{—}63 (SEQ ID NO:895) according to the present invention is supported by 8 libraries. The number of libraries was determined as previously described. This segment can be found in the following transcript(s): M78035_T19 (SEQ ID NO:879), M78035_T20 (SEQ ID NO:880) and M78035_T28 (SEQ ID NO:882). Table 36 below describes the starting and ending position of this segment on each transcript.

TABLE 36
Segment location on transcripts

| | Segment | Segment |
|---|---|---|
| Transcript name | starting position | ending position |
| M78035_T19 (SEQ ID NO: 879) | 2100 | 2490 |
| M78035_T20 (SEQ ID NO: 880) | 2100 | 2490 |
| M78035_T28 (SEQ ID NO: 882) | 143 | 533 |

[3046] Segment cluster M78035_node_{—}64 (SEQ ID NO:896) according to the present invention is supported by 5 libraries. The number of libraries was determined as previously described. This segment can be found in the following transcript(s): M78035_T19 (SEQ ID NO:879) and M78035_T28 (SEQ ID NO:882). Table 37 below describes the starting and ending position of this segment on each transcript.

TABLE 37
Segment location on transcripts

| | Segment | Segment |
|---|---|---|
| Transcript name | starting position | ending position |
| M78035_T19 (SEQ ID NO: 879) | 2491 | 2951 |
| M78035_T28 (SEQ ID NO: 882) | 534 | 994 |

[3047] Segment cluster M78035_node_{—}65 (SEQ ID NO:897) according to the present invention is supported by 3 libraries. The number of libraries was determined as previously described. This segment can be found in the following transcript(s): M78035_T19 (SEQ ID NO:879), M78035_T20 (SEQ ID NO:880) and M78035_T28 (SEQ ID NO:882). Table 38 below describes the starting and ending position of this segment on each transcript.

TABLE 38
Segment location on transcripts

| | Segment | Segment |
|---|---|---|
| Transcript name | starting position | ending position |
| M78035_T19 (SEQ ID NO: 879) | 2952 | 3919 |
| M78035_T20 (SEQ ID NO: 880) | 2491 | 3458 |
| M78035_T28 (SEQ ID NO: 882) | 995 | 1962 |

[3048] Segment cluster M78035_node_{—}69 (SEQ ID NO:898) according to the present invention is supported by 1 libraries. The number of libraries was determined as previously described. This segment can be found in the following transcript(s): M78035_T18 (SEQ ID NO:878). Table 39 below describes the starting and ending position of this segment on each transcript.

TABLE 39
Segment location on transcripts

| | Segment | Segment |
|---|---|---|
| Transcript name | starting position | ending position |
| M78035_T18 (SEQ ID NO: 878) | 1438 | 1577 |

[3049] Segment cluster M78035_node_{—}71 (SEQ ID NO:899) according to the present invention is supported by 7 libraries. The number of libraries was determined as previously described. This segment can be found in the following transcript(s): M78035_T17 (SEQ ID NO:877) and M78035_T18 (SEQ ID NO:878). Table 40 below describes the starting and ending position of this segment on each transcript.

TABLE 40
Segment location on transcripts

| | Segment | Segment |
|---|---|---|
| Transcript name | starting position | ending position |
| M78035_T17 (SEQ ID NO: 877) | 1438 | 3302 |
| M78035_T18 (SEQ ID NO: 878) | 1578 | 3442 |

[3050] According to an optional embodiment of the present invention, short segments related to the above cluster are also provided. These segments are up to about 120 bp in length, and so are included in a separate description.

[3051] Segment cluster M78035_node_{—}14 (SEQ ID NO:900) according to the present invention is supported by 2 libraries. The number of libraries was determined as previously described. This segment can be found in the following transcript(s): M78035_T28 (SEQ ID NO:882). Table 41 below describes the starting and ending position of this segment on each transcript.

TABLE 41
Segment location on transcripts

| | Segment | Segment |
|---|---|---|
| Transcript name | starting position | ending position |
| M78035_T28 (SEQ ID NO: 882) | 1 | 95 |

[3052] Segment cluster M78035_node_{—}15 (SEQ ID NO:901) according to the present invention is supported by 1 libraries. The number of libraries was determined as previously described. This segment can be found in the following transcript(s): M78035_T28 (SEQ ID NO:882). Table 42 below describes the starting and ending position of this segment on each transcript.

TABLE 42
Segment location on transcripts

| | Segment | Segment |
|---|---|---|
| Transcript name | starting position | ending position |
| M78035_T28 (SEQ ID NO: 882) | 96 | 142 |

[3053] Segment cluster M78035_node_{—}20 (SEQ ID NO:902) according to the present invention is supported by 162 libraries. The number of libraries was determined as previously described. This segment can be found in the following transcript(s): M78035_T0 (SEQ ID NO:871), M78035_T3 (SEQ ID NO:872), M78035_T4 (SEQ ID NO:873), M78035_T7 (SEQ ID NO:874), M78035_T9 (SEQ ID NO:875), M78035_T17 (SEQ ID NO:877), M78035_T18 (SEQ ID NO:878), M78035_T19 (SEQ ID NO:879), M78035_T20 (SEQ ID NO:880) and M78035_T27 (SEQ ID NO:881). Table 43 below describes the starting and ending position of this segment on each transcript.

TABLE 43
Segment location on transcripts

| | Segment | Segment |
|---|---|---|
| Transcript name | starting position | ending position |
| M78035_T0 (SEQ ID NO: 871) | 351 | 426 |
| M78035_T3 (SEQ ID NO: 872) | 436 | 511 |
| M78035_T4 (SEQ ID NO: 873) | 1032 | 1107 |
| M78035_T7 (SEQ ID NO: 874) | 351 | 426 |
| M78035_T9 (SEQ ID NO: 875) | 609 | 684 |
| M78035_T17 (SEQ ID NO: 877) | 351 | 426 |
| M78035_T18 (SEQ ID NO: 878) | 351 | 426 |
| M78035_T19 (SEQ ID NO: 879) | 351 | 426 |
| M78035_T20 (SEQ ID NO: 880) | 351 | 426 |
| M78035_T27 (SEQ ID NO: 881) | 524 | 599 |

[3054] Segment cluster M78035_node_{—}24 (SEQ ID NO:903) according to the present invention is supported by 1 libraries. The number of libraries was determined as previously described. This segment can be found in the following transcript(s): M78035_T7 (SEQ ID NO:874). Table 44 below describes the starting and ending position of this segment on each transcript.

TABLE 44
Segment location on transcripts

| | Segment | Segment |
|---|---|---|
| Transcript name | starting position | ending position |
| M78035_T7 (SEQ ID NO: 874) | 427 | 472 |

[3055] Segment cluster M78035_node_{—}26 (SEQ ID NO:904) according to the present invention can be found in the following transcript(s): M78035_T0 (SEQ ID NO:871), M78035_T3 (SEQ ID NO:872), M78035_T4 (SEQ ID NO:873), M78035_T7 (SEQ ID NO:874), M78035_T9 (SEQ ID NO:875), M78035_T11 (SEQ ID NO:876), M78035_T17 (SEQ ID NO:877), M78035_T18 (SEQ ID NO:878), M78035_T19 (SEQ ID NO:879) and M78035_T20 (SEQ ID NO:880). Table 45 below describes the starting and ending position of this segment on each transcript.

TABLE 45
Segment location on transcripts

| | Segment | Segment |
|---|---|---|
| Transcript name | starting position | ending position |
| M78035_T0 (SEQ ID NO: 871) | 570 | 576 |
| M78035_T3 (SEQ ID NO: 872) | 655 | 661 |
| M78035_T4 (SEQ ID NO: 873) | 1251 | 1257 |
| M78035_T7 (SEQ ID NO: 874) | 616 | 622 |
| M78035_T9 (SEQ ID NO: 875) | 828 | 834 |
| M78035_T11 (SEQ ID NO: 876) | 303 | 309 |
| M78035_T17 (SEQ ID NO: 877) | 570 | 576 |
| M78035_T18 (SEQ ID NO: 878) | 570 | 576 |
| M78035_T19 (SEQ ID NO: 879) | 570 | 576 |
| M78035_T20 (SEQ ID NO: 880) | 570 | 576 |

[3056] Segment cluster M78035_node_{—}28 (SEQ ID NO:905) according to the present invention is supported by 161 libraries. The number of libraries was determined as previously described. This segment can be found in the following transcript(s): M78035_T0 (SEQ ID NO:871), M78035_T3 (SEQ ID NO:872), M78035_T4 (SEQ ID NO:873), M78035_T7 (SEQ ID NO:874), M78035_T9 (SEQ ID NO:875), M78035_T11 (SEQ ID NO:876), M78035_T17 (SEQ ID NO:877), M78035_T18 (SEQ ID NO:878), M78035_T19 (SEQ ID NO:879) and M78035_T20 (SEQ ID NO:880). Table 46 below describes the starting and ending position of this segment on each transcript.

TABLE 46
Segment location on transcripts

| | Segment | Segment |
|---|---|---|
| Transcript name | starting position | ending position |
| M78035_T0 (SEQ ID NO: 871) | 577 | 622 |
| M78035_T3 (SEQ ID NO: 872) | 662 | 707 |
| M78035_T4 (SEQ ID NO: 873) | 1258 | 1303 |
| M78035_T7 (SEQ ID NO: 874) | 623 | 668 |
| M78035_T9 (SEQ ID NO: 875) | 835 | 880 |
| M78035_T11 (SEQ ID NO: 876) | 310 | 355 |
| M78035_T17 (SEQ ID NO: 877) | 577 | 622 |
| M78035_T18 (SEQ ID NO: 878) | 577 | 622 |
| M78035_T19 (SEQ ID NO: 879) | 577 | 622 |
| M78035_T20 (SEQ ID NO: 880) | 577 | 622 |

[3057] Segment cluster M78035_node_{—}29 (SEQ ID NO:906) according to the present invention is supported by 157 libraries. The number of libraries was determined as previously described. This segment can be found in the following transcript(s): M78035_T0 (SEQ ID NO:871), M78035_T3 (SEQ ID NO:872), M78035_T4 (SEQ ID NO:873), M78035_T7 (SEQ ID NO:874), M78035_T9 (SEQ ID NO:875), M78035_T11 (SEQ ID NO:876), M78035_T17 (SEQ ID NO:877), M78035_T18 (SEQ ID NO:878), M78035_T19 (SEQ ID NO:879) and M78035_T20 (SEQ ID NO:880). Table 47 below describes the starting and ending position of this segment on each transcript.

TABLE 47
Segment location on transcripts

| | Segment | Segment |
|---|---|---|
| Transcript name | starting position | ending position |
| M78035_T0 (SEQ ID NO: 871) | 623 | 657 |
| M78035_T3 (SEQ ID NO: 872) | 708 | 742 |
| M78035_T4 (SEQ ID NO: 873) | 1304 | 1338 |
| M78035_T7 (SEQ ID NO: 874) | 669 | 703 |
| M78035_T9 (SEQ ID NO: 875) | 881 | 915 |
| M78035_T11 (SEQ ID NO: 876) | 356 | 390 |
| M78035_T17 (SEQ ID NO: 877) | 623 | 657 |
| M78035_T18 (SEQ ID NO: 878) | 623 | 657 |
| M78035_T19 (SEQ ID NO: 879) | 623 | 657 |
| M78035_T20 (SEQ ID NO: 880) | 623 | 657 |

[3058] Segment cluster M78035_node_{—}30 (SEQ ID NO:907) according to the present invention can be found in the following transcript(s): M78035_T0 (SEQ ID NO:871), M78035_T3 (SEQ ID NO:872), M78035_T4 (SEQ ID NO:873), M78035_T7 (SEQ ID NO:874), M78035_T9 (SEQ ID NO:875), M78035_T11 (SEQ ID NO:876), M78035_T17 (SEQ ID NO:877), M78035_T18 (SEQ ID NO:878), M78035_T19 (SEQ ID NO:879) and M78035_T20 (SEQ ID NO:880). Table 48 below describes the starting and ending position of this segment on each transcript.

TABLE 48
Segment location on transcripts

| | Segment | Segment |
|---|---|---|
| Transcript name | starting position | ending position |
| M78035_T0 (SEQ ID NO: 871) | 658 | 664 |
| M78035_T3 (SEQ ID NO: 872) | 743 | 749 |
| M78035_T4 (SEQ ID NO: 873) | 1339 | 1345 |
| M78035_T7 (SEQ ID NO: 874) | 704 | 710 |
| M78035_T9 (SEQ ID NO: 875) | 916 | 922 |
| M78035_T11 (SEQ ID NO: 876) | 391 | 397 |
| M78035_T17 (SEQ ID NO: 877) | 658 | 664 |
| M78035_T18 (SEQ ID NO: 878) | 658 | 664 |
| M78035_T19 (SEQ ID NO: 879) | 658 | 664 |
| M78035_T20 (SEQ ID NO: 880) | 658 | 664 |

[3059] Segment cluster M78035_node_{—}31 (SEQ ID NO:908) according to the present invention can be found in the following transcript(s): M78035_T0 (SEQ ID NO:871), M78035_T3 (SEQ ID NO:872), M78035_T4 (SEQ ID NO:873), M78035_T7 (SEQ ID NO:874), M78035_T9 (SEQ ID NO:875), M78035_T11 (SEQ ID NO:876), M78035_T17 (SEQ ID NO:877), M78035_T18 (SEQ ID NO:878), M78035_T19 (SEQ ID NO:879) and M78035_T20 (SEQ ID NO:880). Table 49 below describes the starting and ending position of this segment on each transcript.

TABLE 49
Segment location on transcripts

| | Segment | Segment |
|---|---|---|
| Transcript name | starting position | ending position |
| M78035_T0 (SEQ ID NO: 871) | 665 | 689 |
| M78035_T3 (SEQ ID NO: 872) | 750 | 774 |
| M78035_T4 (SEQ ID NO: 873) | 1346 | 1370 |
| M78035_T7 (SEQ ID NO: 874) | 711 | 735 |
| M78035_T9 (SEQ ID NO: 875) | 923 | 947 |
| M78035_T11 (SEQ ID NO: 876) | 398 | 422 |
| M78035_T17 (SEQ ID NO: 877) | 665 | 689 |
| M78035_T18 (SEQ ID NO: 878) | 665 | 689 |
| M78035_T19 (SEQ ID NO: 879) | 665 | 689 |
| M78035_T20 (SEQ ID NO: 880) | 665 | 689 |

[3060] Segment cluster M78035_node_{—}34 (SEQ ID NO:909) according to the present invention can be found in the following transcript(s): M78035_T0 (SEQ ID NO:871), M78035_T3 (SEQ ID NO:872), M78035_T4 (SEQ ID NO:873), M78035_T7 (SEQ ID NO:874), M78035_T9 (SEQ ID NO:875), M78035_T11 (SEQ ID NO:876), M78035_T17 (SEQ ID NO:877), M78035_T18 (SEQ ID NO:878), M78035_T19 (SEQ ID NO:879) and M78035_T20 (SEQ ID NO:880). Table 50 below describes the starting and ending position of this segment on each transcript.

TABLE 50
Segment location on transcripts

| | Segment | Segment |
|---|---|---|
| Transcript name | starting position | ending position |
| M78035_T0 (SEQ ID NO: 871) | 861 | 878 |
| M78035_T3 (SEQ ID NO: 872) | 946 | 963 |
| M78035_T4 (SEQ ID NO: 873) | 1542 | 1559 |
| M78035_T7 (SEQ ID NO: 874) | 907 | 924 |
| M78035_T9 (SEQ ID NO: 875) | 1119 | 1136 |
| M78035_T11 (SEQ ID NO: 876) | 594 | 611 |
| M78035_T17 (SEQ ID NO: 877) | 861 | 878 |
| M78035_T18 (SEQ ID NO: 878) | 861 | 878 |
| M78035_T19 (SEQ ID NO: 879) | 861 | 878 |
| M78035_T20 (SEQ ID NO: 880) | 861 | 878 |

[3061] Segment cluster M78035_node_{—}35 (SEQ ID NO:910) according to the present invention can be found in the following transcript(s): M78035_T0 (SEQ ID NO:871), M78035_T3 (SEQ ID NO:872), M78035_T4 (SEQ ID NO:873), M78035_T7 (SEQ ID NO:874), M78035_T9 (SEQ ID NO:875), M78035_T11 (SEQ ID NO:876), M78035_T17 (SEQ ID NO:877), M78035_T18 (SEQ ID NO:878), M78035_T19 (SEQ ID NO:879) and M78035_T20 (SEQ ID NO:880). Table 51 below describes the starting and ending position of this segment on each transcript.

TABLE 51
Segment location on transcripts

| | Segment | Segment |
|---|---|---|
| Transcript name | starting position | ending position |
| M78035_T0 (SEQ ID NO: 871) | 879 | 897 |
| M78035_T3 (SEQ ID NO: 872) | 964 | 982 |
| M78035_T4 (SEQ ID NO: 873) | 1560 | 1578 |
| M78035_T7 (SEQ ID NO: 874) | 925 | 943 |
| M78035_T9 (SEQ ID NO: 875) | 1137 | 1155 |
| M78035_T11 (SEQ ID NO: 876) | 612 | 630 |
| M78035_T17 (SEQ ID NO: 877) | 879 | 897 |
| M78035_T18 (SEQ ID NO: 878) | 879 | 897 |
| M78035_T19 (SEQ ID NO: 879) | 879 | 897 |
| M78035_T20 (SEQ ID NO: 880) | 879 | 897 |

[3062] Segment cluster M78035_node_{—}37 (SEQ ID NO:911) according to the present invention is supported by 177 libraries. The number of libraries was determined as previously described. This segment can be found in the following transcript(s): M78035_T0 (SEQ ID NO:871), M78035_T3 (SEQ ID NO:872), M78035_T4 (SEQ ID NO:873), M78035_T7 (SEQ ID NO:874), M78035_T9 (SEQ ID NO:875), M78035_T11 (SEQ ID NO:876), M78035_T17 (SEQ ID NO:877), M78035_T18 (SEQ ID NO:878), M78035_T19 (SEQ ID NO:879) and M78035_T20 (SEQ ID NO:880). Table 52 below describes the starting and ending position of this segment on each transcript.

TABLE 52
Segment location on transcripts

| | Segment | Segment |
|---|---|---|
| Transcript name | starting position | ending position |
| M78035_T0 (SEQ ID NO: 871) | 898 | 985 |
| M78035_T3 (SEQ ID NO: 872) | 983 | 1070 |
| M78035_T4 (SEQ ID NO: 873) | 1579 | 1666 |
| M78035_T7 (SEQ ID NO: 874) | 944 | 1031 |
| M78035_T9 (SEQ ID NO: 875) | 1156 | 1243 |
| M78035_T11 (SEQ ID NO: 876) | 631 | 718 |
| M78035_T17 (SEQ ID NO: 877) | 898 | 985 |
| M78035_T18 (SEQ ID NO: 878) | 898 | 985 |
| M78035_T19 (SEQ ID NO: 879) | 898 | 985 |
| M78035_T20 (SEQ ID NO: 880) | 898 | 985 |

[3063] Segment cluster M78035_node_{—}40 (SEQ ID NO:912) according to the present invention is supported by 194 libraries. The number of libraries was determined as previously described. This segment can be found in the following transcript(s): M78035_T0 (SEQ ID NO:871), M78035_T3 (SEQ ID NO:872), M78035_T4 (SEQ ID NO:873), M78035_T7 (SEQ ID NO:874), M78035_T9 (SEQ ID NO:875), M78035_T11 (SEQ ID NO:876), M78035_T17 (SEQ ID NO:877), M78035_T18 (SEQ ID NO:878), M78035_T19 (SEQ ID NO:879) and M78035_T20 (SEQ ID NO:880). Table 53 below describes the starting and ending position of this segment on each transcript.

TABLE 53
Segment location on transcripts

| | Segment | Segment |
|---|---|---|
| Transcript name | starting position | ending position |
| M78035_T0 (SEQ ID NO: 871) | 986 | 1103 |
| M78035_T3 (SEQ ID NO: 872) | 1071 | 1188 |
| M78035_T4 (SEQ ID NO: 873) | 1667 | 1784 |
| M78035_T7 (SEQ ID NO: 874) | 1032 | 1149 |
| M78035_T9 (SEQ ID NO: 875) | 1244 | 1361 |
| M78035_T11 (SEQ ID NO: 876) | 719 | 836 |
| M78035_T17 (SEQ ID NO: 877) | 986 | 1103 |
| M78035_T18 (SEQ ID NO: 878) | 986 | 1103 |
| M78035_T19 (SEQ ID NO: 879) | 986 | 1103 |
| M78035_T20 (SEQ ID NO: 880) | 986 | 1103 |

[3064] Segment cluster M78035_node_{—}48 (SEQ ID NO:913) according to the present invention is supported by 180 libraries. The number of libraries was determined as previously described. This segment can be found in the following transcript(s): M78035_T0 (SEQ ID NO:871), M78035_T3 (SEQ ID NO:872), M78035_T4 (SEQ ID NO:873), M78035_T7 (SEQ ID NO:874), M78035_T9 (SEQ ID NO:875), M78035_T11 (SEQ ID NO:876), M78035_T17 (SEQ ID NO:877), M78035_T18 (SEQ ID NO:878), M78035_T19 (SEQ ID NO:879) and M78035_T20 (SEQ ID NO:880). Table 54 below describes the starting and ending position of this segment on each transcript.

TABLE 54
Segment location on transcripts

| | Segment | Segment |
|---|---|---|
| Transcript name | starting position | ending position |
| M78035_T0 (SEQ ID NO: 871) | 1104 | 1145 |
| M78035_T3 (SEQ ID NO: 872) | 1189 | 1230 |
| M78035_T4 (SEQ ID NO: 873) | 1785 | 1826 |
| M78035_T7 (SEQ ID NO: 874) | 1150 | 1191 |
| M78035_T9 (SEQ ID NO: 875) | 1362 | 1403 |
| M78035_T11 (SEQ ID NO: 876) | 837 | 878 |
| M78035_T17 (SEQ ID NO: 877) | 1104 | 1145 |
| M78035_T18 (SEQ ID NO: 878) | 1104 | 1145 |
| M78035_T19 (SEQ ID NO: 879) | 1104 | 1145 |
| M78035_T20 (SEQ ID NO: 880) | 1104 | 1145 |

[3065] Segment cluster M78035_node_{—}49 (SEQ ID NO:914) according to the present invention is supported by 190 libraries. The number of libraries was determined as previously described. This segment can be found in the following transcript(s): M78035_T0 (SEQ ID NO:871), M78035_T3 (SEQ ID NO:872), M78035_T4 (SEQ ID NO:873), M78035_T7 (SEQ ID NO:874), M78035_T9 (SEQ ID NO:875), M78035_T11 (SEQ ID NO:876), M78035_T17 (SEQ ID NO:877), M78035_T18 (SEQ ID NO:878), M78035_T19 (SEQ ID NO:879) and M78035_T20 (SEQ ID NO:880). Table 55 below describes the starting and ending position of this segment on each transcript.

TABLE 55
Segment location on transcripts

| | Segment | Segment |
|---|---|---|
| Transcript name | starting position | ending position |
| M78035_T0 (SEQ ID NO: 871) | 1146 | 1226 |
| M78035_T3 (SEQ ID NO: 872) | 1231 | 1311 |
| M78035_T4 (SEQ ID NO: 873) | 1827 | 1907 |
| M78035_T7 (SEQ ID NO: 874) | 1192 | 1272 |
| M78035_T9 (SEQ ID NO: 875) | 1404 | 1484 |
| M78035_T11 (SEQ ID NO: 876) | 879 | 959 |
| M78035_T17 (SEQ ID NO: 877) | 1146 | 1226 |
| M78035_T18 (SEQ ID NO: 878) | 1146 | 1226 |
| M78035_T19 (SEQ ID NO: 879) | 1146 | 1226 |
| M78035_T20 (SEQ ID NO: 880) | 1146 | 1226 |

[3066] Segment cluster M78035_node_{—}50 (SEQ ID NO:915) according to the present invention is supported by 190 libraries. The number of libraries was determined as previously described. This segment can be found in the following transcript(s): M78035_T0 (SEQ ID NO:871), M78035_T3 (SEQ ID NO:872), M78035_T4 (SEQ ID NO:873), M78035_T7 (SEQ ID NO:874), M78035_T9 (SEQ ID NO:875), M78035_T11 (SEQ ID NO:876), M78035_T17 (SEQ ID NO:877), M78035_T18 (SEQ ID NO:878), M78035_T19 (SEQ ID NO:879) and M78035_T20 (SEQ ID NO:880). Table 56 below describes the starting and ending position of this segment on each transcript.

TABLE 56
Segment location on transcripts

| | Segment | Segment |
|---|---|---|
| Transcript name | starting position | ending position |
| M78035_T0 (SEQ ID NO: 871) | 1227 | 1298 |
| M78035_T3 (SEQ ID NO: 872) | 1312 | 1383 |
| M78035_T4 (SEQ ID NO: 873) | 1908 | 1979 |
| M78035_T7 (SEQ ID NO: 874) | 1273 | 1344 |
| M78035_T9 (SEQ ID NO: 875) | 1485 | 1556 |
| M78035_T11 (SEQ ID NO: 876) | 960 | 1031 |
| M78035_T17 (SEQ ID NO: 877) | 1227 | 1298 |
| M78035_T18 (SEQ ID NO: 878) | 1227 | 1298 |
| M78035_T19 (SEQ ID NO: 879) | 1227 | 1298 |
| M78035_T20 (SEQ ID NO: 880) | 1227 | 1298 |

[3067] Segment cluster M78035_node_{—}52 (SEQ ID NO:916) according to the present invention can be found in the following transcript(s): M78035_T0 (SEQ ID NO:871), M78035_T3 (SEQ ID NO:872), M78035_T4 (SEQ ID NO:873), M78035_T7 (SEQ ID NO:874), M78035_T9 (SEQ ID NO:875), M78035_T11 (SEQ ID NO:876), M78035_T17 (SEQ ID NO:877), M78035_T18 (SEQ ID NO:878), M78035_T19 (SEQ ID NO:879) and M78035_T20 (SEQ ID NO:880). Table 57 below describes the starting and ending position of this segment on each transcript.

TABLE 57
Segment location on transcripts

| | Segment | Segment |
|---|---|---|
| Transcript name | starting position | ending position |
| M78035_T0 (SEQ ID NO: 871) | 1299 | 1314 |
| M78035_T3 (SEQ ID NO: 872) | 1384 | 1399 |
| M78035_T4 (SEQ ID NO: 873) | 1980 | 1995 |
| M78035_T7 (SEQ ID NO: 874) | 1345 | 1360 |
| M78035_T9 (SEQ ID NO: 875) | 1557 | 1572 |
| M78035_T11 (SEQ ID NO: 876) | 1032 | 1047 |
| M78035_T17 (SEQ ID NO: 877) | 1299 | 1314 |
| M78035_T18 (SEQ ID NO: 878) | 1299 | 1314 |
| M78035_T19 (SEQ ID NO: 879) | 1299 | 1314 |
| M78035_T20 (SEQ ID NO: 880) | 1299 | 1314 |

[3068] Segment cluster M78035_node_{—}53 (SEQ ID NO:917) according to the present invention can be found in the following transcript(s): M78035_T0 (SEQ ID NO:871), M78035_T3 (SEQ ID NO:872), M78035_T4 (SEQ ID NO:873), M78035_T7 (SEQ ID NO:874), M78035_T9 (SEQ ID NO:875), M78035_T11 (SEQ ID NO:876), M78035_T17 (SEQ ID NO:877), M78035_T18 (SEQ ID NO:878), M78035_T19 (SEQ ID NO:879) and M78035_T20 (SEQ ID NO:880). Table 58 below describes the starting and ending position of this segment on each transcript.

TABLE 58
Segment location on transcripts

| | Segment | Segment |
|---|---|---|
| Transcript name | starting position | ending position |
| M78035_T0 (SEQ ID NO: 871) | 1315 | 1334 |
| M78035_T3 (SEQ ID NO: 872) | 1400 | 1419 |
| M78035_T4 (SEQ ID NO: 873) | 1996 | 2015 |
| M78035_T7 (SEQ ID NO: 874) | 1361 | 1380 |
| M78035_T9 (SEQ ID NO: 875) | 1573 | 1592 |
| M78035_T11 (SEQ ID NO: 876) | 1048 | 1067 |
| M78035_T17 (SEQ ID NO: 877) | 1315 | 1334 |
| M78035_T18 (SEQ ID NO: 878) | 1315 | 1334 |
| M78035_T19 (SEQ ID NO: 879) | 1315 | 1334 |
| M78035_T20 (SEQ ID NO: 880) | 1315 | 1334 |

[3069] Segment cluster M78035_node_{—}54 (SEQ ID NO:918) according to the present invention is supported by 213 libraries. The number of libraries was determined as previously described. This segment can be found in the following transcript(s): M78035_T0 (SEQ ID NO:871), M78035_T3 (SEQ ID NO:872), M78035_T4 (SEQ ID NO:873), M78035_T7 (SEQ ID NO:874), M78035_T9 (SEQ ID NO:875), M78035_T11 (SEQ ID NO:876), M78035_T17 (SEQ ID NO:877), M78035_T18 (SEQ ID NO:878), M78035_T19 (SEQ ID NO:879) and M78035_T20 (SEQ ID NO:880). Table 59 below describes the starting and ending position of this segment on each transcript.

TABLE 59
Segment location on transcripts

| | Segment | Segment |
|---|---|---|
| Transcript name | starting position | ending position |
| M78035_T0 (SEQ ID NO: 871) | 1335 | 1437 |
| M78035_T3 (SEQ ID NO: 872) | 1420 | 1522 |
| M78035_T4 (SEQ ID NO: 873) | 2016 | 2118 |
| M78035_T7 (SEQ ID NO: 874) | 1381 | 1483 |
| M78035_T9 (SEQ ID NO: 875) | 1593 | 1695 |
| M78035_T11 (SEQ ID NO: 876) | 1068 | 1170 |
| M78035_T17 (SEQ ID NO: 877) | 1335 | 1437 |
| M78035_T18 (SEQ ID NO: 878) | 1335 | 1437 |
| M78035_T19 (SEQ ID NO: 879) | 1335 | 1437 |
| M78035_T20 (SEQ ID NO: 880) | 1335 | 1437 |

[3070] Segment cluster M78035_node_{—}56 (SEQ ID NO:919) according to the present invention can be found in the following transcript(s): M78035_T0 (SEQ ID NO:871), M78035_T3 (SEQ ID NO:872), M78035_T4 (SEQ ID NO:873), M78035_T7 (SEQ ID NO:874), M78035_T9 (SEQ ID NO:875) and M78035_T11 (SEQ ID NO:876). Table 60 below describes the starting and ending position of this segment on each transcript.

TABLE 60
Segment location on transcripts

| | Segment | Segment |
|---|---|---|
| Transcript name | starting position | ending position |
| M78035_T0 (SEQ ID NO: 871) | 1579 | 1592 |
| M78035_T3 (SEQ ID NO: 872) | 1664 | 1677 |
| M78035_T4 (SEQ ID NO: 873) | 2260 | 2273 |
| M78035_T7 (SEQ ID NO: 874) | 1625 | 1638 |
| M78035_T9 (SEQ ID NO: 875) | 1837 | 1850 |
| M78035_T11 (SEQ ID NO: 876) | 1312 | 1325 |

[3071] Segment cluster M78035_node_{—}57 (SEQ ID NO:920) according to the present invention is supported by 225 libraries. The number of libraries was determined as previously described. This segment can be found in the following transcript(s): M78035_T0 (SEQ ID NO:871), M78035_T3 (SEQ ID NO:872), M78035_T4 (SEQ ID NO:873), M78035_T7 (SEQ ID NO:874), M78035_T9 (SEQ ID NO:875) and M78035_T11 (SEQ ID NO:876). Table 61 below describes the starting and ending position of this segment on each transcript.

TABLE 61
Segment location on transcripts

| | Segment | Segment |
|---|---|---|
| Transcript name | starting position | ending position |
| M78035_T0 (SEQ ID NO: 871) | 1593 | 1662 |
| M78035_T3 (SEQ ID NO: 872) | 1678 | 1747 |
| M78035_T4 (SEQ ID NO: 873) | 2274 | 2343 |
| M78035_T7 (SEQ ID NO: 874) | 1639 | 1708 |
| M78035_T9 (SEQ ID NO: 875) | 1851 | 1920 |
| M78035_T11 (SEQ ID NO: 876) | 1326 | 1395 |

[3072] Segment cluster M78035_node_{—}59 (SEQ ID NO:921) according to the present invention is supported by 251 libraries. The number of libraries was determined as previously described. This segment can be found in the following transcript(s): M78035_T0 (SEQ ID NO:871), M78035_T3 (SEQ ID NO:872), M78035_T4 (SEQ ID NO:873), M78035_T7 (SEQ ID NO:874), M78035_T9 (SEQ ID NO:875) and M78035_T11 (SEQ ID NO:876). Table 62 below describes the starting and ending position of this segment on each transcript.

TABLE 62
Segment location on transcripts

| | Segment | Segment |
|---|---|---|
| Transcript name | starting position | ending position |
| M78035_T0 (SEQ ID NO: 871) | 1814 | 1898 |
| M78035_T3 (SEQ ID NO: 872) | 1899 | 1983 |
| M78035_T4 (SEQ ID NO: 873) | 2495 | 2579 |
| M78035_T7 (SEQ ID NO: 874) | 1860 | 1944 |
| M78035_T9 (SEQ ID NO: 875) | 2072 | 2156 |
| M78035_T11 (SEQ ID NO: 876) | 1547 | 1631 |

### Variant Protein Alignment to the Previously Known Protein:

Sequence name: SAHH_HUMAN (SEQ ID NO:922)
Sequence documentation:
Alignment of: M78035_P4 (SEQ ID NO:924) × SAHH_HUMAN (SEQ ID NO:922) ..
Alignment segment 1/1:

| | | | |
|---|---|---|---|
| Quality: | 3949.00 | Escore | 0 |
| Matching length: | 404 | Total length: | 404 |
| Matching Percent Similarity: | 100.00 | Matching Percent Identity: | 100.00 |
| Total Percent Similarity: | 100.00 | Total Percent Identity: | 100.00 |
| Gaps: | 0 | | |
| Alignment: | | | |

[chemical structure]

[chemical structure]

[chemical structure]

[chemical structure]

[chemical structure]

[chemical structure]

[chemical structure]

[chemical structure]

[chemical structure]

Sequence name: SAHH_HUMAN (SEQ ID NO:922)
Sequence documentation:
Alignment of: M78035_P6 (SEQ ID NO:925) × SAHH_HUMAN (SEQ ID NO:922) ..
Alignment segment 1/1:

| | | | |
|---|---|---|---|
| Quality: | 2982.00 | Escore | 0 |
| Matching length: | 306 | Total length: | 306 |
| Matching Percent Similarity: | 100.00 | Matching Percent Identity: | 100.00 |
| Total Percent Similarity: | 100.00 | Total Percent Identity: | 100.00 |
| Gaps: | 0 | | |
| Alignment: | | | |

[chemical structure]

[chemical structure]

[chemical structure]

[chemical structure]

[chemical structure]

[chemical structure]

[chemical structure]

Sequence name: SAHH_HUMAN (SEQ ID NO:922)
Sequence documentation:
Alignment of: M78035_P8 (SEQ ID NO:926) × SAHH_HUMAN (SEQ ID NO:922) ..
Alignment segment 1/1:

| | | | |
|---|---|---|---|
| Quality: | 3275.00 | Escore | 0 |
| Matching length: | 334 | Total length: | 334 |
| Matching Percent Similarity: | 100.00 | Matching Percent Identity: | 100.00 |
| Total Percent Similarity: | 100.00 | Total Percent Identity: | 100.00 |
| Gaps: | 0 | | |
| Alignment: | | | |

[chemical structure]

[chemical structure]

[chemical structure]

[chemical structure]

[chemical structure]

[chemical structure]

[chemical structure]

### Expression of S-Adenosylhomocysteine Hydrolase (AHCY) M78035 Transcripts which are Detectable by Amplicon as Depicted in Sequence Name M78035Seg42 (SEQ ID NO: 1351) in Normal and Cancerous Colon Tissues

[3074] Expression of S-adenosylhomocysteine hydrolase (AHCY) transcripts detectable by or according to seg42, M78035seg42 amplicon (SEQ ID NO: 1351) and M78035seg42F (SEQ ID NO: 1349) and M78035seg42R (SEQ ID NO: 1350) primers was measured by real time PCR. In parallel the expression of four housekeeping genes —PBGD (GenBank Accession No. BC019323 (SEQ ID NO:1576); amplicon—PBGD-amplicon, SEQ ID NO:531), HPRT1 (GenBank Accession No. NM_{—}000194 (SEQ ID NO:1577); amplicon—HPRT1-amplicon, SEQ ID NO:612), G6PD (GenBank Accession No. NM_{—}000402 (SEQ ID NO:1578); G6PD amplicon, SEQ ID NO:615), RPS27A (GenBank Accession No. NM_{—}002954 (SEQ ID NO:1579); RPS27A amplicon, SEQ ID NO:1261), was measured similarly. For each RT sample, the expression of the above amplicon was normalized to the geometric mean of the quantities of the housekeeping genes. The normalized quantity of each RT sample was then divided by the median of the quantities of the normal post-mortem (PM) samples (Sample Nos. 41, 52, 62-67, 69-71, Table 1, above, “Tissue samples in testing panel”), to obtain a value of fold up-regulation for each sample relative to median of the normal PM samples.

[3075] FIG. 55 is a histogram showing over expression of the above-indicated S-adenosylhomocysteine hydrolase (AHCY) transcripts in cancerous colon samples relative to the normal samples. The number and percentage of samples that exhibit at least 3 fold over-expression, out of the total number of samples tested is indicated in the bottom.

[3076] As is evident from FIG. 55, the expression of S-adenosylhomocysteine hydrolase (AHCY) transcripts detectable by the above amplicon in cancer samples was significantly higher than in the non-cancerous samples (Sample Nos. 41, 52, 62-67, 69-71, Table 1, “Tissue samples in testing panel”). Notably an over-expression of at least 3 fold was found in 11 out of 37 adenocarcinoma samples, Statistical analysis was applied to verify the significance of these results, as described below.

[3077] The P value for the difference in the expression levels of S-adenosylhomocysteine hydrolase (AHCY) transcripts detectable by the above amplicon in colon cancer samples versus the normal tissue samples was determined by T test as 1.03E-04. Threshold of 3 fold overexpression was found to differentiate between cancer and normal samples with P value of 3.76E-02 as checked by exact fisher test. The above values demonstrate statistical significance of the results.

[3078] Primer pairs are also optionally and preferably encompassed within the present invention; for example, for the above experiment, the following primer pair was used as a non-limiting illustrative example only of a suitable primer pair: M78035seg42F forward primer (SEQ ID NO: 1349); and M78035seg42R reverse primer (SEQ ID NO: 1350).

[3079] The present invention also preferably encompasses any amplicon obtained through the use of any suitable primer pair; for example, for the above experiment, the following amplicon was obtained as a non-limiting illustrative example only of a suitable amplicon: M78035seg42 (SEQ ID NO: 1351).

Forward primer (SEQ ID NO: 1349):
TGGTCTGGACTCAATCCCG
Reverse primer (SEQ ID NO: 1350):
GGAGTCTGAGTCCAAGCAGCC
Amplicon (SEQ ID NO: 1351):
TGGTCTGGACTCAATCCCGGGACTTTAGGACTTTTGCTAGAAATCTGGTG
TGGTGCAGGAGCGACTCCAGGATTCACTCTGTGGGCTGCTTGGACTCAGA
CTCC

### Description for Cluster R30650

[3080] Cluster R30650 features 8 transcript(s) and 49 segment(s) of interest, the names for which are given in Tables 1 and 2, respectively, the sequences themselves are given at the end of the application. The selected protein variants are given in table 3.

TABLE 1
Transcripts of interest

| Transcript Name | SEQ ID NO: |
|---|---|
| R30650_PEA_2_T2 | 929 |
| R30650_PEA_2_T3 | 930 |
| R30650_PEA_2_T6 | 931 |
| R30650_PEA_2_T14 | 932 |
| R30650_PEA_2_T15 | 933 |
| R30650_PEA_2_T18 | 934 |
| R30650_PEA_2_T21 | 935 |
| R30650_PEA_2_T23 | 936 |

TABLE 2
Segments of interest

| Segment name | SEQ ID NO: |
|---|---|
| R30650_PEA_2_node_0 | 937 |
| R30650_PEA_2_node_1 | 938 |
| R30650_PEA_2_node_3 | 939 |
| R30650_PEA_2_node_5 | 940 |
| R30650_PEA_2_node_9 | 941 |
| R30650_PEA_2_node_11 | 942 |
| R30650_PEA_2_node_14 | 943 |
| R30650_PEA_2_node_20 | 944 |
| R30650_PEA_2_node_22 | 945 |
| R30650_PEA_2_node_24 | 946 |
| R30650_PEA_2_node_26 | 947 |
| R30650_PEA_2_node_32 | 948 |
| R30650_PEA_2_node_34 | 949 |
| R30650_PEA_2_node_36 | 950 |
| R30650_PEA_2_node_37 | 951 |
| R30650_PEA_2_node_39 | 952 |
| R30650_PEA_2_node_41 | 953 |
| R30650_PEA_2_node_42 | 954 |
| R30650_PEA_2_node_44 | 955 |
| R30650_PEA_2_node_46 | 956 |
| R30650_PEA_2_node_50 | 957 |
| R30650_PEA_2_node_56 | 958 |
| R30650_PEA_2_node_60 | 959 |
| R30650_PEA_2_node_63 | 960 |
| R30650_PEA_2_node_67 | 961 |
| R30650_PEA_2_node_70 | 962 |
| R30650_PEA_2_node_72 | 963 |
| R30650_PEA_2_node_73 | 964 |
| R30650_PEA_2_node_75 | 965 |
| R30650_PEA_2_node_79 | 966 |
| R30650_PEA_2_node_86 | 967 |
| R30650_PEA_2_node_87 | 968 |
| R30650_PEA_2_node_89 | 969 |
| R30650_PEA_2_node_93 | 970 |
| R30650_PEA_2_node_8 | 971 |
| R30650_PEA_2_node_17 | 972 |
| R30650_PEA_2_node_28 | 973 |
| R30650_PEA_2_node_31 | 974 |
| R30650_PEA_2_node_48 | 975 |
| R30650_PEA_2_node_53 | 976 |
| R30650_PEA_2_node_58 | 977 |
| R30650_PEA_2_node_68 | 978 |
| R30650_PEA_2_node_77 | 979 |
| R30650_PEA_2_node_82 | 980 |
| R30650_PEA_2_node_85 | 981 |
| R30650_PEA_2_node_88 | 982 |
| R30650_PEA_2_node_90 | 983 |
| R30650_PEA_2_node_91 | 984 |
| R30650_PEA_2_node_92 | 985 |

TABLE 3
Proteins of interest

| | SEQ | |
|---|---|---|
| | ID | |
| Protein Name | NO: | Corresponding Transcript(s) |
| R30650_PEA_2_P4 | 991 | R30650_PEA_2_T2 |
| | | (SEQ ID NO: 929) |
| R30650_PEA_2_P5 | 992 | R30650_PEA_2_T3 |
| | | (SEQ ID NO: 930) |
| R30650_PEA_2_P8 | 993 | R30650_PEA_2_T6 |
| | | (SEQ ID NO: 931) |
| R30650_PEA_2_P12 | 994 | R30650_PEA_2_T14 |
| | | (SEQ ID NO: 932) |
| R30650_PEA_2_P13 | 995 | R30650_PEA_2_T15 |
| | | (SEQ ID NO: 933); |
| | | R30650_PEA_2_T21 |
| | | (SEQ ID NO: 935) |
| R30650_PEA_2_P15 | 996 | R30650_PEA_2_T18 |
| | | (SEQ ID NO: 934) |
| R30650_PEA_2_P17 | 997 | R30650_PEA_2_T23 |
| | | (SEQ ID NO: 936) |

[3081] These sequences are variants of the known protein Protein KIAA1199 precursor (SwissProt accession identifier K199_HUMAN), SEQ ID NO: 986, referred to herein as the previously known protein.

[3082] Protein Protein KIAA1199 precursor (SEQ ID NO:986) is known or believed to have the following function(s): May be involved in hearing. The sequence for protein Protein KIAA1199 precursor is given at the end of the application, as “Protein KIAA1199 precursor amino acid sequence”. Known polymorphisms for this sequence are as shown in Table 4.

TABLE 4
Amino acid mutations for Known Protein

| SNP position(s) | |
|---|---|
| on amino acid | |
| sequence | Comment |
| 187 | R -> C (in nonsyndromic hearing loss; in one |
| | family). /FTId = VAR_018165. |
| 187 | R -> H (in nonsyndromic hearing loss; |
| | in two unrelated families). /FTId = VAR_018166. |
| 783 | H -> R. /FTId = VAR_018167. |
| 783 | H -> Y (in nonsyndromic hearing loss; in one |
| | sporadic case). /FTId = VAR_018168. |
| 1109 | V -> I. /FTId = VAR_018169. |
| 1169 | P -> A (common polymorphism). /FTId = |
| | VAR_018170. |
| 558-564 | HFHLAGD -> TRPPTRP |
| 862 | H -> T |

[3083] Cluster R30650 can be used as a diagnostic marker according to overexpression of transcripts of this cluster in cancer. Expression of such transcripts in normal tissues is also given according to the previously described methods. The term “number” in the left hand column of the table and the numbers on the y-axis of the figure below refer to weighted expression of ESTs in each category, as “parts per million” (ratio of the expression of ESTs for a particular cluster to the expression of all ESTs in that category, according to parts per million).

[3084] Overall, the following results were obtained as shown with regard to the histograms in FIG. 56 and Table 5. This cluster is overexpressed (at least at a minimum level) in the following pathological conditions: epithelial malignant tumors and a mixture of malignant tumors from different tissues.

TABLE 5
Normal tissue distribution

| Name of Tissue | Number |
|---|---|
| bone | 3420 |
| brain | 29 |
| colon | 63 |
| epithelial | 28 |
| general | 88 |
| head and neck | 0 |
| lung | 33 |
| ovary | 0 |
| pancreas | 0 |
| prostate | 2 |
| skin | 137 |
| stomach | 0 |
| uterus | 0 |

TABLE 6
P values and ratios for expression in cancerous tissue

| Name of Tissue | P1 | P2 | SP1 | R3 | SP2 | R4 |
|---|---|---|---|---|---|---|
| bone | 6.9e−01 | 7.8e−01 | 1 | 0.0 | 1 | 0.0 |
| brain | 2.7e−01 | 5.0e−01 | 8.8e−02 | 2.3 | 3.7e−01 | 1.3 |
| colon | 6.7e−02 | 4.8e−02 | 1.6e−01 | 1.8 | 1.8e−01 | 1.8 |
| epithelial | 2.7e−03 | 7.1e−03 | 8.0e−03 | 1.6 | 1.0e−01 | 1.3 |
| general | 7.9e−03 | 5.0e−02 | 1 | 0.6 | 1 | 0.4 |
| head and neck | 2.1e−01 | 3.3e−01 | 0.0e+00 | 0.0 | 0.0e+00 | 0.0 |
| lung | 5.7e−01 | 3.5e−01 | 8.8e−01 | 0.8 | 3.4e−01 | 1.3 |
| ovary | 2.2e−01 | 2.6e−01 | 4.7e−01 | 2.0 | 5.9e−01 | 1.7 |
| pancreas | 2.2e−02 | 6.9e−02 | 3.2e−02 | 6.5 | 7.7e−02 | 4.6 |
| prostate | 9.0e−01 | 9.2e−01 | 4.5e−01 | 1.8 | 5.6e−01 | 1.5 |
| skin | 6.0e−01 | 5.8e−01 | 8.1e−01 | 0.6 | 1 | 0.3 |
| stomach | 3.0e−01 | 4.3e−01 | 4.0e−03 | 3.0 | 8.4e−02 | 2.3 |
| uterus | 4.1e−02 | 1.6e−01 | 8.5e−02 | 3.6 | 2.6e−01 | 2.3 |

[3085] For this cluster, at least one oligonucleotide was found to demonstrate overexpression of the cluster, although not of at least one transcript/segment as listed below. Microarray (chip) data is also available for this cluster as follows. Various oligonucleotides were tested for being differentially expressed in various disease conditions, particularly cancer, as previously described. The following oligonucleotides were found to hit this cluster but not other segments/transcripts below, shown in Table 7.

TABLE 7
Oligonucleotides related to this cluster

| Oligonucleotide name | Overexpressed in cancers | Chip reference |
|---|---|---|
| H85953_0_18_0 | colorectal cancer | Colon |

[3086] As noted above, cluster R30650 features 8 transcript(s), which were listed in Table 1 above. These transcript(s) encode for protein(s) which are variant(s) of protein Protein KIAA1199 precursor (SEQ ID NO:986). A description of each variant protein according to the present invention is now provided.

[3087] Variant protein R30650_PEA_{—}2_P4 (SEQ ID NO:991) according to the present invention has an amino acid sequence as given at the end of the application; it is encoded by transcript(s) R30650_PEA_{—}2_T2 (SEQ ID NO:929). An alignment is given to the known protein (Protein KIAA1199 precursor (SEQ ID NO:986)) at the end of the application. One or more alignments to one or more previously published protein sequences are given at the end of the application. A brief description of the relationship of the variant protein according to the present invention to each such aligned protein is as follows:

### Comparison Report Between R30650_PEA_{—}2_P4 (SEQ ID NO:991) and Q9ULM1 (SEQ ID NO:989):

[3088] 1. An isolated chimeric polypeptide encoding for R30650_PEA_{—}2_P4 (SEQ ID NO:991), comprising a first amino acid sequence being at least 90% homologous to MYLHIGEEIDGVDMRAEVGLLSRNIIVMGEMEDKCYPYRNHICNFFDFDTFGGHIKFALGFKAAHLEGTEL KHMGQQLVGQYPIHFHLAGDVDERGGYDPPTYIRDLSIHHTFSRCVTVHGSNGLLIKDVVGYNSLGHCFF TEDGPEERNTFDHCLGLLVKSGTLLPSDRDSKMCKMITEDSYPGYIPKPRQDCNAVSTFWMANPNNNLIN CAAAGSEETGFWFIFHHVPTGPSVGMYSPGYSEHIPLGKFYNNRAHSNYRAGMIIDNGVKTTEASAKDKR PFLSIISARYSPHQDADPLKPREPAIIRHFIAYKNQDHGAWLRGGDVWLDSCRFADNGIGLTLASGGTFPYD DGSKQEIKNSLFVGESGNVGTEMMDNRIWGPGGLDHSGRTLPIGQNFPIRGIQLYDGPINIQNCTFRKFVAL EGRHTSALAFRLNNAWQSCPHNNVTGIAFEDVPITSRVFFGEPGPWFNQLDMDGDKTSVFHDVDGSVSEY PGSYLTKNDNWLVRHPDCINVPDWRGAICSGCYAQMYIQAYKTSNLRMKIIKNDFPSHPLYLEGALTRST HYQQYQPVVTLQKGYTIHWDQTAPAELAIWLINFNKGDWIRVGLCYPRGTTFSILSDVHNRLLKQTSKTG VFVRTLQMDKVEQSYPGRSHYYWDEDSGLLFLKLKAQNEREKFAFCSMKGCERIKIKALIPKNAGVSDCT ATAYPKFTERAVVDVPMPKKLFGSQLKTKDHFLEVKMESSKQHFFHLWNDFAYIEVDGKKYPSSEDGIQV VVIDGNQGRVVSHTSFRNSILQGIPWQLFNYVATIPDNSIVLMASKGRYVSRGPWTRVLEKLGADRGLKL KEQMAFVGFKGSFRPIWVTLDTEDHKAKIFQVVPIPVVKKKKL corresponding to amino acids 126-1013 of Q9ULM1 (SEQ ID NO:989), which also corresponds to amino acids 1-888 of R30650_PEA_{—}2_P4 (SEQ ID NO:991).

[3089] Comparison Report Between R30650_PEA_{—}2_P4 (SEQ ID NO:991) and Q8WUJ3 (SEQ ID NO: 987):

[3090] 1. An isolated chimeric polypeptide encoding for R30650_PEA_{—}2_P4 (SEQ ID NO:991), comprising a first amino acid sequence being at least 90% homologous to MYLHIGEEIDGVDMRAEVGLLSRNIIVMGEMEDKCYPYRNHICNFFDFDTFGGHIKFALGFKAAHLEGTEL KHMGQQLVGQYPIHFHLAGDVDERGGYDPPTYIRDLSIHHTFSRCVTVHGSNGLLIKDVVGYNSLGHCFF TEDGPEERNTFDHCLGLLVKSGTLLPSDRDSKMCKMITEDSYPGYIPKPRQDCNAVSTFWMANPNNNLIN CAAAGSEETGFWFIFHHVPTGPSVGMYSPGYSEHIPLGKFYNNRAHSNYRAGMIIDNGVKTTEASAKDKR PFLSIISARYSPHQDADPLKPREPAIIRHFIAYKNQDHGAWLRGGDVWLDSCRFADNGIGLTLASGGTFPYD DGSKQEIKNSLFVGESGNVGTEMMDNRIWGPGGLDHSGRTLPIGQNFPIRGIQLYDGPINIQNCTFRKFVAL EGRHTSALAFRLNNAWQSCPHNNVTGIAFEDVPITSRVFFGEPGPWFNQLDMDGDKTSVFHDVDGSVSEY PGSYLTKND corresponding to amino acids 474-977 of Q8WUJ3 (SEQ ID NO:987), which also corresponds to amino acids 1-504 of R30650_PEA_{—}2_P4 (SEQ ID NO:991), and a second amino acid sequence being at least 70%, optionally at least 80%, preferably at least 85%, more preferably at least 90% and most preferably at least 95% homologous to a polypeptide having the sequence NWLVRHPDCINVPDWRGAICSGCYAQMYIQAYKTSNLRMKIIKNDFPSHPLYLEGALTRSTHYQQYQPVV TLQKGYTIHWDQTAPAELAIWLINFNKGDWIRVGLCYPRGTTFSILSDVHNRLLKQTSKTGVFVRTLQMD KVEQSYPGRSHYYWDEDSGLLFLKLKAQNEREKFAFCSMKGCERIKIKALIPKNAGVSDCTATAYPKFTE RAVVDVPMPKKLFGSQLKTKDHFLEVKMESSKQHFFHLWNDFAYIEVDGKKYPSSEDGIQVVVIDGNQG RVVSHTSFRNSILQGIPWQLFNYVATIPDNSIVLMASKGRYVSRGPWTRVLEKLGADRGLKLKEQMAFVG FKGSFRPIWVTLDTEDHKAKIFQVVPIPVVKKKKL corresponding to amino acids 505-888 of R30650_PEA_{—}2_P4 (SEQ ID NO:991), wherein said first amino acid sequence and second amino acid sequence are contiguous and in a sequential order.

[3091] 2. An isolated polypeptide encoding for a tail of R30650_PEA_{—}2_P4 (SEQ ID NO:991), comprising a polypeptide being at least 70%, optionally at least about 80%, preferably at least about 85%, more preferably at least about 90% and most preferably at least about 95% homologous to the sequence NWLVRHPDCINVPDWRGAICSGCYAQMYIQAYKTSNLRMKIIKNDFPSHPLYLEGALTRSTHYQQYQPVV TLQKGYTIHWDQTAPAELAIWLINFNKGDWIRVGLCYPRGTTFSILSDVHNRLLKQTSKTGVFVRTLQMD KVEQSYPGRSHYYWDEDSGLLFLKLKAQNEREKFAFCSMKGCERIKIKALIPKNAGVSDCTATAYPKFTE RAYVDVPMPKKLFGSQLKTKDHFLEVKMESSKQHFFHLWNDFAYIEVDGKKYPSSEDGIQVVVIDGNQG RVVSHTSFRNSILQGIPWQLFNYVATIPDNSIVLMASKGRYVSRGPWTRVLEKLGADRGLKLKEQMAFVG FKGSFRPIWVTLDTEDHKAKIFQVVPIPVVKKKKL in R30650_PEA_{—}2_P4 (SEQ ID NO:991).

[3092] Comparison Report Between R30650_PEA_{—}2_P4 (SEQ ID NO:991) and Q9NPN9 (SEQ ID NO: 988):

[3093] 1. An isolated chimeric polypeptide encoding for R30650_PEA_{—}2_P4 (SEQ ID NO:991), comprising a first amino acid sequence being at least 70%, optionally at least 80%, preferably at least 85%, more preferably at least 90% and most preferably at least 95% homologous to a polypeptide having the sequence MYLHIGEEIDGVDMRAEVGLLSRNIIVMGEMEDKCYPYRNHICNFFDFDTFGGHIKFALGFKAAHLEGTEL KHMGQQLVGQYPIHFHLAGD corresponding to amino acids 1-91 of R30650_PEA_{—}2_P4 (SEQ ID NO:991), and a second amino acid sequence being at least 90% homologous to VDERGGYDPPTYIRDLSIHHTFSRCVTVHGSNGLLIKDVVGYNSLGHCFFTEDGPEERNTFDHCLGLLVKS GTLLPSDRDSKMCKMITEDSYPGYIPKPRQDCNAVSTFWMANPNNNLINCAAAGSEETGFWFIFHHVPTG PSVGMYSPGYSEHIPLGKFYNNRAHSNYRAGMIIDNGVKTTEASAKDKRPFLSIISARYSPHQDADPLKPRE PAIIRHFIAYKNQDHGAWLRGGDVWLDSCRFADNGIGLTLASGGTFPYDDGSKQEIKNSLFVGESGNVGT EMMDNRIWGPGGLDHSGRTLPIGQNFPIRGIQLYDGPINIQNCTFRKFVALEGRHTSALAFRLNNAWQSCP HNNVTGIAFEDVPITSRVFFGEPGPWFNQLDMDGDKTSVFHDVDGSVSEYPGSYLTKNDNWLVRHPDCIN VPDWRGAICSGCYAQMYIQAYKTSNLRMKIIKNDFPSHPLYLEGALTRSTHYQQYQPVVTLQKGYTIHWD QTAPAELAIWLINFNKGDWIRVGLCYPRGTTFSILSDVHNRLLKQTSKTGVFVRTLQMDKVEQSYPGRSH YYWDEDSGLLFLKLKAQNEREKFAFCSMKGCERIKIKALIPKNAGVSDCTATAYPKFTERAVVDVPMPKK LFGSQLKTKDHFLEVKMESSKQHFFHLWNDFAYIEVDGKKYPSSEDGIQVVVIDGNQGRVVSHTSFRNSIL QGIPWQLFNYVATIPDNSIVLMASKGRYVSRGPWTRVLEKLGADRGLKLKEQMAFVGFKGSFRPIWVTLD TEDHKAKIFQVVPIPVVKKKKL corresponding to amino acids 8-804 of Q9NPN9 (SEQ ID NO:988), which also corresponds to amino acids 92-888 of R30650_PEA_{—}2_P4 (SEQ ID NO:991), wherein said first amino acid sequence and second amino acid sequence are contiguous and in a sequential order.

[3094] 2. An isolated polypeptide encoding for a head of R30650_PEA_{—}2_P4 (SEQ ID NO:991), comprising a polypeptide being at least 70%, optionally at least about 80%, preferably at least about 85%, more preferably at least about 90% and most preferably at least about 95% homologous to the sequence MYLHIGEEIDGVDMRAEVGLLSRNIIVMGEMEDKCYPYRNHICNFFDFDTFGGHIKFALGFKAAHLEGTEL KHMGQQLVGQYPIHFHLAGD of R30650_PEA_{—}2_P4 (SEQ ID NO:991).

[3095] Comparison Report Between R30650_PEA_{—}2_P4 (SEQ ID NO:991) and Q9H1K5 (SEQ ID NO:990):

[3096] 1. An isolated chimeric polypeptide encoding for R30650_PEA_{—}2_P4 (SEQ ID NO:991), comprising a first amino acid sequence being at least 70%, optionally at least 80%, preferably at least 85%, more preferably at least 90% and most preferably at least 95% homologous to a polypeptide having the sequence MYLHIGEEIDGVDMRAEVGLLSRNIIVMGEMEDKCYPYRNHICNFFDFDTFGGHIKFALGFKAAHLEGTEL KHMGQQLVGQYPIHFHLAGDVDERGGYDPPTYIRDLSIHHTFSRCVTVHGSNGLLIKDVVGYNSLGHCFF TEDGPEERNTFDHCLGLLVKSGTLLPSDRDSKMCKMITEDSYPGYIPKPRQDCNAVSTFWMANPNNNLIN CAAAGSEETGFWFIFHHVPTGPSVGMYSPGYSEHIPLGKFYNNRAHSNYRAGMIIDNGVKTTEASAKDKR PFLSIISARYSPHQDADPLKPREPAIIRHFIAYKNQDHGAWLRGGDVWLDSCRFADNGIGLTLASGGTFPYD DGSKQEIKNSLFVGESGNVGTEMMDNRIWGPGGLDH corresponding to amino acids 1-389 of R30650_PEA_{—}2_P4 (SEQ ID NO:991), and a second amino acid sequence being at least 90% homologous to SGRTLPIGQNFPIRGIQLYDGPINIQNCTFRKFVALEGRHTSALAFRLNNAWQSCPHNNVTGIAFEDVPITSR VFFGEPGPWFNQLDMDGDKTSVFHDVDGSVSEYPGSYLTKNDNWLVRHPDCINVPDWRGAICSGCYAQ MYIQAYKTSNLRMKIIKNDFPSHPLYLEGALTRSTHYQQYQPVVTLQKGYTIHWDQTAPAELAIWLINFNK GDWIRVGLCYPRGTTFSILSDVHNRLLKQTSKTGVFVRTLQMDKVEQSYPGRSHYYWDEDSGLLFLKLKA QNEREKFAFCSMKGCERIKIKALIPKNAGVSDCTATAYPKFTERAVVDVPMPKKLFGSQLKTKDHFLEVK MESSKQHFFHLWNDFAYIEVDGKKYPSSEDGIQVVVIDGNQGRVVSHTSFRNSILQGIPWQLFNYVATIPD NSIVLMASKGRYVSRGPWTRVLEKLGADRGLKLKEQMAFVGFKGSFRPIWVTLDTEDHKAKIFQVVPIPV VKKKKL corresponding to amino acids 2-500 of Q9H1K5 (SEQ ID NO:990), which also corresponds to amino acids 390-888 of R30650_PEA_{—}2_P4 (SEQ ID NO:991), wherein said first amino acid sequence and second amino acid sequence are contiguous and in a sequential order.

[3097] 2. An isolated polypeptide encoding for a head of R30650_PEA_{—}2_P4 (SEQ ID NO:991), comprising a polypeptide being at least 70%, optionally at least about 80%, preferably at least about 85%, more preferably at least about 90% and most preferably at least about 95% homologous to the sequence MYLHIGEEIDGVDMRAEVGLLSRNIIVMGEMEDKCYPYRNHICNFFDFDTFGGHIKFALGFKAAHLEGTEL KHMGQQLVGQYPIHFHLAGDVDERGGYDPPTYIRDLSIHHTFSRCVTVHGSNGLLIKDVVGYNSLGHCFF TEDGPEERNTFDHCLGLLVKSGTLLPSDRDSKMCKMITEDSYPGYIPKPRQDCNAVSTFWMANPNNNLIN CAAAGSEETGFWFIFHHVPTGPSVGMYSPGYSEHIPLGKFYNNRAHSNYRAGMIIDNGVKTTEASAKDKR PFLSIISARYSPHQDADPLKPREPAIIRHFIAYKNQDHGAWLRGGDVWLDSCRFADNGIGLTLASGGTFPYD DGSKQEIKNSLFVGESGNVGTEMMDNRIWGPGGLDH of R30650_PEA_{—}2_P4 (SEQ ID NO:991).

[3098] The location of the variant protein was determined according to results from a number of different software programs and analyses, including analyses from SignalP and other specialized programs. The variant protein is believed to be located as follows with regard to the cell: intracellularly. The protein localization is believed to be intracellularly because neither of the trans-membrane region prediction programs predicted a trans-membrane region for this protein. In addition both signal-peptide prediction programs predict that this protein is a non-secreted protein.

[3099] Variant protein R30650_PEA_{—}2_P4 (SEQ ID NO:991) also has the following non-silent SNPs (Single Nucleotide Polymorphisms) as listed in Table 8, (given according to their position(s) on the amino acid sequence, with the alternative amino acid(s) listed; the last column indicates whether the SNP is known or not; the presence of known SNPs in variant protein R30650_PEA_{—}2_P4 (SEQ ID NO:991) sequence provides support for the deduced sequence of this variant protein according to the present invention).

TABLE 8
Amino acid mutations

| SNP position(s) on amino acid | | Previously |
|---|---|---|
| sequence | Alternative amino acid(s) | known SNP? |
| 264 | M -> V | Yes |
| 310 | H -> R | Yes |

[3100] Variant protein R30650_PEA_{—}2_P4 (SEQ ID NO:991) is encoded by the following transcript(s): R30650_PEA_{—}2_T2 (SEQ ID NO:929), for which the sequence(s) is/are given at the end of the application. The coding portion of transcript R30650_PEA_{—}2_T2 (SEQ ID NO:929) is shown in bold; this coding portion starts at position 1369 and ends at position 4032. The transcript also has the following SNPs as listed in Table 9 (given according to their position on the nucleotide sequence, with the alternative nucleic acid listed; the last column indicates whether the SNP is known or not; the presence of known SNPs in variant protein R30650_PEA_{—}2_P4 (SEQ ID NO:991) sequence provides support for the deduced sequence of this variant protein according to the present invention).

TABLE 9
Nucleic acid SNPs

| SNP position on nucleotide | | Previously |
|---|---|---|
| sequence | Alternative nucleic acid | known SNP? |
| 464 | T -> C | Yes |
| 1833 | T -> C | Yes |
| 1920 | A -> G | Yes |
| 2158 | A -> G | Yes |
| 2297 | A -> G | Yes |
| 4180 | G -> C | Yes |
| 4396 | G -> A | Yes |
| 5457 | G -> A | Yes |
| 6505 | C -> T | Yes |
| 6644 | T -> C | Yes |
| 6736 | A -> C | Yes |

[3101] Variant protein R30650_PEA_{—}2_P5 (SEQ ID NO:992) according to the present invention has an amino acid sequence as given at the end of the application; it is encoded by transcript(s) R30650_PEA_{—}2_T3 (SEQ ID NO:930). An alignment is given to the known protein (Protein KIAA1199 precursor (SEQ ID NO:986)) at the end of the application. One or more alignments to one or more previously published protein sequences are given at the end of the application. A brief description of the relationship of the variant protein according to the present invention to each such aligned protein is as follows:

[3102] Comparison Report Between R30650_PEA_{—}2_P5 (SEQ ID NO:992) and Q9ULM1 (SEQ ID NO:989):

[3103] 1. An isolated chimeric polypeptide encoding for R30650_PEA_{—}2_P5 (SEQ ID NO:992), comprising a first amino acid sequence being at least 90% homologous to MDGVNLSTEVVYKKGQDYRFACYDRGRACRSYRVRFLCGKPVRPKLTVTIDTNVNSTILNLEDNVQSWK PGDTLVIASTDYSMYQAEEFQVLPCRSCAPNQVKVAGKPMYLHIGEEIDGVDMRAEVGLLSRNIIVMGEM EDKCYPYRNHICNFFDFDTFGGHIKFALGFKAAHLEGTELKHMGQQLVGQYPIHFHLAGDVDERGGYDPP TYIRDLSIHHTFSRCVTVHGSNGLLIKDVVGYNSLGHCFFTEDGPEERNTFDHCLGLLVKSGTLLPSDRDSK MCKMITEDSYPGYIPKPRQDCNAVSTFWMANPNNNLINCAAAGSEETGFWFIFHHVPTGPSVGMYSPGYS EHIPLGKFYNNRAHSNYRAGMIIDNGVKTTEASAKDKRPFLSIISARYSPHQDADPLKPREPAIIRHFIAYKN QDHGAWLRGGDVWLDSCRFADNGIGLTLASGGTFPYDDGSKQEIKNSLFVGESGNVGTEMMDNRIWGP GGLDHSGRTLPIGQNFPIRGIQLYDGPINIQNCTFRKFVALEGRHTSALAFRLNNAWQSCPHNNVTGIAFED VPITSRVFFGEPGPWFNQLDMDGDKTSVFHDVDGSVSEYPGSYLTKNDNWLVRHPDCINVPDWRGAICSG CYAQMYIQAYKTSNLRMKIIKNDFPSHPLYLEGALTRSTHYQQYQPVVTLQKGYTIHWDQTAPAELAIWL INFNKGDWIRVGLCYPRGTTFSILSDVHNRLLKQTSKTGVFVRTLQMDKVEQSYPGRSHYYWDEDSGLLF LKLKAQNEREKFAFCSMKGCERIKIKALIPKNAGVSDCTATAYPKFTERAVVDVPMPKKLFGSQLKTKDH FLEVKMESSKQHFFHLWNDFAYIEVDGKKYPSSEDGIQVVVIDGNQGRVVSHTSFRNSILQGIPWQLFNYV ATIPDNSIVLMASKGRYVSRGPWTRVLEKLGADRGLKLKEQMAFVGFKGSFRPIWVTLDTEDHKAKIFQV VPIPVVKKKKL corresponding to amino acids 18-1013 of Q9ULM1 (SEQ ID NO:989), which also corresponds to amino acids 1-996 of R30650_PEA_{—}2_P5 (SEQ ID NO:992).

[3104] Comparison Report Between R30650_PEA_{—}2_P5 (SEQ ID NO:992) and Q8WUJ3 (SEQ ID NO:987):

[3105] 1. An isolated chimeric polypeptide encoding for R30650_PEA_{—}2_P5 (SEQ ID NO:992), comprising a first amino acid sequence being at least 90% homologous to MDGVNLSTEVVYKKGQDYRFACYDRGRACRSYRVRFLCGKPVRPKLTVTIDTNVNSTILNLEDNVQSWK PGDTLVIASTDYSMYQAEEFQVLPCRSCAPNQVKVAGKPMYLHIGEEIDGVDMRAEVGLLSRNIIVMGEM EDKCYPYRNHICNFFDFDTFGGHIKFALGFKAAHLEGTELKHMGQQLVGQYPIHFHLAGDVDERGGYDPP TYIRDLSIHHTFSRCVTVHGSNGLLIKDVVGYNSLGHCFFTEDGPEERNTFDHCLGLLVKSGTLLPSDRDSK MCKMITEDSYPGYIPKPRQDCNAVSTFWMANPNNNLINCAAAGSEETGFWFIFHHVPTGPSVGMYSPGYS EHIPLGKFYNNRAHSNYRAGMIIDNGVKTTEASAKDKRPFLSIISARYSPHQDADPLKPREPAIIRHFIAYKN QDHGAWLRGGDVWLDSCRFADNGIGLTLASGGTFPYDDGSKQEIKNSLFVGESGNVGTEMMDNRIWGP GGLDHSGRTLPIGQNFPIRGIQLYDGPINIQNCTFRKFVALEGRHTSALAFRLNNAWQSCPHNNVTGIAFED VPITSRVFFGEPGPWFNQLDMDGDKTSVFHDVDGSVSEYPGSYLTKND corresponding to amino acids 366-977 of Q8WUJ3 (SEQ ID NO:987), which also corresponds to amino acids 1-612 of R30650_PEA_{—}2_P5 (SEQ ID NO:992), and a second amino acid sequence being at least 70%, optionally at least 80%, preferably at least 85%, more preferably at least 90% and most preferably at least 95% homologous to a polypeptide having the sequence NWLVRHPDCINVPDWRGAICSGCYAQMYIQAYKTSNLRMKIIKNDFPSHPLYLEGALTRSTHYQQYQPVV TLQKGYTIHWDQTAPAELAIWLINFNKGDWIRVGLCYPRGTTFSILSDVHNRLLKQTSKTGVFVRTLQMD KVEQSYPGRSHYYWDEDSGLLFLKLKAQNEREKFAFCSMKGCERIKIKALIPKNAGVSDCTATAYPKFTE RAVVDVPMPKKLFGSQLKTKDHFLEVKMESSKQHFFHLWNDFAYIEVDGKKYPSSEDGIQVVVIDGNQG RVVSHTSFRNSILQGIPWQLFNYVATIPDNSIVLMASKGRYVSRGPWTRVLEKLGADRGLKLKEQMAFVG FKGSFRPIWVTLDTEDHKAKIFQVVPIPVVKKKKL corresponding to amino acids 613-996 of R30650_PEA_{—}2_P5 (SEQ ID NO:992), wherein said first amino acid sequence and second amino acid sequence are contiguous and in a sequential order.

[3106] 2. An isolated polypeptide encoding for a tail of R30650_PEA_{—}2_P5 (SEQ ID NO:992), comprising a polypeptide being at least 70%, optionally at least about 80%, preferably at least about 85%, more preferably at least about 90% and most preferably at least about 95% homologous to the sequence NWLVRHPDCINVPDWRGAICSGCYAQMYIQAYKTSNLRMKIIKNDFPSHPLYLEGALTRSTHYQQYQPVV TLQKGYTIHWDQTAPAELAIWLINFNKGDWIRVGLCYPRGTTFSILSDVHNRLLKQTSKTGVFVRTLQMD KVEQSYPGRSHYYWDEDSGLLFLKLKAQNEREKFAFCSMKGCERIKIKALIPKNAGVSDCTATAYPKFTE RAVVDVPMPKKLFGSQLKTKDHFLEVKMESSKQHFFHLWNDFAYIEVDGKKYPSSEDGIQVVVIDGNQG RVVSHTSFRNSILQGIPWQLFNYVATIPDNSIVLMASKGRYVSRGPWTRVLEKLGADRGLKLKEQMAFVG FKGSFRPIWVTLDTEDHKAKIFQVVPIPVVKKKKL in R30650_PEA_{—}2_P5 (SEQ ID NO:992).

[3107] Comparison Report Between R30650_PEA_{—}2_P5 (SEQ ID NO:992) and Q9NPN9 (SEQ ID NO:988):

[3108] 1. An isolated chimeric polypeptide encoding for R30650_PEA_{—}2_P5 (SEQ ID NO:992), comprising a first amino acid sequence being at least 70%, optionally at least 80%, preferably at least 85%, more preferably at least 90% and most preferably at least 95% homologous to a polypeptide having the sequence MDGVNLSTEVVYKKGQDYRFACYDRGRACRSYRVRFLCGKPVRPKLTVTIDTNVNSTILNLEDNVQSWK PGDTLVIASTDYSMYQAEEFQVLPCRSCAPNQVKVAGKPMYLHIGEEIDGVDMRAEVGLLSRNIIVMGEM EDKCYPYRNHICNFFDFDTFGGHIKFALGFKAAHLEGTELKHMGQQLVGQYPIHFHLAGD (SEQ ID NO:1468) corresponding to amino acids 1-199 of R30650_PEA_{—}2_P5 (SEQ ID NO:992), and a second amino acid sequence being at least 90% homologous to VDERGGYDPPTYIRDLSIHHTFSRCVTVHGSNGLLIKDVVGYNSLGHCFFTEDGPEERNTFDHCLGLLVKS GTLLPSDRDSKMCKMITEDSYPGYIPKPRQDCNAVSTFWMANPNNNLINCAAAGSEETGFWFIFHHVPTG PSVGMYSPGYSEHIPLGKFYNNRAHSNYRAGMIIDNGVKTTEASAKDKRPFLSIISARYSPHQDADPLKPRE PAIIRHFIAYKNQDHGAWLRGGDVWLDSCRFADNGIGLTLASGGTFPYDDGSKQEIKNSLFVGESGNVGT EMMDNRIWGPGGLDHSGRTLPIGQNFPIRGIQLYDGPINIQNCTFRKFVALEGRHTSALAFRLNNAWQSCP HNNVTGIAFEDVPITSRVFFGEPGPWFNQLDMDGDKTSVFHDVDGSVSEYPGSYLTKNDNWLVRHPDCIN VPDWRGAICSGCYAQMYIQAYKTSNLRMKIIKNDFPSHPLYLEGALTRSTHYQQYQPVVTLQKGYTIHWD QTAPAELAIWLINFNKGDWIRVGLCYPRGTTFSILSDVHNRLLKQTSKTGVFVRTLQMDKVEQSYPGRSH YYWDEDSGLLFLKLKAQNEREKFAFCSMKGCERIKIKALIPKNAGVSDCTATAYPKFTERAVVDVPMPKK LFGSQLKTKDHFLEVKMESSKQHFFHLWNDFAYIEVDGKKYPSSEDGIQVVVIDGNQGRVVSHTSFRNSIL QGIPWQLFNYVATIPDNSIVLMASKGRYVSRGPWTRVLEKLGADRGLKLKEQMAFVGFKGSFRPIWVTLD TEDHKAKIFQVVPIPVVKKKKL corresponding to amino acids 8-804 of Q9NPN9 (SEQ ID NO:988), which also corresponds to amino acids 200-996 of R30650_PEA_{—}2_P5 (SEQ ID NO:992), wherein said first amino acid sequence and second amino acid sequence are contiguous and in a sequential order.

[3109] 2. An isolated polypeptide encoding for a head of R30650_PEA_{—}2_P5 (SEQ ID NO:992), comprising a polypeptide being at least 70%, optionally at least about 80%, preferably at least about 85%, more preferably at least about 90% and most preferably at least about 95% homologous to the sequence MDGVNLSTEVVYKKGQDYRFACYDRGRACRSYRVRFLCGKPVRPKLTVTIDTNVNSTILNLEDNVQSWK PGDTLVIASTDYSMYQAEEFQVLPCRSCAPNQVKVAGKPMYLHIGEEIDGVDMRAEVGLLSRNIIVMGEM EDKCYPYRNHICNFFDFDTFGGHIKFALGFKAAHLEGTELKHMGQQLVGQYPIHFHLAGD (SEQ ID NO:1468) of R30650_PEA_{—}2_P5 (SEQ ID NO:992).

[3110] Comparison Report Between R30650_PEA_{—}2_P5 (SEQ ID NO:992) and Q9H1K5 (SEQ ID NO:990):

[3111] 1. An isolated chimeric polypeptide encoding for R30650_PEA_{—}2_P5 (SEQ ID NO:992), comprising a first amino acid sequence being at least 70%, optionally at least 80%, preferably at least 85%, more preferably at least 90% and most preferably at least 95% homologous to a polypeptide having the sequence MDGVNLSTEVVYKKGQDYRFACYDRGRACRSYRVRFLCGKPVRPKLTVTIDTNVNSTILNLEDNVQSWK PGDTLVIASTDYSMYQAEEFQVLPCRSCAPNQVKVAGKPMYLHIGEEIDGVDMRAEVGLLSRNIIVMGEM EDKCYPYRNHICNFFDFDTFGGHIKFALGFKAAHLEGTELKHMGQQLVGQYPIHFHLAGDVDERGGYDPP TYIRDLSIHHTFSRCVTVHGSNGLLIKDVVGYNSLGHCFFTEDGPEERNTFDHCLGLLVKSGTLLPSDRDSK MCKMITEDSYPGYIPKPRQDCNAVSTFWMANPNNNLINCAAAGSEETGFWFIFHHVPTGPSVGMYSPGYS EHIPLGKFYNNRAHSNYRAGMIIDNGVKTTEASAKDKRPFLSIISARYSPHQDADPLKPREPAIIRHFIAYKN QDHGAWLRGGDVWLDSCRFADNGIGLTLASGGTFPYDDGSKQEIKNSLFVGESGNVGTEMMDNRIWGP GGLDH corresponding to amino acids 1-497 of R30650_PEA_{—}2_P5 (SEQ ID NO:992), and a second amino acid sequence being at least 90% homologous to SGRTLPIGQNFPIRGIQLYDGPINIQNCTFRKFVALEGRHTSALAFRLNNAWQSCPHNNVTGIAFEDVPITSR VFFGEPGPWFNQLDMDGDKTSVFHDVDGSVSEYPGSYLTKNDNWLVRHPDCINVPDWRGAICSGCYAQ MYIQAYKTSNLRMKIIKNDFPSHPLYLEGALTRSTHYQQYQPVVTLQKGYTIHWDQTAPAELAIWLINFNK GDWIRVGLCYPRGTTFSILSDVHNRLLKQTSKTGVFVRTLQMDKVEQSYPGRSHYYWDEDSGLLFLKLKA QNEREKFAFCSMKGCERIKIKALIPKNAGVSDCTATAYPKFTERAVVDVPMPKKLFGSQLKTKDHFLEVK MESSKQHFFHLWNDFAYIEVDGKKYPSSEDGIQVVVIDGNQGRVVSHTSFRNSILQGIPWQLFNYVATIPD NSIVLMASKGRYVSRGPWTRVLEKLGADRGLKLKEQMAFVGFKGSFRPIWVTLDTEDHKAKIFQVVPIPV VKKKKL corresponding to amino acids 2-500 of Q9H1K5 (SEQ ID NO:990), which also corresponds to amino acids 498-996 of R30650_PEA_{—}2_P5 (SEQ ID NO:992), wherein said first amino acid sequence and second amino acid sequence are contiguous and in a sequential order.

[3112] 2. An isolated polypeptide encoding for a head of R30650_PEA_{—}2_P5 (SEQ ID NO:992), comprising a polypeptide being at least 70%, optionally at least about 80%, preferably at least about 85%, more preferably at least about 90% and most preferably at least about 95% homologous to the sequence MDGVNLSTEVVYKKGQDYRFACYDRGRACRSYRVRFLCGKPVRPKLTVTIDTNVNSTILNLEDNVQSWK PGDTLVIASTDYSMYQAEEFQVLPCRSCAPNQVKVAGKPMYLHIGEEIDGVDMRAEVGLLSRNIIVMGEM EDKCYPYRNHICNFFDFDTFGGHIKFALGFKAAHLEGTELKHMGQQLVGQYPIHFHLAGDVDERGGYDPP TYIRDLSIHHTFSRCVTVHGSNGLLIKDVVGYNSLGHCFFTEDGPEERNTFDHCLGLLVKSGTLLPSDRDSK MCKMITEDSYPGYIPKPRQDCNAVSTFWMANPNNNLINCAAAGSEETGFWFIFHHVPTGPSVGMYSPGYS EHIPLGKFYNNRAHSNYRAGMIIDNGVKTTEASAKDKRPFLSIISARYSPHQDADPLKPREPAIIRHFIAYKN QDHGAWLRGGDVWLDSCRFADNGIGLTLASGGTFPYDDGSKQEIKNSLFVGESGNVGTEMMDNRIWGP GGLDH of R30650_PEA_{—}2_P5 (SEQ ID NO:992).

[3113] The location of the variant protein was determined according to results from a number of different software programs and analyses, including analyses from SignalP and other specialized programs. The variant protein is believed to be located as follows with regard to the cell: intracellularly. The protein localization is believed to be intracellularly because neither of the trans-membrane region prediction programs predicted a trans-membrane region for this protein. In addition both signal-peptide prediction programs predict that this protein is a non-secreted protein.

[3114] Variant protein R30650_PEA_{—}2_P5 (SEQ ID NO:992) also has the following non-silent SNPs (Single Nucleotide Polymorphisms) as listed in Table 10, (given according to their position(s) on the amino acid sequence, with the alternative amino acid(s) listed; the last column indicates whether the SNP is known or not; the presence of known SNPs in variant protein R30650_PEA_{—}2_P5 (SEQ ID NO:992) sequence provides support for the deduced sequence of this variant protein according to the present invention).

TABLE 10
Amino acid mutations

| SNP position(s) on amino acid | | Previously |
|---|---|---|
| sequence | Alternative amino acid(s) | known SNP? |
| 372 | M -> V | Yes |
| 418 | H -> R | Yes |

[3115] Variant protein R30650_PEA_{—}2_P5 (SEQ ID NO:992) is encoded by the following transcript(s): R30650_PEA_{—}2_T3 (SEQ ID NO:930), for which the sequence(s) is/are given at the end of the application. The coding portion of transcript R30650_PEA_{—}2_T3 (SEQ ID NO:930) is shown in bold; this coding portion starts at position 532 and ends at position 3519. The transcript also has the following SNPs as listed in Table 11 (given according to their position on the nucleotide sequence, with the alternative nucleic acid listed; the last column indicates whether the SNP is known or not; the presence of known SNPs in variant protein R30650_PEA_{—}2_P5 (SEQ ID NO:992) sequence provides support for the deduced sequence of this variant protein according to the present invention).

TABLE 11
Nucleic acid SNPs

| SNP position on nucleotide | | Previously |
|---|---|---|
| sequence | Alternative nucleic acid | known SNP? |
| 15 | A -> G | Yes |
| 112 | T -> C | Yes |
| 1320 | T -> C | Yes |
| 1407 | A -> G | Yes |
| 1645 | A -> G | Yes |
| 1784 | A -> G | Yes |
| 3667 | G -> C | Yes |
| 3883 | G -> A | Yes |
| 4944 | G -> A | Yes |
| 5992 | C -> T | Yes |
| 6131 | T -> C | Yes |
| 6223 | A -> C | Yes |

[3116] Variant protein R30650_PEA_{—}2_P8 (SEQ ID NO:993) according to the present invention has an amino acid sequence as given at the end of the application; it is encoded by transcript(s) R30650_PEA_{—}2_T6 (SEQ ID NO:931). An alignment is given to the known protein (Protein KIAA1199 precursor (SEQ ID NO:986)) at the end of the application. One or more alignments to one or more previously published protein sequences are given at the end of the application. A brief description of the relationship of the variant protein according to the present invention to each such aligned protein is as follows:

[3117] Comparison Report Between R30650_PEA_{—}2_P8 (SEQ ID NO:993) and Q9ULM1 (SEQ ID NO:989):

[3118] 1. An isolated chimeric polypeptide encoding for R30650_PEA_{—}2_P8 (SEQ ID NO:993), comprising a first amino acid sequence being at least 70%, optionally at least 80%, preferably at least 85%, more preferably at least 90% and most preferably at least 95% homologous to a polypeptide having the sequence MGAAGRQDFLFKAMLTISWLTLTCFPGATSTVAAGCPDQSPELQPWNPGHDQDHHVHIGQGKTLLLTSSA TVYSIHISEGGKLVIKDHDEPIVLRTRHILIDNGGELHAGSALCPFQGNFTIILYGRADEGIQPDPYYGLKYIG VGKGGALELHGQKKLSWTFLNKTLHPGGMAEGGYFFERSWGHRGVIVHVIDPKSGTVIHSDRFDTYRSK KESERLVQYLNAVPDGRILSVAVNDEGSRNLDDMARKAMTKLGSKHFLHLGFRHPWSFLTVKGNPSSSV EDHIEYHGHRGSAAARVFKLFQTEHGEYFNVSLSSEWVQDVEWTEWFDHDKVSQTKGGEKISDLWK corresponding to amino acids 1-348 of R30650_PEA_{—}2_P8 (SEQ ID NO:993), a second amino acid sequence being at least 90% homologous to AHPGKICNRPIDIQATTMDGVNLSTEVVYKKGQDYRFACYDRGRACRSYRVRFLCGKPVRPKLTVTIDTN VNSTILNLEDNVQSWKPGDTLVIASTDYSMYQAEEFQVLPCRSCAPNQVKVAGKPMYLHIGEEIDGVDMR AEVGLLSRNIIVMGEMEDKCYPYRNHICNFFDFDTFGGHIKFALGFKAAHLEGTELKHMGQQLVGQYPIH FHLAGDVDERGGYDPPTYIRDLSIHHTFSRCVTVHGSNGLLIKDVVGYNSLGHCFFTEDGPEERNTFDHCL GLLVKSGTLLPSDRDSKMCKMITEDSYPGYIPKPRQDCNAVSTFWMANPNNNLINCAAAGSEETGFWFIF HHVPTGPSVGMYSPGYSEHIPLGKFYNNRAHSNYRAGMIIDNGVKTTEASAKDKRPFLSIISARYSPHQDA DPLKPREPAIIRHFIAYKNQDHGAWLRGGDVWLDSCRFADNGIGLTLASGGTFPYDDGSKQEIKNSLFVGE SGNVGTEMMDNRIWGPGGLDHSGRTLPIGQNFPIRGIQLYDGPINIQNCTFRKFVALEGRHTSALAFRLNN AWQSCPHNNVTGIAFEDVPITSRVFFGEPGPWFNQLDMDGDKTSVFHDVDGSVSEYPGSYLTKNDNWLV RHPDCINVPDWRGAICSGCYAQMYIQAYKTSNLRMKIIKNDFPSHPLYLEGALTRSTHYQQYQPVVTLQK GYTIHWDQTAPAELAIWLINFNKGDWIRVGLCYPRGTTFSILSDVHNRLLKQTSKTGVFVRTLQMDKVEQ SYPGRSHYYWDEDSG corresponding to amino acids 1-788 of Q9ULM1 (SEQ ID NO:989), which also corresponds to amino acids 349-1136 of R30650_PEA_{—}2_P8 (SEQ ID NO:993), and a third amino acid sequence being at least 70%, optionally at least 80%, preferably at least 85%, more preferably at least 90% and most preferably at least 95% homologous to a polypeptide having the sequence KQRTISWR (SEQ ID NO:1470) corresponding to amino acids 1137-1144 of R30650_PEA_{—}2_P8 (SEQ ID NO:993), wherein said first amino acid sequence, second amino acid sequence and third amino acid sequence are contiguous and in a sequential order.

[3119] 2. An isolated polypeptide encoding for a head of R30650_PEA_{—}2_P8 (SEQ ID NO:993), comprising a polypeptide being at least 70%, optionally at least about 80%, preferably at least about 85%, more preferably at least about 90% and most preferably at least about 95% homologous to the sequence MGAAGRQDFLFKAMLTISWLTLTCFPGATSTVAAGCPDQSPELQPWNPGHDQDHHVHIGQGKTLLLTSSA TVYSIHISEGGKLVIKDHDEPIVLRTRHILIDNGGELHAGSALCPFQGNFTIILYGRADEGIQPDPYYGLKYIG VGKGGALELHGQKKLSWTFLNKTLHPGGMAEGGYFFERSWGHRGVIVHVIDPKSGTVIHSDRFDTYRSK KESERLVQYLNAVPDGRILSVAVNDEGSRNLDDMARKAMTKLGSKHFLHLGFRHPWSFLTVKGNPSSSV EDHIEYHGHRGSAAARVFKLFQTEHGEYFNVSLSSEWVQDVEWTEWFDHDKVSQTKGGEKISDLWK of R30650_PEA_{—}2_P8 (SEQ ID NO:993).

[3120] 3. An isolated polypeptide encoding for a tail of R30650_PEA_{—}2_P8 (SEQ ID NO:993), comprising a polypeptide being at least 70%, optionally at least about 80%, preferably at least about 85%, more preferably at least about 90% and most preferably at least about 95% homologous to the sequence KQRTISWR (SEQ ID NO:1470) in R30650_PEA_{—}2_P8 (SEQ ID NO:993).

[3121] Comparison Report Between R30650_PEA_{—}2_P8 (SEQ ID NO:993) and Q8WUJ3:

[3122] 1. An isolated chimeric polypeptide encoding for R30650_PEA_{—}2_P8 (SEQ ID NO:993), comprising a first amino acid sequence being at least 90% homologous to MGAAGRQDFLFKAMLTISWLTLTCFPGATSTVAAGCPDQSPELQPWNPGHDQDHHVHIGQGKTLLLTSSA TVYSIHISEGGKLVIKDHDEPIVLRTRHILIDNGGELHAGSALCPFQGNFTIILYGRADEGIQPDPYYGLKYIG VGKGGALELHGQKKLSWTFLNKTLHPGGMAEGGYFFERSWGHRGVIVHVIDPKSGTVIHSDRFDTYRSK KESERLVQYLNAVPDGRILSVAVNDEGSRNLDDMARKAMTKLGSKHFLHLGFRHPWSFLTVKGNPSSSV EDHIEYHGHRGSAAARVFKLFQTEHGEYFNVSLSSEWVQDVEWTEWFDHDKVSQTKGGEKISDLWKAHP GKICNRPIDIQATTMDGVNLSTEVVYKKGQDYRFACYDRGRACRSYRVRFLCGKPVRPKLTVTIDTNVNS TILNLEDNVQSWKPGDTLVIASTDYSMYQAEEFQVLPCRSCAPNQVKVAGKPMYLHIGEEIDGVDMRAEV GLLSRNIIVMGEMEDKCYPYRNHICNFFDFDTFGGHIKFALGFKAAHLEGTELKHMGQQLVGQYPIHFHL AGDVDERGGYDPPTYIRDLSIHHTFSRCVTVHGSNGLLIKDVVGYNSLGHCFFTEDGPEERNTFDHCLGLL VKSGTLLPSDRDSKMCKMITEDSYPGYIPKPRQDCNAVSTFWMANPNNNLINCAAAGSEETGFWFIFHHV PTGPSVGMYSPGYSEHIPLGKFYNNRAHSNYRAGMIIDNGVKTTEASAKDKRPFLSIISARYSPHQDADPLK PREPAIIRHFIAYKNQDHGAWLRGGDVWLDSCRFADNGIGLTLASGGTFPYDDGSKQEIKNSLFVGESGNV GTEMMDNRIWGPGGLDHSGRTLPIGQNFPIRGIQLYDGPINIQNCTFRKFVALEGRHTSALAFRLNNAWQS CPHNNVTGIAFEDVPITSRVFFGEPGPWFNQLDMDGDKTSVFHDVDGSVSEYPGSYLTKND corresponding to amino acids 1-977 of Q8WUJ3 (SEQ ID NO:987), which also corresponds to amino acids 1-977 of R30650_PEA_{—}2_P8 (SEQ ID NO:993), and a second amino acid sequence being at least 70%, optionally at least 80%, preferably at least 85%, more preferably at least 90% and most preferably at least 95% homologous to a polypeptide having the sequence NWLVRHPDCINVPDWRGAICSGCYAQMYIQAYKTSNLRMKIIKNDFPSHPLYLEGALTRSTHYQQYQPVV TLQKGYTIHWDQTAPAELAIWLINFNKGDWIRVGLCYPRGTTFSILSDVHNRLLKQTSKTGVFVRTLQMD KVEQSYPGRSHYYWDEDSGKQRTISWR corresponding to amino acids 978-1144 of R30650_PEA_{—}2_P8 (SEQ ID NO:993), wherein said first amino acid sequence and second amino acid sequence are contiguous and in a sequential order.

[3123] 2. An isolated polypeptide encoding for a tail of R30650_PEA_{—}2_P8 (SEQ ID NO:993), comprising a polypeptide being at least 70%, optionally at least about 80%, preferably at least about 85%, more preferably at least about 90% and most preferably at least about 95% homologous to the sequence NWLVRHPDCINVPDWRGAICSGCYAQMYIQAYKTSNLRMKIIKNDFPSHPLYLEGALTRSTHYQQYQPVV TLQKGYTIHWDQTAPAELAIWLINFNKGDWIRVGLCYPRGTTFSILSDVHNRLLKQTSKTGVFVRTLQMD KVEQSYPGRSHYYWDEDSGKQRTISWR in R30650_PEA_{—}2_P8 (SEQ ID NO:993).

[3124] Comparison Report Between R30650_PEA_{—}2_P8 (SEQ ID NO:993) and Q9NPN9:

[3125] 1. An isolated chimeric polypeptide encoding for R30650_PEA_{—}2_P8 (SEQ ID NO:993), comprising a first amino acid sequence being at least 70%, optionally at least 80%, preferably at least 85%, more preferably at least 90% and most preferably at least 95% homologous to a polypeptide having the sequence MGAAGRQDFLFKAMLTISWLTLTCFPGATSTVAAGCPDQSPELQPWNPGHDQDHHVHIGQGKTLLLTSSA TVYSIHISEGGKLVIKDHDEPIVLRTRHILIDNGGELHAGSALCPFQGNFTIILYGRADEGIQPDPYYGLKYIG VGKGGALELHGQKKLSWTFLNKTLHPGGMAEGGYFFERSWGHRGVIVHVIDPKSGTVIHSDRFDTYRSK KESERLVQYLNAVPDGRILSVAVNDEGSRNLDDMARKAMTKLGSKHFLHLGFRHPWSFLTVKGNPSSSV EDHIEYHGHRGSAAARVFKLFQTEHGEYFNVSLSSEWVQDVEWTEWFDHDKVSQTKGGEKISDLWKAHP GKICNRPIDIQATTMDGVNLSTEVVYKKGQDYRFACYDRGRACRSYRVRFLCGKPVRPKLTVTIDTNVNS TILNLEDNVQSWKPGDTLVIASTDYSMYQAEEFQVLPCRSCAPNQVKVAGKPMYLHIGEEIDGVDMRAEV GLLSRNIIVMGEMEDKCYPYRNHICNFFDFDTFGGHIKFALGFKAAHLEGTELKHMGQQLVGQYPIHFHL AGD corresponding to amino acids 1-564 of R30650_PEA_{—}2_P8 (SEQ ID NO:993), a second amino acid sequence being at least 90% homologous to VDERGGYDPPTYIRDLSIHHTFSRCVTVHGSNGLLIKDVVGYNSLGHCFFTEDGPEERNTFDHCLGLLVKS GTLLPSDRDSKMCKMITEDSYPGYIPKPRQDCNAVSTFWMANPNNNLINCAAAGSEETGFWFIFHHVPTG PSVGMYSPGYSEHIPLGKFYNNRAHSNYRAGMIIDNGVKTTEASAKDKRPFLSIISARYSPHQDADPLKPRE PAIIRHFIAYKNQDHGAWLRGGDVWLDSCRFADNGIGLTLASGGTFPYDDGSKQEIKNSLFVGESGNVGT EMMDNRIWGPGGLDHSGRTLPIGQNFPIRGIQLYDGPINIQNCTFRKFVALEGRHTSALAFRLNNAWQSCP HNNVTGIAFEDVPITSRVFFGEPGPWFNQLDMDGDKTSVFHDVDGSVSEYPGSYLTKNDNWLVRHPDCIN VPDWRGAICSGCYAQMYIQAYKTSNLRMKIIKNDFPSHPLYLEGALTRSTHYQQYQPVVTLQKGYTIHWD QTAPAELAIWLINFNKGDWIRVGLCYPRGTTFSILSDVHNRLLKQTSKTGVFVRTLQMDKVEQSYPGRSH YYWDEDSG corresponding to amino acids 8-579 of Q9NPN9 (SEQ ID NO:988), which also corresponds to amino acids 565-1136 of R30650_PEA_{—}2_P8 (SEQ ID NO:993), and a third amino acid sequence being at least 70%, optionally at least 80%, preferably at least 85%, more preferably at least 90% and most preferably at least 95% homologous to a polypeptide having the sequence KQRTISWR (SEQ ID NO:1470) corresponding to amino acids 1137-1144 of R30650_PEA_{—}2_P8 (SEQ ID NO:993), wherein said first amino acid sequence, second amino acid sequence and third amino acid sequence are contiguous and in a sequential order.

[3126] 2. An isolated polypeptide encoding for a head of R30650_PEA_{—}2_P8 (SEQ ID NO:993), comprising a polypeptide being at least 70%, optionally at least about 80%, preferably at least about 85%, more preferably at least about 90% and most preferably at least about 95% homologous to the sequence MGAAGRQDFLFKAMLTISWLTLTCFPGATSTVAAGCPDQSPELQPWNPGHDQDHHVHIGQGKTLLLTSSA TVYSIHISEGGKLVIKDHDEPIVLRTRHILIDNGGELHAGSALCPFQGNFTIILYGRADEGIQPDPYYGLKYIG VGKGGALELHGQKKLSWTFLNKTLHPGGMAEGGYFFERSWGHRGVIVHVIDPKSGTVIHSDRFDTYRSK KESERLVQYLNAVPDGRILSVAVNDEGSRNLDDMARKAMTKLGSKHFLHLGFRHPWSFLTVKGNPSSSV EDHIEYHGHRGSAAARVFKLFQTEHGEYFNVSLSSEWVQDVEWTEWFDHDKVSQTKGGEKISDLWKAHP GKICNRPIDIQATTMDGVNLSTEVVYKKGQDYRFACYDRGRACRSYRVRFLCGKPVRPKLTVTIDTNVNS TILNLEDNVQSWKPGDTLVIASTDYSMYQAEEFQVLPCRSCAPNQVKVAGKPMYLHIGEEIDGVDMRAEV GLLSRNIIVMGEMEDKCYPYRNHICNFFDFDTFGGHIKFALGFKAAHLEGTELKHMGQQLVGQYPIHFHL AGD of R30650_PEA_{—}2_P8 (SEQ ID NO:993).

[3127] 3. An isolated polypeptide encoding for a tail of R30650_PEA_{—}2_P8 (SEQ ID NO:993), comprising a polypeptide being at least 70%, optionally at least about 80%, preferably at least about 85%, more preferably at least about 90% and most preferably at least about 95% homologous to the sequence KQRTISWR (SEQ ID NO:1470) in R30650_PEA_{—}2_P8 (SEQ ID NO:993).

[3128] Comparison Report Between R30650_PEA_{—}2_P8 (SEQ ID NO:993) and Q9H1K5:

[3129] 1. An isolated chimeric polypeptide encoding for R30650_PEA_{—}2_P8 (SEQ ID NO:993), comprising a first amino acid sequence being at least 70%, optionally at least 80%, preferably at least 85%, more preferably at least 90% and most preferably at least 95% homologous to a polypeptide having the sequence MGAAGRQDFLFKAMLTISWLTLTCFPGATSTVAAGCPDQSPELQPWNPGHDQDHHVHIGQGKTLLLTSSA TVYSIHISEGGKLVIKDHDEPIVLRTRHILIDNGGELHAGSALCPFQGNFTIILYGRADEGIQPDPYYGLKYIG VGKGGALELHGQKKLSWTFLNKTLHPGGMAEGGYFFERSWGHRGVIVHVIDPKSGTVIHSDRFDTYRSK KESERLVQYLNAVPDGRILSVAVNDEGSRNLDDMARKAMTKLGSKHFLHLGFRHPWSFLTVKGNPSSSV EDHIEYHGHRGSAAARVFKLFQTEHGEYFNVSLSSEWVQDVEWTEWFDHDKVSQTKGGEKISDLWKAHP GKICNRPIDIQATTMDGVNLSTEVVYKKGQDYRFACYDRGRACRSYRVRFLCGKPVRPKLTVTIDTNVNS TILNLEDNVQSWKPGDTLVIASTDYSMYQAEEFQVLPCRSCAPNQVKVAGKPMYLHIGEEIDGVDMRAEV GLLSRNIIVMGEMEDKCYPYRNHICNFFDFDTFGGHIKFALGFKAAHLEGTELKHMGQQLVGQYPIHFHL AGDVDERGGYDPPTYIRDLSIHHTFSRCVTVHGSNGLLIKDVVGYNSLGHCFFTEDGPEERNTFDHCLGLL VKSGTLLPSDRDSKMCKMITEDSYPGYIPKPRQDCNAVSTFWMANPNNNLINCAAAGSEETGFWFIFHHV PTGPSVGMYSPGYSEHIPLGKFYNNRAHSNYRAGMIIDNGVKTTEASAKDKRPFLSIISARYSPHQDADPLK PREPAIIRHFIAYKNQDHGAWLRGGDVWLDSCRFADNGIGLTLASGGTFPYDDGSKQEIKNSLFVGESGNV GTEMMDNRIWGPGGLDH corresponding to amino acids 1-862 of R30650_PEA_{—}2_P8 (SEQ ID NO:993), a second amino acid sequence being at least 90% homologous to SGRTLPIGQNFPIRGIQLYDGPINIQNCTFRKFVALEGRHTSALAFRLNNAWQSCPHNNVTGIAFEDVPITSR VFFGEPGPWFNQLDMDGDKTSVFHDVDGSVSEYPGSYLTKNDNWLVRHPDCINVPDWRGAICSGCYAQ MYIQAYKTSNLRMKIIKNDFPSHPLYLEGALTRSTHYQQYQPVVTLQKGYTIHWDQTAPAELAIWLINFNK GDWIRVGLCYPRGTTFSILSDVHNRLLKQTSKTGVFVRTLQMDKVEQSYPGRSHYYWDEDSG corresponding to amino acids 2-275 of Q9H1K5 (SEQ ID NO:990), which also corresponds to amino acids 863-1136 of R30650_PEA_{—}2_P8 (SEQ ID NO:993), and a third amino acid sequence being at least 70%, optionally at least 80%, preferably at least 85%, more preferably at least 90% and most preferably at least 95% homologous to a polypeptide having the sequence KQRTISWR (SEQ ID NO:1470) corresponding to amino acids 1137-1144 of R30650_PEA_{—}2_P8 (SEQ ID NO:993), wherein said first amino acid sequence, second amino acid sequence and third amino acid sequence are contiguous and in a sequential order.

[3130] 2. An isolated polypeptide encoding for a head of R30650_PEA_{—}2_P8 (SEQ ID NO:993), comprising a polypeptide being at least 70%, optionally at least about 80%, preferably at least about 85%, more preferably at least about 90% and most preferably at least about 95% homologous to the sequence MGAAGRQDFLFKAMLTISWLTLTCFPGATSTVAAGCPDQSPELQPWNPGHDQDHHVHIGQGKTLLLTSSA TVYSIHISEGGKLVIKDHDEPIVLRTRHILIDNGGELHAGSALCPFQGNFTIILYGRADEGIQPDPYYGLKYIG VGKGGALELHGQKKLSWTFLNKTLHPGGMAEGGYFFERSWGHRGVIVHVIDPKSGTVIHSDRFDTYRSK KESERLVQYLNAVPDGRILSVAVNDEGSRNLDDMARKAMTKLGSKHFLHLGFRHPWSFLTVKGNPSSSV EDHIEYHGHRGSAAARVFKLFQTEHGEYFNVSLSSEWVQDVEWTEWFDHDKVSQTKGGEKISDLWKAHP GKICNRPIDIQATTMDGVNLSTEVVYKKGQDYRFACYDRGRACRSYRVRFLCGKPVRPKLTVTIDTNVNS TILNLEDNVQSWKPGDTLVIASTDYSMYQAEEFQVLPCRSCAPNQVKVAGKPMYLHIGEEIDGVDMRAEV GLLSRNIIVMGEMEDKCYPYRNHICNFFDFDTFGGHIKFALGFKAAHLEGTELKHMGQQLVGQYPIHFHL AGDVDERGGYDPPTYIRDLSIHHTFSRCVTVHGSNGLLIKDVVGYNSLGHCFFTEDGPEERNTFDHCLGLL VKSGTLLPSDRDSKMCKMITEDSYPGYIPKPRQDCNAVSTFWMANPNNNLINCAAAGSEETGFWFIFHHV PTGPSVGMYSPGYSEHIPLGKFYNNRAHSNYRAGMIIDNGVKTTEASAKDKRPFLSIISARYSPHQDADPLK PREPAIIRHFIAYKNQDHGAWLRGGDVWLDSCRFADNGIGLTLASGGTFPYDDGSKQEIKNSLFVGESGNV GTEMMDNRIWGPGGLDH of R30650_PEA_{—}2_P8 (SEQ ID NO:993).

[3131] 3. An isolated polypeptide encoding for a tail of R30650_PEA_{—}2_P8 (SEQ ID NO:993), comprising a polypeptide being at least 70%, optionally at least about 80%, preferably at least about 85%, more preferably at least about 90% and most preferably at least about 95% homologous to the sequence KQRTISWR (SEQ ID NO:1470) in R30650_PEA_{—}2_P8 (SEQ ID NO:993).

[3132] The location of the variant protein was determined according to results from a number of different software programs and analyses, including analyses from SignalP and other specialized programs. The variant protein is believed to be located as follows with regard to the cell: secreted. The protein localization is believed to be secreted because both signal-peptide prediction programs predict that this protein has a signal peptide, and neither trans-membrane region prediction program predicts that this protein has a trans-membrane region.

[3133] Variant protein R30650_PEA_{—}2_P8 (SEQ ID NO:993) also has the following non-silent SNPs (Single Nucleotide Polymorphisms) as listed in Table 12, (given according to their position(s) on the amino acid sequence, with the alternative amino acid(s) listed; the last column indicates whether the SNP is known or not; the presence of known SNPs in variant protein R30650_PEA_{—}2_P8 (SEQ ID NO:993) sequence provides support for the deduced sequence of this variant protein according to the present invention).

TABLE 12
Amino acid mutations

| SNP position(s) on amino acid | | Previously |
|---|---|---|
| sequence | Alternative amino acid(s) | known SNP? |
| 737 | M -> V | Yes |
| 783 | H -> R | Yes |

[3134] Variant protein R30650_PEA_{—}2_P8 (SEQ ID NO:993) is encoded by the following transcript(s): R30650_PEA_{—}2_T6 (SEQ ID NO:931), for which the sequence(s) is/are given at the end of the application. The coding portion of transcript R30650_PEA_{—}2_T6 (SEQ ID NO:931) is shown in bold; this coding portion starts at position 265 and ends at position 3696. The transcript also has the following SNPs as listed in Table 13 (given according to their position on the nucleotide sequence, with the alternative nucleic acid listed; the last column indicates whether the SNP is known or not; the presence of known SNPs in variant protein R30650_PEA_{—}2_P8 (SEQ ID NO:993) sequence provides support for the deduced sequence of this variant protein according to the present invention).

TABLE 13
Nucleic acid SNPs

| SNP position on nucleotide | | Previously |
|---|---|---|
| sequence | Alternative nucleic acid | known SNP? |
| 9 | T -> A | Yes |
| 2148 | T -> C | Yes |
| 2235 | A -> G | Yes |
| 2473 | A -> G | Yes |
| 2612 | A -> G | Yes |
| 4290 | G -> C | Yes |
| 4506 | G -> A | Yes |
| 5567 | G -> A | Yes |
| 6615 | C -> T | Yes |
| 6754 | T -> C | Yes |
| 6846 | A -> C | Yes |

[3135] Variant protein R30650_PEA_{—}2_P12 (SEQ ID NO:994) according to the present invention has an amino acid sequence as given at the end of the application; it is encoded by transcript(s) R30650_PEA_{—}2_T14 (SEQ ID NO:932). The location of the variant protein was determined according to results from a number of different software programs and analyses, including analyses from SignalP and other specialized programs. The variant protein is believed to be located as follows with regard to the cell: intracellularly. The protein localization is believed to be intracellularly because neither of the trans-membrane region prediction programs predicted a trans-membrane region for this protein. In addition both signal-peptide prediction programs predict that this protein is a non-secreted protein.

[3136] Variant protein R30650_PEA_{—}2_P12 (SEQ ID NO:994) is encoded by the following transcript(s): R30650_PEA_{—}2_T14 (SEQ ID NO:932), for which the sequence(s) is/are given at the end of the application. The coding portion of transcript R30650_PEA_{—}2_T14 (SEQ ID NO:932) is shown in bold; this coding portion starts at position 1543 and ends at position 1719. The transcript also has the following SNPs as listed in Table 14 (given according to their position on the nucleotide sequence, with the alternative nucleic acid listed; the last column indicates whether the SNP is known or not; the presence of known SNPs in variant protein R30650_PEA_{—}2_P12 (SEQ ID NO:994) sequence provides support for the deduced sequence of this variant protein according to the present invention).

TABLE 14
Nucleic acid SNPs

| SNP position on nucleotide | | Previously |
|---|---|---|
| sequence | Alternative nucleic acid | known SNP? |
| 9 | T -> A | Yes |
| 381 | C -> T | Yes |
| 788 | C -> G | Yes |
| 799 | A -> G | No |
| 1324 | A -> T | Yes |
| 1437 | T -> C | Yes |
| 1441 | G -> A | Yes |
| 1513 | T -> C | Yes |
| 1529 | A -> G | Yes |
| 2087 | C -> A | Yes |
| 2182 | C -> T | Yes |

[3137] Variant protein R30650_PEA_{—}2_P13 (SEQ ID NO:995) according to the present invention has an amino acid sequence as given at the end of the application; it is encoded by transcript(s) R30650_PEA_{—}2_T15 (SEQ ID NO:933) and R30650_PEA_{—}2_T21 (SEQ ID NO:935). The location of the variant protein was determined according to results from a number of different software programs and analyses, including analyses from SignalP and other specialized programs. The variant protein is believed to be located as follows with regard to the cell: intracellularly. The protein localization is believed to be intracellularly because neither of the trans-membrane region prediction programs predicted a trans-membrane region for this protein. In addition both signal-peptide prediction programs predict that this protein is a non-secreted protein.

[3138] Variant protein R30650_PEA_{—}2_P13 (SEQ ID NO:995) is encoded by the following transcript(s): R30650_PEA_{—}2_T15 (SEQ ID NO:933) and R30650_PEA_{—}2_T21 (SEQ ID NO:935), for which the sequence(s) is/are given at the end of the application.

[3139] The coding portion of transcript R30650_PEA_{—}2_T15 (SEQ ID NO:933) is shown in bold; this coding portion starts at position 1543 and ends at position 1713. The transcript also has the following SNPs as listed in Table 15 (given according to their position on the nucleotide sequence, with the alternative nucleic acid listed; the last column indicates whether the SNP is known or not; the presence of known SNPs in variant protein R30650_PEA_{—}2_P13 (SEQ ID NO:995) sequence provides support for the deduced sequence of this variant protein according to the present invention).

TABLE 15
Nucleic acid SNPs

| SNP position on nucleotide | | Previously |
|---|---|---|
| sequence | Alternative nucleic acid | known SNP? |
| 9 | T -> A | Yes |
| 381 | C -> T | Yes |
| 788 | C -> G | Yes |
| 799 | A -> G | No |
| 1324 | A -> T | Yes |
| 1437 | T -> C | Yes |
| 1441 | G -> A | Yes |
| 1513 | T -> C | Yes |
| 1529 | A -> G | Yes |
| 1920 | C -> A | Yes |
| 2015 | C -> T | Yes |

[3140] The coding portion of transcript R30650_PEA_{—}2_T21 (SEQ ID NO:935) is shown in bold; this coding portion starts at position 1543 and ends at position 1713. The transcript also has the following SNPs as listed in Table 16 (given according to their position on the nucleotide sequence, with the alternative nucleic acid listed; the last column indicates whether the SNP is known or not; the presence of known SNPs in variant protein R30650_PEA_{—}2_P13 (SEQ ID NO:995) sequence provides support for the deduced sequence of this variant protein according to the present invention).

TABLE 16
Nucleic acid SNPs

| SNP position on nucleotide | | Previously |
|---|---|---|
| sequence | Alternative nucleic acid | known SNP? |
| 9 | T -> A | Yes |
| 381 | C -> T | Yes |
| 788 | C -> G | Yes |
| 799 | A -> G | No |
| 1324 | A -> T | Yes |
| 1437 | T -> C | Yes |
| 1441 | G -> A | Yes |
| 1513 | T -> C | Yes |
| 1529 | A -> G | Yes |
| 1956 | T -> C | Yes |

[3141] Variant protein R30650_PEA_{—}2_P15 (SEQ ID NO:996) according to the present invention has an amino acid sequence as given at the end of the application; it is encoded by transcript(s) R30650_PEA_{—}2_T18 (SEQ ID NO:934). An alignment is given to the known protein (Protein KIAA1199 precursor (SEQ ID NO:986)) at the end of the application. One or more alignments to one or more previously published protein sequences are given at the end of the application. A brief description of the relationship of the variant protein according to the present invention to each such aligned protein is as follows:

[3142] Comparison Report Between R30650_PEA_{—}2_P15 (SEQ ID NO:996) and Q9ULM1 (SEQ ID NO:989):

[3143] 1. An isolated chimeric polypeptide encoding for R30650_PEA_{—}2_P15 (SEQ ID NO:996), comprising a first amino acid sequence being at least 70%, optionally at least 80%, preferably at least 85%, more preferably at least 90% and most preferably at least 95% homologous to a polypeptide having the sequence MGAAGRQDFLFKAMLTISWLTLTCFPGATSTVAAGCPDQSPELQPWNPGHDQDHHVHIGQGKTLLLTSSA TVYSIHISEGGKLVIKDHDEPIVLRTRHILIDNGGELHAGSALCPFQGNFTIILYGRADEGIQPDPYYGLKYIG VGKGGALELHGQKKLSWTFLNKTLHPGGMAEGGYFFERSWGHRGVIVHVIDPKSGTVIHSDRFDTYRSK KESERLVQYLNAVPDGRILSVAVNDEGSRNLDDMARKAMTKLGSKHFLHLGFRHPWSFLTVKGNPSSSV EDHIEYHGHRGSAAARVFKLFQTEHGEYFNVSLSSEWVQDVEWTEWFDHDKVSQTKGGEKISDLWK corresponding to amino acids 1-348 of R30650_PEA_{—}2_P15 (SEQ ID NO:996), and a second amino acid sequence being at least 90% homologous to AHPGKICNRPIDIQATTMDGVNLSTEVVYKKGQDYRFACYDRGRACRSYRVRFLCGKPVRPKLTVTIDTN VNSTILNLEDNVQSWKPGDTLVIASTDYSMYQAEEFQVLPCRSCAPNQVKVAGKPMYLHIGEEIDGVDMR AEVGLLSRNIIVMGEMEDKCYPYRNHICNFFDFDTFGGHIKFALGFKAAHLEGTELKHMGQQLVGQYPIH FHLAGDVDERGGYDPPTYIRDLSIHHTFSRCVTVHGSNGLLIKDVVGYNSLGHCFFTEDGPEERNTFDHCL GLLVKSGTLLPSDRDSKMCKMITEDSYPGYIPKPRQDCNAVSTFWMANPNNNLINCAAAGSEETGFWFIF HHVPTGPSVGMYSPGYSEHIPLGKFYNNRAHSNYRAGMIIDNGVKTTEASAKDKRPFLSIISARYSPHQDA DPLKPREPAIIRHFIAYKNQDHGAWLRGGDVWLDSCRFADNGIGLTLASGGTFPYDDGSKQEIKNSLFVGE SGNVGTEMMDNRIWGPGGLDHSGRTLPIGQNFPIRGIQLYDGPINIQNCTFRKFVALEGRHTSALAFRLNN AWQSCPHNNVTGIAFEDVPITSRVFFGEPGPWFNQLDMDGDKTSVFHDVDGSVSEYPGSYLTKNDNWLV RHPDCINVPDWRGAICSGCYAQMYIQAYKTSNLRMKIIKNDFPSHPLYLEGALTRSTHYQQYQPVVTLQK GYTIHWDQTAPAELAIWLINFNKGDWIRVGLCYPRGTTFSILSDVHNRLLKQTSKTGVFVRTLQMDKVEQ SYPGRSHYYWDEDSG corresponding to amino acids 1-788 of Q9ULM1 (SEQ ID NO:989), which also corresponds to amino acids 349-1136 of R30650_PEA_{—}2_P15 (SEQ ID NO:996), wherein said first amino acid sequence and second amino acid sequence are contiguous and in a sequential order.

[3144] 2. An isolated polypeptide encoding for a head of R30650_PEA_{—}2_P15 (SEQ ID NO:996), comprising a polypeptide being at least 70%, optionally at least about 80%, preferably at least about 85%, more preferably at least about 90% and most preferably at least about 95% homologous to the sequence MGAAGRQDFLFKAMLTISWLTLTCFPGATSTVAAGCPDQSPELQPWNPGHDQDHHVHIGQGKTLLLTSSA TVYSIHISEGGKLVIKDHDEPIVLRTRHILIDNGGELHAGSALCPFQGNFTIILYGRADEGIQPDPYYGLKYIG VGKGGALELHGQKKLSWTFLNKTLHPGGMAEGGYFFERSWGHRGVIVHVIDPKSGTVIHSDRFDTYRSK KESERLVQYLNAVPDGRILSVAVNDEGSRNLDDMARKAMTKLGSKHFLHLGFRHPWSFLTVKGNPSSSV EDHIEYHGHRGSAAARVFKLFQTEHGEYFNVSLSSEWVQDVEWTEWFDHDKVSQTKGGEKISDLWK of R30650_PEA_{—}2_P15 (SEQ ID NO:996).

[3145] Comparison Report Between R30650_PEA_{—}2_P15 (SEQ ID NO:996) and Q8WUJ3 (SEQ ID NO:987):

[3146] 1. An isolated chimeric polypeptide encoding for R30650_PEA_{—}2_P15 (SEQ ID NO:996), comprising a first amino acid sequence being at least 90% homologous to MGAAGRQDFLFKAMLTISWLTLTCFPGATSTVAAGCPDQSPELQPWNPGHDQDHHVHIGQGKTLLLTSSA TVYSIHISEGGKLVIKDHDEPIVLRTRHILIDNGGELHAGSALCPFQGNFTIILYGRADEGIQPDPYYGLKYIG VGKGGALELHGQKKLSWTFLNKTLHPGGMAEGGYFFERSWGHRGVIVHVIDPKSGTVIHSDRFDTYRSK KESERLVQYLNAVPDGRILSVAVNDEGSRNLDDMARKAMTKLGSKHFLHLGFRHPWSFLTVKGNPSSSV EDHIEYHGHRGSAAARVFKLFQTEHGEYFNVSLSSEWVQDVEWTEWFDHDKVSQTKGGEKISDLWKAHP GKICNRPIDIQATTMDGVNLSTEVVYKKGQDYRFACYDRGRACRSYRVRFLCGKPVRPKLTVTIDTNVNS TILNLEDNVQSWKPGDTLVIASTDYSMYQAEEFQVLPCRSCAPNQVKVAGKPMYLHIGEEIDGVDMRAEV GLLSRNIIVMGEMEDKCYPYRNHICNFFDFDTFGGHIKFALGFKAAHLEGTELKHMGQQLVGQYPIHFHL AGDVDERGGYDPPTYIRDLSIHHTFSRCVTVHGSNGLLIKDVVGYNSLGHCFFTEDGPEERNTFDHCLGLL VKSGTLLPSDRDSKMCKMITEDSYPGYIPKPRQDCNAVSTFWMANPNNNLINCAAAGSEETGFWFIFHHV PTGPSVGMYSPGYSEHIPLGKFYNNRAHSNYRAGMIIDNGVKTTEASAKDKRPFLSIISARYSPHQDADPLK PREPAIIRHFIAYKNQDHGAWLRGGDVWLDSCRFADNGIGLTLASGGTFPYDDGSKQEIKNSLFVGESGNV GTEMMDNRIWGPGGLDHSGRTLPIGQNFPIRGIQLYDGPINIQNCTFRKFVALEGRHTSALAFRLNNAWQS CPHNNVTGIAFEDVPITSRVFFGEPGPWFNQLDMDGDKTSVFHDVDGSVSEYPGSYLTKND corresponding to amino acids 1-977 of Q8WUJ3 (SEQ ID NO:987), which also corresponds to amino acids 1-977 of R30650_PEA_{—}2_P15 (SEQ ID NO:996), and a second amino acid sequence being at least 70%, optionally at least 80%, preferably at least 85%, more preferably at least 90% and most preferably at least 95% homologous to a polypeptide having the sequence NWLVRHPDCINVPDWRGAICSGCYAQMYIQAYKTSNLRMKIIKNDFPSHPLYLEGALTRSTHYQQYQPVV TLQKGYTIHWDQTAPAELAIWLINFNKGDWIRVGLCYPRGTTFSILSDVHNRLLKQTSKTGVFVRTLQMD KVEQSYPGRSHYYWDEDSG corresponding to amino acids 978-1136 of R30650_PEA_{—}2_P15 (SEQ ID NO:996), wherein said first amino acid sequence and second amino acid sequence are contiguous and in a sequential order.

[3147] 2. An isolated polypeptide encoding for a tail of R30650_PEA_{—}2_P15 (SEQ ID NO:996), comprising a polypeptide being at least 70%, optionally at least about 80%, preferably at least about 85%, more preferably at least about 90% and most preferably at least about 95% homologous to the sequence NWLVRHPDCINVPDWRGAICSGCYAQMYIQAYKTSNLRMKIIKNDFPSHPLYLEGALTRSTHYQQYQPVV TLQKGYTIHWDQTAPAELAIWLINFNKGDWIRVGLCYPRGTTFSILSDVHNRLLKQTSKTGVFVRTLQMD KVEQSYPGRSHYYWDEDSG in R30650_PEA_{—}2_P15 (SEQ ID NO:996).

[3148] Comparison Report Between R30650_PEA_{—}2_P15 (SEQ ID NO:996) and Q9NPN9 (SEQ ID NO:988):

[3149] 1. An isolated chimeric polypeptide encoding for R30650_PEA_{—}2_P15 (SEQ ID NO:996), comprising a first amino acid sequence being at least 70%, optionally at least 80%, preferably at least 85%, more preferably at least 90% and most preferably at least 95% homologous to a polypeptide having the sequence MGAAGRQDFLFKAMLTISWLTLTCFPGATSTVAAGCPDQSPELQPWNPGHDQDHHVHIGQGKTLLLTSSA TVYSIHISEGGKLVIKDHDEPIVLRTRHILIDNGGELHAGSALCPFQGNFTIILYGRADEGIQPDPYYGLKYIG VGKGGALELHGQKKLSWTFLNKTLHPGGMAEGGYFFERSWGHRGVIVHVIDPKSGTVIHSDRFDTYRSK KESERLVQYLNAVPDGRILSVAVNDEGSRNLDDMARKAMTKLGSKHFLHLGFRHPWSFLTVKGNPSSSV EDHIEYHGHRGSAAARVFKLFQTEHGEYFNVSLSSEWVQDVEWTEWFDHDKVSQTKGGEKISDLWKAHP GKICNRPIDIQATTMDGVNLSTEVVYKKGQDYRFACYDRGRACRSYRVRFLCGKPVRPKLTVTIDTNVNS TILNLEDNVQSWKPGDTLVIASTDYSMYQAEEFQVLPCRSCAPNQVKVAGKPMYLHIGEEIDGVDMRAEV GLLSRNIIVMGEMEDKCYPYRNHICNFFDFDTFGGHIKFALGFKAAHLEGTELKHMGQQLVGQYPIHFHL AGD corresponding to amino acids 1-564 of R30650_PEA_{—}2_P15 (SEQ ID NO:996), and a second amino acid sequence being at least 90% homologous to VDERGGYDPPTYIRDLSIHHTFSRCVTVHGSNGLLIKDVVGYNSLGHCFFTEDGPEERNTFDHCLGLLVKS GTLLPSDRDSKMCKMITEDSYPGYIPKPRQDCNAVSTFWMANPNNNLINCAAAGSEETGFWFIFHHVPTG PSVGMYSPGYSEHIPLGKFYNNPAHSNYRAGMIIDNGVKTTEASAKDKRPFLSIISARYSPHQDADPLKPRE PAIIRHFIAYKNQDHGAWLRGGDVWLDSCRFADNGIGLTLASGGTFPYDDGSKQEIKNSLFVGESGNVGT EMMDNRIWGPGGLDHSGRTLPIGQNFPIRGIQLYDGPINIQNCTFRKFVALEGRHTSALAFRLNNAWQSCP HNNVTGIAFEDVPITSRVFFGEPGPWFNQLDMDGDKTSVFHDVDGSVSEYPGSYLTKNDNWLVRHPDCIN VPDWRGAICSGCYAQMYIQAYKTSNLRMKIIKNDFPSHPLYLEGALTRSTHYQQYQPVVTLQKGYTIHWD QTAPAELAIWLINFNKGDWIRVGLCYPRGTTFSILSDVHNRLLKQTSKTGVFVRTLQMDKVEQSYPGRSH YYWDEDSG corresponding to amino acids 8-579 of Q9NPN9 (SEQ ID NO:988), which also corresponds to amino acids 565-1136 of R30650_PEA_{—}2_P15 (SEQ ID NO:996), wherein said first amino acid sequence and second amino acid sequence are contiguous and in a sequential order.

[3150] 2. An isolated polypeptide encoding for a head of R30650_PEA_{—}2_P15 (SEQ ID NO:996), comprising a polypeptide being at least 70%, optionally at least about 80%, preferably at least about 85%, more preferably at least about 90% and most preferably at least about 95% homologous to the sequence MGAAGRQDFLFKAMLTISWLTLTCFPGATSTVAAGCPDQSPELQPWNPGHDQDHHVHIGQGKTLLLTSSA TVYSIHISEGGKLVIKDHDEPIVLRTRHILIDNGGELHAGSALCPFQGNFTIILYGRADEGIQPDPYYGLKYIG VGKGGALELHGQKKLSWTFLNKTLHPGGMAEGGYFFERSWGHRGVIVHVIDPKSGTVIHSDRFDTYRSK KESERLVQYLNAVPDGRILSVAVNDEGSRNLDDMARKAMTKLGSKHFLHLGFRHPWSFLTVKGNPSSSV EDHIEYHGHRGSAAARVFKLFQTEHGEYFNVSLSSEWVQDVEWTEWFDHDKVSQTKGGEKISDLWKAHP GKICNRPIDIQATTMDGVNLSTEVVYKKGQDYRFACYDRGRACRSYRVRFLCGKPVRPKLTVTIDTNVNS TILNLEDNVQSWKPGDTLVIASTDYSMYQAEEFQVLPCRSCAPNQVKVAGKPMYLHIGEEIDGVDMRAEV GLLSRNIIVMGEMEDKCYPYRNHICNFFDFDTFGGHIKFALGFKAAHLEGTELKHMGQQLVGQYPIHFHL AGD of R30650_PEA_{—}2_P15 (SEQ ID NO:996).

[3151] Comparison Report Between R30650_PEA_{—}2_P15 (SEQ ID NO:996) and Q9H1K5 (SEQ ID NO:990):

[3152] 1. An isolated chimeric polypeptide encoding for R30650_PEA_{—}2_P15 (SEQ ID NO:996), comprising a first amino acid sequence being at least 70%, optionally at least 80%, preferably at least 85%, more preferably at least 90% and most preferably at least 95% homologous to a polypeptide having the sequence MGAAGRQDFLFKAMLTISWLTLTCFPGATSTVAAGCPDQSPELQPWNPGHDQDHHVHIGQGKTLLLTSSA TVYSIHISEGGKLVIKDHDEPIVLRTRHILIDNGGELHAGSALCPFQGNFTIILYGRADEGIQPDPYYGLKYIG VGKGGALELHGQKKLSWTFLNKTLHPGGMAEGGYFFERSWGHRGVIVHVIDPKSGTVIHSDRFDTYRSK KESERLVQYLNAVPDGRILSVAVNDEGSRNLDDMARKAMTKLGSKHFLHLGFRHPWSFLTVKGNPSSSV EDHIEYHGHRGSAAARVFKLFQTEHGEYFNVSLSSEWVQDVEWTEWFDHDKVSQTKGGEKISDLWKAHP GKICNRPIDIQATTMDGVNLSTEVVYKKGQDYRFACYDRGRACRSYRVRFLCGKPVRPKLTVTIDTNVNS TILNLEDNVQSWKPGDTLVIASTDYSMYQAEEFQVLPCRSCAPNQVKVAGKPMYLHIGEEIDGVDMRAEV GLLSRNIIVMGEMEDKCYPYRNHICNFFDFDTFGGHIKFALGFKAAHLEGTELKHMGQQLVGQYPIHFHL AGDVDERGGYDPPTYIRDLSIHHTFSRCVTVHGSNGLLIKDVVGYNSLGHCFFTEDGPEERNTFDHCLGLL VKSGTLLPSDRDSKMCKMITEDSYPGYIPKPRQDCNAVSTFWMANPNNNLINCAAAGSEETGFWFIFHHV PTGPSVGMYSPGYSEHIPLGKFYNNRAHSNYRAGMIIDNGVKTTEASAKDKRPFLSIISARYSPHQDADPLK PREPAIIRHFIAYKNQDHGAWLRGGDVWLDSCRFADNGIGLTLASGGTFPYDDGSKQEIKNSLFVGESGNV GTEMMDNRIWGPGGLDH corresponding to amino acids 1-862 of R30650_PEA_{—}2_P15 (SEQ ID NO:996), and a second amino acid sequence being at least 90% homologous to SGRTLPIGQNFPIRGIQLYDGPINIQNCTFRKFVALEGRHTSALAFRLNNAWQSCPHNNVTGIAFEDVPITSR VFFGEPGPWFNQLDMDGDKTSVFHDVDGSVSEYPGSYLTKNDNWLVRHPDCINVPDWRGAICSGCYAQ MYIQAYKTSNLRMKIIKNDFPSHPLYLEGALTRSTHYQQYQPVVTLQKGYTIHWDQTAPAELAIWLINFNK GDWIRVGLCYPRGTTFSILSDVHNRLLKQTSKTGVFVRTLQMDKVEQSYPGRSHYYWDEDSG corresponding to amino acids 2-275 of Q9H1K5 (SEQ ID NO:990), which also corresponds to amino acids 863-1136 of R30650_PEA_{—}2_P15 (SEQ ID NO:996), wherein said first amino acid sequence and second amino acid sequence are contiguous and in a sequential order.

[3153] 2. An isolated polypeptide encoding for a head of R30650_PEA_{—}2_P15 (SEQ ID NO:996), comprising a polypeptide being at least 70%, optionally at least about 80%, preferably at least about 85%, more preferably at least about 90% and most preferably at least about 95% homologous to the sequence MGAAGRQDFLFKAMLTISWLTLTCFPGATSTVAAGCPDQSPELQPWNPGHDQDHHVHIGQGKTLLLTSSA TVYSIHISEGGKLVIKDHDEPIVLRTRHILIDNGGELHAGSALCPFQGNFTIILYGRADEGIQPDPYYGLKYIG VGKGGALELHGQKKLSWTFLNKTLHPGGMAEGGYFFERSWGHRGVIVHVIDPKSGTVIHSDRFDTYRSK KESERLVQYLNAVPDGRILSVAVNDEGSRNLDDMARKAMTKLGSKHFLHLGFRHPWSFLTVKGNPSSSV EDHIEYHGHRGSAAARVFKLFQTEHGEYFNVSLSSEWVQDVEWTEWFDHDKVSQTKGGEKISDLWKAHP GKICNRPIDIQATTMDGVNLSTEVVYKKGQDYRFACYDRGRACRSYRVRFLCGKPVRPKLTVTIDTNVNS TILNLEDNVQSWKPGDTLVIASTDYSMYQAEEFQVLPCRSCAPNQVKVAGKPMYLHIGEEIDGVDMRAEV GLLSRNIIVMGEMEDKCYPYRNHICNFFDFDTFGGHIKFALGFKAAHLEGTELKHMGQQLVGQYPIHFHL AGDVDERGGYDPPTYIRDLSIHHTFSRCVTVHGSNGLLIKDVVGYNSLGHCFFTEDGPEERNTFDHCLGLL VKSGTLLPSDRDSKMCKMITEDSYPGYIPKPRQDCNAVSTFWMANPNNNLINCAAAGSEETGFWFIFHHV PTGPSVGMYSPGYSEHIPLGKFYNNRAHSNYRAGMIIDNGVKTTEASAKDKRPFLSIISARYSPHQDADPLK PREPAIIRHFIAYKNQDHGAWLRGGDVWLDSCRFADNGIGLTLASGGTFPYDDGSKQEIKNSLFVGESGNV GTEMMDNRIWGPGGLDH of R30650_PEA_{—}2_P15 (SEQ ID NO:996).

[3154] The location of the variant protein was determined according to results from a number of different software programs and analyses, including analyses from SignalP and other specialized programs. The variant protein is believed to be located as follows with regard to the cell: secreted. The protein localization is believed to be secreted because both signal-peptide prediction programs predict that this protein has a signal peptide, and neither trans-membrane region prediction program predicts that this protein has a trans-membrane region.

[3155] Variant protein R30650_PEA_{—}2_P15 (SEQ ID NO:996) also has the following non-silent SNPs (Single Nucleotide Polymorphisms) as listed in Table 17, (given according to their position(s) on the amino acid sequence, with the alternative amino acid(s) listed; the last column indicates whether the SNP is known or not; the presence of known SNPs in variant protein R30650_PEA_{—}2_P15 (SEQ ID NO:996) sequence provides support for the deduced sequence of this variant protein according to the present invention).

TABLE 17
Amino acid mutations

| SNP position(s) on amino acid | | Previously |
|---|---|---|
| sequence | Alternative amino acid(s) | known SNP? |
| 737 | M -> V | Yes |
| 783 | H -> R | Yes |

[3156] Variant protein R30650_PEA_{—}2_P15 (SEQ ID NO:996) is encoded by the following transcript(s): R30650_PEA_{—}2_T18 (SEQ ID NO:934), for which the sequence(s) is/are given at the end of the application. The coding portion of transcript R30650_PEA_{—}2_T18 (SEQ ID NO:934) is shown in bold; this coding portion starts at position 265 and ends at position 3672. The transcript also has the following SNPs as listed in Table 18 (given according to their position on the nucleotide sequence, with the alternative nucleic acid listed; the last column indicates whether the SNP is known or not; the presence of known SNPs in variant protein R30650_PEA_{—}2_P15 (SEQ ID NO:996) sequence provides support for the deduced sequence of this variant protein according to the present invention).

TABLE 18
Nucleic acid SNPs

| SNP position on nucleotide | | Previously |
|---|---|---|
| sequence | Alternative nucleic acid | known SNP? |
| 9 | T -> A | Yes |
| 2148 | T -> C | Yes |
| 2235 | A -> G | Yes |
| 2473 | A -> G | Yes |
| 2612 | A -> G | Yes |

[3157] Variant protein R30650_PEA_{—}2_P17 (SEQ ID NO:997) according to the present invention has an amino acid sequence as given at the end of the application; it is encoded by transcript(s) R30650_PEA_{—}2_T23 (SEQ ID NO:936). An alignment is given to the known protein (Protein KIAA1199 precursor (SEQ ID NO:986)) at the end of the application. One or more alignments to one or more previously published protein sequences are given at the end of the application. A brief description of the relationship of the variant protein according to the present invention to each such aligned protein is as follows:

[3158] Comparison Report Between R30650_PEA_{—}2_P17 (SEQ ID NO:997) and Q8WUJ3:

[3159] 1. An isolated chimeric polypeptide encoding for R30650_PEA_{—}2_P17 (SEQ ID NO:997), comprising a first amino acid sequence being at least 90% homologous to MGAAGRQDFLFKAMLTISWLTLTCFPGATSTVAAGCPDQSPELQPWNPGHDQDHHVHIGQGKTLLLTSSA TVYSIHISEGGKLVIKDHDEPIVLRTRHILIDNGGELHAGSALCPFQGNFTIILYGRADEGIQPDPYYGLKYIG VGKGGALELHGQKKLSWTFLNKTLHPGGMAEGGYFFERSWGHRGVIVHVIDPKSGTVIHSDRFDTYRSK KESERLVQYLNAVPDGRILSVAVNDEGSRNLDDMARKAMTKLGSKHFLHLGFRHPWSFLTVKGNPSSSV EDHIEYHGHRGSAAARVFKLFQTEHGEYFNVSLSSEWVQ corresponding to amino acids 1-321 of Q8WUJ3 (SEQ ID NO:987), which also corresponds to amino acids 1-321 of R30650_PEA_{—}2_P17 (SEQ ID NO:997), and a second amino acid sequence being at least 70%, optionally at least 80%, preferably at least 85%, more preferably at least 90% and most preferably at least 95% homologous to a polypeptide having the sequence GEEFQTIW (SEQ ID NO:1473) corresponding to amino acids 322-329 of R30650_PEA_{—}2_P17 (SEQ ID NO:997), wherein said first amino acid sequence and second amino acid sequence are contiguous and in a sequential order.

[3160] 2. An isolated polypeptide encoding for a tail of R30650_PEA_{—}2_P17 (SEQ ID NO:997), comprising a polypeptide being at least 70%, optionally at least about 80%, preferably at least about 85%, more preferably at least about 90% and most preferably at least about 95% homologous to the sequence GEEFQTIW (SEQ ID NO:1473) in R30650_PEA_{—}2_P17 (SEQ ID NO:997).

[3161] The location of the variant protein was determined according to results from a number of different software programs and analyses, including analyses from SignalP and other specialized programs. The variant protein is believed to be located as follows with regard to the cell: secreted. The protein localization is believed to be secreted because both signal-peptide prediction programs predict that this protein has a signal peptide, and neither trans-membrane region prediction program predicts that this protein has a trans-membrane region.

[3162] Variant protein R30650_PEA_{—}2_P17 (SEQ ID NO:997) is encoded by the following transcript(s): R30650_PEA_{—}2_T23 (SEQ ID NO:936), for which the sequence(s) is/are given at the end of the application. The coding portion of transcript R30650_PEA_{—}2_T23 (SEQ ID NO:936) is shown in bold; this coding portion starts at position 265 and ends at position 1251. The transcript also has the following SNPs as listed in Table 19 (given according to their position on the nucleotide sequence, with the alternative nucleic acid listed; the last column indicates whether the SNP is known or not; the presence of known SNPs in variant protein R30650_PEA_{—}2_P17 (SEQ ID NO:997) sequence provides support for the deduced sequence of this variant protein according to the present invention).

TABLE 19
Nucleic acid SNPs

| SNP position on nucleotide | | Previously |
|---|---|---|
| sequence | Alternative nucleic acid | known SNP? |
| 9 | T -> A | Yes |
| 1455 | T -> C | No |

[3163] As noted above, cluster R30650 features 49 segment(s), which were listed in Table 2 above and for which the sequence(s) are given at the end of the application. These segment(s) are portions of nucleic acid sequence(s) which are described herein separately because they are of particular interest. A description of each segment according to the present invention is now provided.

[3164] Segment cluster R30650_PEA_{—}2_node_{—}0 (SEQ ID NO:937) according to the present invention is supported by 7 libraries. The number of libraries was determined as previously described. This segment can be found in the following transcript(s): R30650_PEA_{—}2_T6 (SEQ ID NO:931), R30650_PEA_{—}2_T14 (SEQ ID NO:932), R30650_PEA_{—}2_T15 (SEQ ID NO:933), R30650_PEA_{—}2_T18 (SEQ ID NO:934), R30650_PEA_{—}2_T21 (SEQ ID NO:935) and R30650_PEA_{—}2_T23 (SEQ ID NO:936). Table 20 below describes the starting and ending position of this segment on each transcript.

TABLE 20
Segment location on transcripts

| | Segment | |
|---|---|---|
| | starting | Segment |
| Transcript name | position | ending position |
| R30650_PEA_2_T6 (SEQ ID NO: 931) | 1 | 248 |
| R30650_PEA_2_T14 (SEQ ID NO: 932) | 1 | 248 |
| R30650_PEA_2_T15 (SEQ ID NO: 933) | 1 | 248 |
| R30650_PEA_2_T18 (SEQ ID NO: 934) | 1 | 248 |
| R30650_PEA_2_T21 (SEQ ID NO: 935) | 1 | 248 |
| R30650_PEA_2_T23 (SEQ ID NO: 936) | 1 | 248 |

[3165] Segment cluster R30650_PEA_{—}2_node_{—}1 (SEQ ID NO:938) according to the present invention is supported by 5 libraries. The number of libraries was determined as previously described. This segment can be found in the following transcript(s): R30650_PEA_{—}2_T14 (SEQ ID NO:932), R30650_PEA_{—}2_T15 (SEQ ID NO:933) and R30650_PEA_{—}2_T21 (SEQ ID NO:935). Table 21 below describes the starting and ending position of this segment on each transcript.

TABLE 21
Segment location on transcripts

| | Segment | |
|---|---|---|
| | starting | Segment |
| Transcript name | position | ending position |
| R30650_PEA_2_T14 (SEQ ID NO: 932) | 249 | 1237 |
| R30650_PEA_2_T15 (SEQ ID NO: 933) | 249 | 1237 |
| R30650_PEA_2_T21 (SEQ ID NO: 935) | 249 | 1237 |

[3166] Segment cluster R30650_PEA_{—}2_node_{—}3 (SEQ ID NO:939) according to the present invention is supported by 7 libraries. The number of libraries was determined as previously described. This segment can be found in the following transcript(s): R30650_PEA_{—}2_T14 (SEQ ID NO:932), R30650_PEA_{—}2_T15 (SEQ ID NO:933) and R30650_PEA_{—}2_T21 (SEQ ID NO:935). Table 22 below describes the starting and ending position of this segment on each transcript.

TABLE 22
Segment location on transcripts

| | Segment | |
|---|---|---|
| | starting | Segment |
| Transcript name | position | ending position |
| R30650_PEA_2_T14 (SEQ ID NO: 932) | 1238 | 1415 |
| R30650_PEA_2_T15 (SEQ ID NO: 933) | 1238 | 1415 |
| R30650_PEA_2_T21 (SEQ ID NO: 935) | 1238 | 1415 |

[3167] Segment cluster R30650_PEA_{—}2_node_{—}5 (SEQ ID NO:940) according to the present invention is supported by 8 libraries. The number of libraries was determined as previously described. This segment can be found in the following transcript(s): R30650_PEA_{—}2_T14 (SEQ ID NO:932), R30650_PEA_{—}2_T15 (SEQ ID NO:933) and R30650_PEA_{—}2_T21 (SEQ ID NO:935). Table 23 below describes the starting and ending position of this segment on each transcript.

TABLE 23
Segment location on transcripts

| | Segment | |
|---|---|---|
| | starting | Segment |
| Transcript name | position | ending position |
| R30650_PEA_2_T14 (SEQ ID NO: 932) | 1416 | 1617 |
| R30650_PEA_2_T15 (SEQ ID NO: 933) | 1416 | 1617 |
| R30650_PEA_2_T21 (SEQ ID NO: 935) | 1416 | 1617 |

[3168] Segment cluster R30650_PEA_{—}2_node_{—}9 (SEQ ID NO:941) according to the present invention is supported by 6 libraries. The number of libraries was determined as previously described. This segment can be found in the following transcript(s): R30650_PEA_{—}2_T21 (SEQ ID NO:935). Table 24 below describes the starting and ending position of this segment on each transcript.

TABLE 24
Segment location on transcripts

| | Segment | |
|---|---|---|
| | starting | Segment |
| Transcript name | position | ending position |
| R30650_PEA_2_T21 (SEQ ID NO: 935) | 1713 | 2152 |

[3169] Segment cluster R30650_PEA_{—}2_node_{—}11 (SEQ ID NO:942) according to the present invention is supported by 4 libraries. The number of libraries was determined as previously described. This segment can be found in the following transcript(s): R30650_PEA_{—}2_T14 (SEQ ID NO:932). Table 25 below describes the starting and ending position of this segment on each transcript.

TABLE 25
Segment location on transcripts

| | Segment | |
|---|---|---|
| | starting | Segment |
| Transcript name | position | ending position |
| R30650_PEA_2_T14 (SEQ ID NO: 932) | 1713 | 1879 |

[3170] Segment cluster R30650_PEA_{—}2_node_{—}14 (SEQ ID NO:943) according to the present invention is supported by 10 libraries. The number of libraries was determined as previously described. This segment can be found in the following transcript(s): R30650_PEA_{—}2_T14 (SEQ ID NO:932) and R30650_PEA_{—}2_T15 (SEQ ID NO:933). Table 26 below describes the starting and ending position of this segment on each transcript.

TABLE 26
Segment location on transcripts

| | Segment | |
|---|---|---|
| | starting | Segment |
| Transcript name | position | ending position |
| R30650_PEA_2_T14 (SEQ ID NO: 932) | 1880 | 2818 |
| R30650_PEA_2_T15 (SEQ ID NO: 933) | 1713 | 2651 |

[3171] Segment cluster R30650_PEA_{—}2_node_{—}20 (SEQ ID NO:944) according to the present invention is supported by 6 libraries. The number of libraries was determined as previously described. This segment can be found in the following transcript(s): R30650_PEA_{—}2_T6 (SEQ ID NO:931), R30650_PEA_{—}2_T18 (SEQ ID NO:934) and R30650_PEA_{—}2_T23 (SEQ ID NO:936). Table 27 below describes the starting and ending position of this segment on each transcript.

TABLE 27
Segment location on transcripts

| | Segment | |
|---|---|---|
| | starting | Segment |
| Transcript name | position | ending position |
| R30650_PEA_2_T6 (SEQ ID NO: 931) | 359 | 505 |
| R30650_PEA_2_T18 (SEQ ID NO: 934) | 359 | 505 |
| R30650_PEA_2_T23 (SEQ ID NO: 936) | 359 | 505 |

[3172] Segment cluster R30650_PEA_{—}2_node_{—}22 (SEQ ID NO:945) according to the present invention is supported by 6 libraries. The number of libraries was determined as previously described. This segment can be found in the following transcript(s): R30650_PEA_{—}2_T6 (SEQ ID NO:931), R30650_PEA_{—}2_T18 (SEQ ID NO:934) and R30650_PEA_{—}2_T23 (SEQ ID NO:936). Table 28 below describes the starting and ending position of this segment on each transcript.

TABLE 28
Segment location on transcripts

| | Segment | |
|---|---|---|
| | starting | Segment |
| Transcript name | position | ending position |
| R30650_PEA_2_T6 (SEQ ID NO: 931) | 506 | 644 |
| R30650_PEA_2_T18 (SEQ ID NO: 934) | 506 | 644 |
| R30650_PEA_2_T23 (SEQ ID NO: 936) | 506 | 644 |

[3173] Segment cluster R30650_PEA_{—}2_node_{—}24 (SEQ ID NO:946) according to the present invention is supported by 7 libraries. The number of libraries was determined as previously described. This segment can be found in the following transcript(s): R30650_PEA_{—}2_T6 (SEQ ID NO:931), R30650_PEA_{—}2_T18 (SEQ ID NO:934) and R30650_PEA_{—}2_T23 (SEQ ID NO:936). Table 29 below describes the starting and ending position of this segment on each transcript.

TABLE 29
Segment location on transcripts

| | Segment | |
|---|---|---|
| | starting | Segment |
| Transcript name | position | ending position |
| R30650_PEA_2_T6 (SEQ ID NO: 931) | 645 | 881 |
| R30650_PEA_2_T18 (SEQ ID NO: 934) | 645 | 881 |
| R30650_PEA_2_T23 (SEQ ID NO: 936) | 645 | 881 |

[3174] Segment cluster R30650_PEA_{—}2_node_{—}26 (SEQ ID NO:947) according to the present invention is supported by 7 libraries. The number of libraries was determined as previously described. This segment can be found in the following transcript(s): R30650_PEA_{—}2_T6 (SEQ ID NO:931), R30650_PEA_{—}2_T18 (SEQ ID NO:934) and R30650_PEA_{—}2_T23 (SEQ ID NO:936). Table 30 below describes the starting and ending position of this segment on each transcript.

TABLE 30
Segment location on transcripts

| | Segment | |
|---|---|---|
| | starting | Segment |
| Transcript name | position | ending position |
| R30650_PEA_2_T6 (SEQ ID NO: 931) | 882 | 1061 |
| R30650_PEA_2_T18 (SEQ ID NO: 934) | 882 | 1061 |
| R30650_PEA_2_T23 (SEQ ID NO: 936) | 882 | 1061 |

[3175] Segment cluster R30650_PEA_{—}2_node_{—}32 (SEQ ID NO:948) according to the present invention is supported by 4 libraries. The number of libraries was determined as previously described. This segment can be found in the following transcript(s): R30650_PEA_{—}2_T23 (SEQ ID NO:936). Table 31 below describes the starting and ending position of this segment on each transcript.

TABLE 31
Segment location on transcripts

| | Segment | |
|---|---|---|
| | starting | Segment |
| Transcript name | position | ending position |
| R30650_PEA_2_T23 (SEQ ID NO: 936) | 1229 | 1829 |

[3176] Segment cluster R30650_PEA_{—}2_node_{—}34 (SEQ ID NO:949) according to the present invention is supported by 8 libraries. The number of libraries was determined as previously described. This segment can be found in the following transcript(s): R30650_PEA_{—}2_T6 (SEQ ID NO:931) and R30650_PEA_{—}2_T18 (SEQ ID NO:934). Table 32 below describes the starting and ending position of this segment on each transcript.

TABLE 32
Segment location on transcripts

| | Segment | |
|---|---|---|
| | starting | Segment |
| Transcript name | position | ending position |
| R30650_PEA_2_T6 (SEQ ID NO: 931) | 1229 | 1350 |
| R30650_PEA_2_T18 (SEQ ID NO: 934) | 1229 | 1350 |

[3177] Segment cluster R30650_PEA_{—}2_node_{—}36 (SEQ ID NO:950) according to the present invention is supported by 3 libraries. The number of libraries was determined as previously described. This segment can be found in the following transcript(s): R30650_PEA_{—}2_T3 (SEQ ID NO:930). Table 33 below describes the starting and ending position of this segment on each transcript.

TABLE 33
Segment location on transcripts

| | Segment | |
|---|---|---|
| | starting | Segment |
| Transcript name | position | ending position |
| R30650_PEA_2_T3 (SEQ ID NO: 930) | 1 | 522 |

[3178] Segment cluster R30650_PEA_{—}2_node_{—}37 (SEQ ID NO:951) according to the present invention is supported by 8 libraries. The number of libraries was determined as previously described. This segment can be found in the following transcript(s): R30650_PEA_{—}2_T3 (SEQ ID NO:930), R30650_PEA_{—}2_T6 (SEQ ID NO:931) and R30650_PEA_{—}2_T18 (SEQ ID NO:934). Table 34 below describes the starting and ending position of this segment on each transcript.

TABLE 34
Segment location on transcripts

| | | Segment |
|---|---|---|
| | Segment | ending |
| Transcript name | starting position | position |
| R30650_PEA_2_T3 (SEQ ID NO: 930) | 523 | 655 |
| R30650_PEA_2_T6 (SEQ ID NO: 931) | 1351 | 1483 |
| R30650_PEA_2_T18 | 1351 | 1483 |
| (SEQ ID NO: 934) | | |

[3179] Segment cluster R30650_PEA_{—}2_node_{—}39 (SEQ ID NO:952) according to the present invention is supported by 8 libraries. The number of libraries was determined as previously described. This segment can be found in the following transcript(s): R30650_PEA_{—}2_T3 (SEQ ID NO:930), R30650_PEA_{—}2_T6 (SEQ ID NO:931) and R30650_PEA_{—}2_T18 (SEQ ID NO:934). Table 35 below describes the starting and ending position of this segment on each transcript.

TABLE 35
Segment location on transcripts

| | | Segment |
|---|---|---|
| | Segment | ending |
| Transcript name | starting position | position |
| R30650_PEA_2_T3 (SEQ ID NO: 930) | 656 | 847 |
| R30650_PEA_2_T6 (SEQ ID NO: 931) | 1484 | 1675 |
| R30650_PEA_2_T18 | 1484 | 1675 |
| (SEQ ID NO: 934) | | |

[3180] Segment cluster R30650_PEA_{—}2_node_{—}41 (SEQ ID NO:953) according to the present invention is supported by 3 libraries. The number of libraries was determined as previously described. This segment can be found in the following transcript(s): R30650_PEA_{—}2_T2 (SEQ ID NO:929). Table 36 below describes the starting and ending position of this segment on each transcript.

TABLE 36
Segment location on transcripts

| | | Segment |
|---|---|---|
| | Segment | ending |
| Transcript name | starting position | position |
| R30650_PEA_2_T2 (SEQ ID NO: 929) | 1 | 1360 |

[3181] Segment cluster R30650_PEA_{—}2_node_{—}42 (SEQ ID NO:954) according to the present invention is supported by 8 libraries. The number of libraries was determined as previously described. This segment can be found in the following transcript(s): R30650_PEA_{—}2_T2 (SEQ ID NO:929), R30650_PEA_{—}2_T3 (SEQ ID NO:930), R30650_PEA_{—}2_T6 (SEQ ID NO:931) and R30650_PEA_{—}2_T18 (SEQ ID NO:934). Table 37 below describes the starting and ending position of this segment on each transcript.

TABLE 37
Segment location on transcripts

| | | Segment |
|---|---|---|
| | Segment | ending |
| Transcript name | starting position | position |
| R30650_PEA_2_T2 (SEQ ID NO: 929) | 1361 | 1536 |
| R30650_PEA_2_T3 (SEQ ID NO: 930) | 848 | 1023 |
| R30650_PEA_2_T6 (SEQ ID NO: 931) | 1676 | 1851 |
| R30650_PEA_2_T18 | 1676 | 1851 |
| (SEQ ID NO: 934) | | |

[3182] Segment cluster R30650_PEA_{—}2_node_{—}44 (SEQ ID NO:955) according to the present invention is supported by 8 libraries. The number of libraries was determined as previously described. This segment can be found in the following transcript(s): R30650_PEA_{—}2_T2 (SEQ ID NO:929), R30650_PEA_{—}2_T3 (SEQ ID NO:930), R30650_PEA_{—}2_T6 (SEQ ID NO:931) and R30650_PEA_{—}2_T18 (SEQ ID NO:934). Table 38 below describes the starting and ending position of this segment on each transcript.

TABLE 38
Segment location on transcripts

| | | Segment |
|---|---|---|
| | Segment | ending |
| Transcript name | starting position | position |
| R30650_PEA_2_T2 (SEQ ID NO: 929) | 1537 | 1746 |
| R30650_PEA_2_T3 (SEQ ID NO: 930) | 1024 | 1233 |
| R30650_PEA_2_T6 (SEQ ID NO: 931) | 1852 | 2061 |
| R30650_PEA_2_T18 | 1852 | 2061 |
| (SEQ ID NO: 934) | | |

[3183] Segment cluster R30650_PEA_{—}2_node_{—}46 (SEQ ID NO:956) according to the present invention is supported by 9 libraries. The number of libraries was determined as previously described. This segment can be found in the following transcript(s): R30650_PEA_{—}2_T2 (SEQ ID NO:929), R30650_PEA_{—}2_T3 (SEQ ID NO:930), R30650_PEA_{—}2_T6 (SEQ ID NO:931) and R30650_PEA_{—}2_T18 (SEQ ID NO:934). Table 39 below describes the starting and ending position of this segment on each transcript.

TABLE 39
Segment location on transcripts

| | | Segment |
|---|---|---|
| | Segment | ending |
| Transcript name | starting position | position |
| R30650_PEA_2_T2 (SEQ ID NO: 929) | 1747 | 1952 |
| R30650_PEA_2_T3 (SEQ ID NO: 930) | 1234 | 1439 |
| R30650_PEA_2_T6 (SEQ ID NO: 931) | 2062 | 2267 |
| R30650_PEA_2_T18 | 2062 | 2267 |
| (SEQ ID NO: 934) | | |

[3184] Segment cluster R30650_PEA_{—}2_node_{—}50 (SEQ ID NO:957) according to the present invention is supported by 9 libraries. The number of libraries was determined as previously described. This segment can be found in the following transcript(s): R30650_PEA_{—}2_T2 (SEQ ID NO:929), R30650_PEA_{—}2_T3 (SEQ ID NO:930), R30650_PEA_{—}2_T6 (SEQ ID NO:931) and R30650_PEA_{—}2_T18 (SEQ ID NO:934). Table 40 below describes the starting and ending position of this segment on each transcript.

TABLE 40
Segment location on transcripts

| | | Segment |
|---|---|---|
| | Segment | ending |
| Transcript name | starting position | position |
| R30650_PEA_2_T2 (SEQ ID NO: 929) | 2023 | 2151 |
| R30650_PEA_2_T3 (SEQ ID NO: 930) | 1510 | 1638 |
| R30650_PEA_2_T6 (SEQ ID NO: 931) | 2338 | 2466 |
| R30650_PEA_2_T18 | 2338 | 2466 |
| (SEQ ID NO: 934) | | |

[3185] Segment cluster R30650_PEA_{—}2_node_{—}56 (SEQ ID NO:958) according to the present invention is supported by 10 libraries. The number of libraries was determined as previously described. This segment can be found in the following transcript(s): R30650_PEA_{—}2_T2 (SEQ ID NO:929), R30650_PEA_{—}2_T3 (SEQ ID NO:930), R30650_PEA_{—}2_T6 (SEQ ID NO:931) and R30650_PEA_{—}2_T18 (SEQ ID NO:934). Table 41 below describes the starting and ending position of this segment on each transcript.

TABLE 41
Segment location on transcripts

| | | Segment |
|---|---|---|
| | Segment | ending |
| Transcript name | starting position | position |
| R30650_PEA_2_T2 (SEQ ID NO: 929) | 2238 | 2369 |
| R30650_PEA_2_T3 (SEQ ID NO: 930) | 1725 | 1856 |
| R30650_PEA_2_T6 (SEQ ID NO: 931) | 2553 | 2684 |
| R30650_PEA_2_T18 | 2553 | 2684 |
| (SEQ ID NO: 934) | | |

[3186] Segment cluster R30650_PEA_{—}2_node_{—}60 (SEQ ID NO:959) according to the present invention is supported by 12 libraries. The number of libraries was determined as previously described. This segment can be found in the following transcript(s): R30650_PEA_{—}2_T2 (SEQ ID NO:929), R30650_PEA_{—}2_T3 (SEQ ID NO:930), R30650_PEA_{—}2_T6 (SEQ ID NO:931) and R30650_PEA_{—}2_T18 (SEQ ID NO:934). Table 42 below describes the starting and ending position of this segment on each transcript.

TABLE 42
Segment location on transcripts

| | | Segment |
|---|---|---|
| | Segment | ending |
| Transcript name | starting position | position |
| R30650_PEA_2_T2 (SEQ ID NO: 929) | 2406 | 2561 |
| R30650_PEA_2_T3 (SEQ ID NO: 930) | 1893 | 2048 |
| R30650_PEA_2_T6 (SEQ ID NO: 931) | 2721 | 2876 |
| R30650_PEA_2_T18 | 2721 | 2876 |
| (SEQ ID NO: 934) | | |

[3187] Segment cluster R30650_PEA_{—}2_node_{—}63 (SEQ ID NO:960) according to the present invention is supported by 12 libraries. The number of libraries was determined as previously described. This segment can be found in the following transcript(s): R30650_PEA_{—}2_T2 (SEQ ID NO:929), R30650_PEA_{—}2_T3 (SEQ ID NO:930), R30650_PEA_{—}2_T6 (SEQ ID NO:931) and R30650_PEA_{—}2_T18 (SEQ ID NO:934). Table 43 below describes the starting and ending position of this segment on each transcript.

TABLE 43
Segment location on transcripts

| | | Segment |
|---|---|---|
| | Segment | ending |
| Transcript name | starting position | position |
| R30650_PEA_2_T2 (SEQ ID NO: 929) | 2562 | 2742 |
| R30650_PEA_2_T3 (SEQ ID NO: 930) | 2049 | 2229 |
| R30650_PEA_2_T6 (SEQ ID NO: 931) | 2877 | 3057 |
| R30650_PEA_2_T18 | 2877 | 3057 |
| (SEQ ID NO: 934) | | |

[3188] Segment cluster R30650_PEA_{—}2_node_{—}67 (SEQ ID NO:961) according to the present invention is supported by 11 libraries. The number of libraries was determined as previously described. This segment can be found in the following transcript(s): R30650_PEA_{—}2_T2 (SEQ ID NO:929), R30650_PEA_{—}2_T3 (SEQ ID NO:930), R30650_PEA_{—}2_T6 (SEQ ID NO:931) and R30650_PEA_{—}2_T18 (SEQ ID NO:934). Table 44 below describes the starting and ending position of this segment on each transcript.

TABLE 44
Segment location on transcripts

| | | Segment |
|---|---|---|
| | Segment | ending |
| Transcript name | starting position | position |
| R30650_PEA_2_T2 (SEQ ID NO: 929) | 2743 | 2882 |
| R30650_PEA_2_T3 (SEQ ID NO: 930) | 2230 | 2369 |
| R30650_PEA_2_T6 (SEQ ID NO: 931) | 3058 | 3197 |
| R30650_PEA_2_T18 | 3058 | 3197 |
| (SEQ ID NO: 934) | | |

[3189] Segment cluster R30650_PEA_{—}2_node_{—}70 (SEQ ID NO:962) according to the present invention is supported by 11 libraries. The number of libraries was determined as previously described. This segment can be found in the following transcript(s): R30650_PEA_{—}2_T2 (SEQ ID NO:929), R30650_PEA_{—}2_T3 (SEQ ID NO:930), R30650_PEA_{—}2_T6 (SEQ ID NO:931) and R30650_PEA_{—}2_T18 (SEQ ID NO:934). Table 45 below describes the starting and ending position of this segment on each transcript.

TABLE 45
Segment location on transcripts

| | | Segment |
|---|---|---|
| | Segment | ending |
| Transcript name | starting position | position |
| R30650_PEA_2_T2 (SEQ ID NO: 929) | 2959 | 3170 |
| R30650_PEA_2_T3 (SEQ ID NO: 930) | 2446 | 2657 |
| R30650_PEA_2_T6 (SEQ ID NO: 931) | 3274 | 3485 |
| R30650_PEA_2_T18 | 3274 | 3485 |
| (SEQ ID NO: 934) | | |

[3190] Segment cluster R30650_PEA_{—}2_node_{—}72 (SEQ ID NO:963) according to the present invention is supported by 14 libraries. The number of libraries was determined as previously described. This segment can be found in the following transcript(s): R30650_PEA_{—}2_T2 (SEQ ID NO:929), R30650_PEA_{—}2_T3 (SEQ ID NO:930), R30650_PEA_{—}2_T6 (SEQ ID NO:931) and R30650_PEA_{—}2_T18 (SEQ ID NO:934). Table 46 below describes the starting and ending position of this segment on each transcript.

TABLE 46
Segment location on transcripts

| | | Segment |
|---|---|---|
| | Segment | ending |
| Transcript name | starting position | position |
| R30650_PEA_2_T2 (SEQ ID NO: 929) | 3171 | 3356 |
| R30650_PEA_2_T3 (SEQ ID NO: 930) | 2658 | 2843 |
| R30650_PEA_2_T6 (SEQ ID NO: 931) | 3486 | 3671 |
| R30650_PEA_2_T18 | 3486 | 3671 |
| (SEQ ID NO: 934) | | |

[3191] Segment cluster R30650_PEA_{—}2_node_{—}73 (SEQ ID NO:964) according to the present invention is supported by 3 libraries. The number of libraries was determined as previously described. This segment can be found in the following transcript(s): R30650_PEA_{—}2_T18 (SEQ ID NO:934). Table 47 below describes the starting and ending position of this segment on each transcript.

TABLE 47
Segment location on transcripts

| | | Segment |
|---|---|---|
| | Segment | ending |
| Transcript name | starting position | position |
| R30650_PEA_2_T18 | 3672 | 3886 |
| (SEQ ID NO: 934) | | |

[3192] Segment cluster R30650_PEA_{—}2_node_{—}75 (SEQ ID NO:965) according to the present invention is supported by 14 libraries. The number of libraries was determined as previously described. This segment can be found in the following transcript(s): R30650_PEA_{—}2_T2 (SEQ ID NO:929) and R30650_PEA_{—}2_T3 (SEQ ID NO:930). Table 48 below describes the starting and ending position of this segment on each transcript.

TABLE 48
Segment location on transcripts

| | | Segment |
|---|---|---|
| | Segment | ending |
| Transcript name | starting position | position |
| R30650_PEA_2_T2 (SEQ ID NO: 929) | 3357 | 3561 |
| R30650_PEA_2_T3 (SEQ ID NO: 930) | 2844 | 3048 |

[3193] Segment cluster R30650_PEA_{—}2_node_{—}79 (SEQ ID NO:966) according to the present invention is supported by 15 libraries. The number of libraries was determined as previously described. This segment can be found in the following transcript(s): R30650_PEA_{—}2_T2 (SEQ ID NO:929), R30650_PEA_{—}2_T3 (SEQ ID NO:930) and R30650_PEA_{—}2_T6 (SEQ ID NO:931). Table 49 below describes the starting and ending position of this segment on each transcript.

TABLE 49
Segment location on transcripts

| | | Segment |
|---|---|---|
| | Segment starting | ending |
| Transcript name | position | position |
| R30650_PEA_2_T2 (SEQ ID NO: 929) | 3649 | 3806 |
| R30650_PEA_2_T3 (SEQ ID NO: 930) | 3136 | 3293 |
| R30650_PEA_2_T6 (SEQ ID NO: 931) | 3759 | 3916 |

[3194] Segment cluster R30650_PEA_{—}2_node_{—}86 (SEQ ID NO:967) according to the present invention is supported by 43 libraries. The number of libraries was determined as previously described. This segment can be found in the following transcript(s): R30650_PEA_{—}2_T2 (SEQ ID NO:929), R30650_PEA_{—}2_T3 (SEQ ID NO:930) and R30650_PEA_{—}2_T6 (SEQ ID NO:931). Table 50 below describes the starting and ending position of this segment on each transcript.

TABLE 50
Segment location on transcripts

| | | Segment |
|---|---|---|
| | Segment | ending |
| Transcript name | starting position | position |
| R30650_PEA_2_T2 (SEQ ID NO: 929) | 3913 | 4895 |
| R30650_PEA_2_T3 (SEQ ID NO: 930) | 3400 | 4382 |
| R30650_PEA_2_T6 (SEQ ID NO: 931) | 4023 | 5005 |

[3195] Segment cluster R30650_PEA_{—}2_node_{—}87 (SEQ ID NO:968) according to the present invention is supported by 43 libraries. The number of libraries was determined as previously described. This segment can be found in the following transcript(s): R30650_PEA_{—}2_T2 (SEQ ID NO:929), R30650_PEA_{—}2_T3 (SEQ ID NO:930) and R30650_PEA_{—}2_T6 (SEQ ID NO:931). Table 51 below describes the starting and ending position of this segment on each transcript.

TABLE 51
Segment location on transcripts

| | | Segment |
|---|---|---|
| | Segment | ending |
| Transcript name | starting position | position |
| R30650_PEA_2_T2 (SEQ ID NO: 929) | 4896 | 5316 |
| R30650_PEA_2_T3 (SEQ ID NO: 930) | 4383 | 4803 |
| R30650_PEA_2_T6 (SEQ ID NO: 931) | 5006 | 5426 |

[3196] Segment cluster R30650_PEA_{—}2_node_{—}89 (SEQ ID NO:969) according to the present invention is supported by 69 libraries. The number of libraries was determined as previously described. This segment can be found in the following transcript(s): R30650_PEA_{—}2_T2 (SEQ ID NO:929), R30650_PEA_{—}2_T3 (SEQ ID NO:930) and R30650_PEA_{—}2_T6 (SEQ ID NO:931). Table 52 below describes the starting and ending position of this segment on each transcript.

TABLE 52
Segment location on transcripts

| | | Segment |
|---|---|---|
| | Segment | ending |
| Transcript name | starting position | position |
| R30650_PEA_2_T2 (SEQ ID NO: 929) | 5410 | 5990 |
| R30650_PEA_2_T3 (SEQ ID NO: 930) | 4897 | 5477 |
| R30650_PEA_2_T6 (SEQ ID NO: 931) | 5520 | 6100 |

[3197] Segment cluster R30650_PEA_{—}2_node_{—}93 (SEQ ID NO:970) according to the present invention is supported by 108 libraries. The number of libraries was determined as previously described. This segment can be found in the following transcript(s): R30650_PEA_{—}2_T2 (SEQ ID NO:929), R30650_PEA_{—}2_T3 (SEQ ID NO:930) and R30650_PEA_{—}2_T6 (SEQ ID NO:931). Table 53 below describes the starting and ending position of this segment on each transcript.

TABLE 53
Segment location on transcripts

| | | Segment |
|---|---|---|
| | Segment | ending |
| Transcript name | starting position | position |
| R30650_PEA_2_T2 (SEQ ID NO: 929) | 6094 | 6772 |
| R30650_PEA_2_T3 (SEQ ID NO: 930) | 5581 | 6259 |
| R30650_PEA_2_T6 (SEQ ID NO: 931) | 6204 | 6882 |

[3198] According to an optional embodiment of the present invention, short segments related to the above cluster are also provided. These segments are up to about 120 bp in length, and so are included in a separate description.

[3199] Segment cluster R30650_PEA_{—}2_node_{—}8 (SEQ ID NO:971) according to the present invention is supported by 10 libraries. The number of libraries was determined as previously described. This segment can be found in the following transcript(s): R30650_PEA_{—}2_T14 (SEQ ID NO:932), R30650_PEA_{—}2_T15 (SEQ ID NO:933) and R30650_PEA_{—}2_T21 (SEQ ID NO:935). Table 54 below describes the starting and ending position of this segment on each transcript.

TABLE 54
Segment location on transcripts

| | Segment | Segment |
|---|---|---|
| | starting | ending |
| Transcript name | position | position |
| R30650_PEA_2_T14 (SEQ ID NO: 932) | 1618 | 1712 |
| R30650_PEA_2_T15 (SEQ ID NO: 933) | 1618 | 1712 |
| R30650_PEA_2_T21 (SEQ ID NO: 935) | 1618 | 1712 |

[3200] Segment cluster R30650_PEA_{—}2_node_{—}17 (SEQ ID NO:972) according to the present invention is supported by 6 libraries. The number of libraries was determined as previously described. This segment can be found in the following transcript(s): R30650_PEA_{—}2_T6 (SEQ ID NO:931), R30650_PEA_{—}2_T18 (SEQ ID NO:934) and R30650_PEA_{—}2_T23 (SEQ ID NO:936). Table 55 below describes the starting and ending position of this segment on each transcript.

TABLE 55
Segment location on transcripts

| | Segment | Segment |
|---|---|---|
| | starting | ending |
| Transcript name | position | position |
| R30650_PEA_2_T6 (SEQ ID NO: 931) | 249 | 358 |
| R30650_PEA_2_T18 (SEQ ID NO: 934) | 249 | 358 |
| R30650_PEA_2_T23 (SEQ ID NO: 936) | 249 | 358 |

[3201] Segment cluster R30650_PEA_{—}2_node_{—}28 (SEQ ID NO:973) according to the present invention is supported by 7 libraries. The number of libraries was determined as previously described. This segment can be found in the following transcript(s): R30650_PEA_{—}2_T6 (SEQ ID NO:931), R30650_PEA_{—}2_T18 (SEQ ID NO:934) and R30650_PEA_{—}2_T23 (SEQ ID NO:936). Table 56 below describes the starting and ending position of this segment on each transcript.

TABLE 56
Segment location on transcripts

| | Segment | Segment |
|---|---|---|
| | starting | ending |
| Transcript name | position | position |
| R30650_PEA_2_T6 (SEQ ID NO: 931) | 1062 | 1132 |
| R30650_PEA_2_T18 (SEQ ID NO: 934) | 1062 | 1132 |
| R30650_PEA_2_T23 (SEQ ID NO: 936) | 1062 | 1132 |

[3202] Segment cluster R30650_PEA_{—}2_node_{—}31 (SEQ ID NO:974) according to the present invention is supported by 8 libraries. The number of libraries was determined as previously described. This segment can be found in the following transcript(s): R30650_PEA_{—}2_T6 (SEQ ID NO:931), R30650_PEA_{—}2_T18 (SEQ ID NO:934) and R30650_PEA_{—}2_T23 (SEQ ID NO:936). Table 57 below describes the starting and ending position of this segment on each transcript.

TABLE 57
Segment location on transcripts

| | Segment | Segment |
|---|---|---|
| | starting | ending |
| Transcript name | position | position |
| R30650_PEA_2_T6 (SEQ ID NO: 931) | 1133 | 1228 |
| R30650_PEA_2_T18 (SEQ ID NO: 934) | 1133 | 1228 |
| R30650_PEA_2_T23 (SEQ ID NO: 936) | 1133 | 1228 |

[3203] Segment cluster R30650_PEA_{—}2_node_{—}48 (SEQ ID NO:975) according to the present invention is supported by 10 libraries. The number of libraries was determined as previously described. This segment can be found in the following transcript(s): R30650_PEA_{—}2_T2 (SEQ ID NO:929), R30650_PEA_{—}2_T3 (SEQ ID NO:930), R30650_PEA_{—}2_T6 (SEQ ID NO:931) and R30650_PEA_{—}2_T18 (SEQ ID NO:934). Table 58 below describes the starting and ending position of this segment on each transcript.

TABLE 58
Segment location on transcripts

| | Segment | Segment |
|---|---|---|
| | starting | ending |
| Transcript name | position | position |
| R30650_PEA_2_T2 (SEQ ID NO: 929) | 1953 | 2022 |
| R30650_PEA_2_T3 (SEQ ID NO: 930) | 1440 | 1509 |
| R30650_PEA_2_T6 (SEQ ID NO: 931) | 2268 | 2337 |
| R30650_PEA_2_T18 (SEQ ID NO: 934) | 2268 | 2337 |

[3204] Segment cluster R30650_PEA_{—}2_node_{—}53 (SEQ ID NO:976) according to the present invention is supported by 12 libraries. The number of libraries was determined as previously described. This segment can be found in the following transcript(s): R30650_PEA_{—}2_T2 (SEQ ID NO:929), R30650_PEA_{—}2_T3 (SEQ ID NO:930), R30650_PEA_{—}2_T6 (SEQ ID NO:931) and R30650_PEA_{—}2_T18 (SEQ ID NO:934). Table 59 below describes the starting and ending position of this segment on each transcript.

TABLE 59
Segment location on transcripts

| | Segment | Segment |
|---|---|---|
| | starting | ending |
| Transcript name | position | position |
| R30650_PEA_2_T2 (SEQ ID NO: 929) | 2152 | 2237 |
| R30650_PEA_2_T3 (SEQ ID NO: 930) | 1639 | 1724 |
| R30650_PEA_2_T6 (SEQ ID NO: 931) | 2467 | 2552 |
| R30650_PEA_2_T18 (SEQ ID NO: 934) | 2467 | 2552 |

[3205] Segment cluster R30650_PEA_{—}2_node_{—}58 (SEQ ID NO:977) according to the present invention is supported by 10 libraries. The number of libraries was determined as previously described. This segment can be found in the following transcript(s): R30650_PEA_{—}2_T2 (SEQ ID NO:929), R30650_PEA_{—}2_T3 (SEQ ID NO:930), R30650_PEA_{—}2_T6 (SEQ ID NO:931) and R30650_PEA_{—}2_T18 (SEQ ID NO:934). Table 60 below describes the starting and ending position of this segment on each transcript.

TABLE 60
Segment location on transcripts

| | Segment | Segment |
|---|---|---|
| | starting | ending |
| Transcript name | position | position |
| R30650_PEA_2_T2 (SEQ ID NO: 929) | 2370 | 2405 |
| R30650_PEA_2_T3 (SEQ ID NO: 930) | 1857 | 1892 |
| R30650_PEA_2_T6 (SEQ ID NO: 931) | 2685 | 2720 |
| R30650_PEA_2_T18 (SEQ ID NO: 934) | 2685 | 2720 |

[3206] Segment cluster R30650_PEA_{—}2_node_{—}68 (SEQ ID NO:978) according to the present invention is supported by 10 libraries. The number of libraries was determined as previously described. This segment can be found in the following transcript(s): R30650_PEA_{—}2_T2 (SEQ ID NO:929), R30650_PEA_{—}2_T3 (SEQ ID NO:930), R30650_PEA_{—}2_T6 (SEQ ID NO:931) and R30650_PEA_{—}2_T18 (SEQ ID NO:934). Table 61 below describes the starting and ending position of this segment on each transcript.

TABLE 61
Segment location on transcripts

| | Segment | Segment |
|---|---|---|
| | starting | ending |
| Transcript name | position | position |
| R30650_PEA_2_T2 (SEQ ID NO: 929) | 2883 | 2958 |
| R30650_PEA_2_T3 (SEQ ID NO: 930) | 2370 | 2445 |
| R30650_PEA_2_T6 (SEQ ID NO: 931) | 3198 | 3273 |
| R30650_PEA_2_T18 (SEQ ID NO: 934) | 3198 | 3273 |

[3207] Segment cluster R30650_PEA_{—}2_node_{—}77 (SEQ ID NO:979) according to the present invention is supported by 13 libraries. The number of libraries was determined as previously described. This segment can be found in the following transcript(s): R30650_PEA_{—}2_T2 (SEQ ID NO:929), R30650_PEA_{—}2_T3 (SEQ ID NO:930) and R30650_PEA_{—}2_T6 (SEQ ID NO:931). Table 62 below describes the starting and ending position of this segment on each transcript.

TABLE 62
Segment location on transcripts

| | | Segment |
|---|---|---|
| | Segment starting | ending |
| Transcript name | position | position |
| R30650_PEA_2_T2 (SEQ ID NO: 929) | 3562 | 3648 |
| R30650_PEA_2_T3 (SEQ ID NO: 930) | 3049 | 3135 |
| R30650_PEA_2_T6 (SEQ ID NO: 931) | 3672 | 3758 |

[3208] Segment cluster R30650_PEA_{—}2_node_{—}82 (SEQ ID NO:980) according to the present invention is supported by 20 libraries. The number of libraries was determined as previously described. This segment can be found in the following transcript(s): R30650_PEA_{—}2_T2 (SEQ ID NO:929), R30650_PEA_{—}2_T3 (SEQ ID NO:930) and R30650_PEA_{—}2_T6 (SEQ ID NO:931). Table 63 below describes the starting and ending position of this segment on each transcript.

TABLE 63
Segment location on transcripts

| | | Segment |
|---|---|---|
| | Segment starting | ending |
| Transcript name | position | position |
| R30650_PEA_2_T2 (SEQ ID NO: 929) | 3807 | 3907 |
| R30650_PEA_2_T3 (SEQ ID NO: 930) | 3294 | 3394 |
| R30650_PEA_2_T6 (SEQ ID NO: 931) | 3917 | 4017 |

[3209] Segment cluster R30650_PEA_{—}2_node_{—}85 (SEQ ID NO:981) according to the present invention can be found in the following transcript(s): R30650_PEA_{—}2_T2 (SEQ ID NO:929), R30650_PEA_{—}2_T3 (SEQ ID NO:930) and R30650_PEA_{—}2_T6 (SEQ ID NO:931). Table 64 below describes the starting and ending position of this segment on each transcript.

TABLE 64
Segment location on transcripts

| | | Segment |
|---|---|---|
| | Segment | ending |
| Transcript name | starting position | position |
| R30650_PEA_2_T2 (SEQ ID NO: 929) | 3908 | 3912 |
| R30650_PEA_2_T3 (SEQ ID NO: 930) | 3395 | 3399 |
| R30650_PEA_2_T6 (SEQ ID NO: 931) | 4018 | 4022 |

[3210] Segment cluster R30650_PEA_{—}2_node_{—}88 (SEQ ID NO:982) according to the present invention is supported by 38 libraries. The number of libraries was determined as previously described. This segment can be found in the following transcript(s): R30650_PEA_{—}2_T2 (SEQ ID NO:929), R30650_PEA_{—}2_T3 (SEQ ID NO:930) and R30650_PEA_{—}2_T6 (SEQ ID NO:931). Table 65 below describes the starting and ending position of this segment on each transcript.

TABLE 65
Segment location on transcripts

| | | Segment |
|---|---|---|
| | Segment | ending |
| Transcript name | starting position | position |
| R30650_PEA_2_T2 (SEQ ID NO: 929) | 5317 | 5409 |
| R30650_PEA_2_T3 (SEQ ID NO: 930) | 4804 | 4896 |
| R30650_PEA_2_T6 (SEQ ID NO: 931) | 5427 | 5519 |

[3211] Segment cluster R30650_PEA_{—}2_node_{—}90 (SEQ ID NO:983) according to the present invention can be found in the following transcript(s): R30650_PEA_{—}2_T2 (SEQ ID NO:929), R30650_PEA_{—}2_T3 (SEQ ID NO:930) and R30650_PEA_{—}2_T6 (SEQ ID NO:931). Table 66 below describes the starting and ending position of this segment on each transcript.

TABLE 66
Segment location on transcripts

| | | Segment |
|---|---|---|
| | Segment | ending |
| Transcript name | starting position | position |
| R30650_PEA_2_T2 (SEQ ID NO: 929) | 5991 | 5999 |
| R30650_PEA_2_T3 (SEQ ID NO: 930) | 5478 | 5486 |
| R30650_PEA_2_T6 (SEQ ID NO: 931) | 6101 | 6109 |

[3212] Segment cluster R30650_PEA_{—}2_node_{—}91 (SEQ ID NO:984) according to the present invention is supported by 45 libraries. The number of libraries was determined as previously described. This segment can be found in the following transcript(s): R30650_PEA_{—}2_T2 (SEQ ID NO:929), R30650_PEA_{—}2_T3 (SEQ ID NO:930) and R30650_PEA_{—}2_T6 (SEQ ID NO:931). Table 67 below describes the starting and ending position of this segment on each transcript.

TABLE 67
Segment location on transcripts

| | | Segment |
|---|---|---|
| | Segment | ending |
| Transcript name | starting position | position |
| R30650_PEA_2_T2 (SEQ ID NO: 929) | 6000 | 6068 |
| R30650_PEA_2_T3 (SEQ ID NO: 930) | 5487 | 5555 |
| R30650_PEA_2_T6 (SEQ ID NO: 931) | 6110 | 6178 |

[3213] Segment cluster R30650_PEA_{—}2_node_{—}92 (SEQ ID NO:985) according to the present invention can be found in the following transcript(s): R30650_PEA_{—}2_T2 (SEQ ID NO:929), R30650_PEA_{—}2_T3 (SEQ ID NO:930) and R30650_PEA_{—}2_T6 (SEQ ID NO:931). Table 68 below describes the starting and ending position of this segment on each transcript.

TABLE 68
Segment location on transcripts

| | | Segment |
|---|---|---|
| | Segment | ending |
| Transcript name | starting position | position |
| R30650_PEA_2_T2 (SEQ ID NO: 929) | 6069 | 6093 |
| R30650_PEA_2_T3 (SEQ ID NO: 930) | 5556 | 5580 |
| R30650_PEA_2_T6 (SEQ ID NO: 931) | 6179 | 6203 |

### Variant Protein Alignment to the Previously Known Protein:

Sequence name: Q9ULM1 (SEQ ID NO:989)
Sequence documentation:
Alignment of: R30650_PEA_2_P4 (SEQ ID NO:991) × Q9ULM1 (SEQ ID NO:989)
Alignment segment 1/1:

| | | | |
|---|---|---|---|
| Quality: | 8887.00 | Escore | 0 |
| Matching length: | 888 | Total length: | 888 |
| Matching Percent Similarity: | 100.00 | Matching Percent Identity: | 100.00 |
| Total Percent Similarity: | 100.00 | Total Percent Identity: | 100.00 |
| Gaps: | 0 | | |
| Alignment: | | | |

[chemical structure]

[chemical structure]

[chemical structure]

[chemical structure]

[chemical structure]

[chemical structure]

[chemical structure]

[chemical structure]

[chemical structure]

[chemical structure]

[chemical structure]

[chemical structure]

[chemical structure]

[chemical structure]

[chemical structure]

[chemical structure]

[chemical structure]

[chemical structure]

Sequence name: Q8WUJ3 (SEQ ID NO:987)
Sequence documentation:
Alignment of: R30650_PEA_2_P4 (SEQ ID NO:991) × Q8WUJ3 (SEQ ID NO:987) ..
Alignment segment 1/1:

| | | | |
|---|---|---|---|
| Quality: | 5070.00 | Escore | 0 |
| Matching length: | 506 | Total length: | 506 |
| Matching Percent Similarity: | 99.80 | Matching Percent Identity: | 99.80 |
| Total Percent Similarity: | 99.80 | Total Percent Identity: | 99.80 |
| Gaps: | 0 | | |
| Alignment: | | | |

[chemical structure]

[chemical structure]

[chemical structure]

[chemical structure]

[chemical structure]

[chemical structure]

[chemical structure]

[chemical structure]

[chemical structure]

[chemical structure]

[chemical structure]

Sequence name: Q9NPN9 (SEQ ID NO:988)
Sequence documentation:
Alignment of: R30650_PEA_2_P4 (SEQ ID NO:991) × Q9NPN9 (SEQ ID NO:988) ..
Alignment segment 1/1:

| | | | |
|---|---|---|---|
| Quality: | 7975.00 | Escore | 0 |
| Matching length: | 797 | Total length: | 797 |
| Matching Percent Similarity: | 100.00 | Matching Percent Identity: | 100.00 |
| Total Percent Similarity: | 100.00 | Total Percent Identity: | 100.00 |
| Gaps: | 0 | | |
| Alignment: | | | |

[chemical structure]

[chemical structure]

[chemical structure]

[chemical structure]

[chemical structure]

[chemical structure]

[chemical structure]

[chemical structure]

[chemical structure]

[chemical structure]

[chemical structure]

[chemical structure]

[chemical structure]

[chemical structure]

[chemical structure]

[chemical structure]

Sequence name: Q9H1K5 (SEQ ID NO:990)
Sequence documentation:
Alignment of: R30650_PEA_2_P4 (SEQ ID NO:991) × Q9HlK5 (SEQ ID NO:990) ..
Alignment segment 1/1:

| | | | |
|---|---|---|---|
| Quality: | 4983.00 | Escore | 0 |
| Matching length: | 499 | Total length: | 499 |
| Matching Percent Similarity: | 100.00 | Matching Percent Identity: | 100.00 |
| Total Percent Similarity: | 100.00 | Total Percent Identity: | 100.00 |
| Gaps: | 0 | | |
| Alignment: | | | |

[chemical structure]

[chemical structure]

[chemical structure]

[chemical structure]

[chemical structure]

[chemical structure]

[chemical structure]

[chemical structure]

[chemical structure]

[chemical structure]

Sequence name: Q9ULM1 (SEQ ID NO:989)
Sequence documentation:
Alignment of: R30650_PEA_2_P5 (SEQ ID NO:992) × Q9ULM1 (SEQ ID NO:989) ..
Alignment segment 1/1:

| | | | |
|---|---|---|---|
| Quality: | 9960.00 | Escore | 0 |
| Matching length: | 996 | Total length: | 996 |
| Matching Percent Similarity: | 100.00 | Matching Percent Identity: | 100.00 |
| Total Percent Similarity: | 100.00 | Total Percent Identity: | 100.00 |
| Gaps: | 0 | | |
| Alignment: | | | |

[chemical structure]

[chemical structure]

[chemical structure]

[chemical structure]

[chemical structure]

[chemical structure]

[chemical structure]

[chemical structure]

[chemical structure]

[chemical structure]

[chemical structure]

[chemical structure]

[chemical structure]

[chemical structure]

[chemical structure]

[chemical structure]

[chemical structure]

[chemical structure]

[chemical structure]

[chemical structure]

Sequence name: Q8WUJ3 (SEQ ID NO:987)
Sequence documentation:
Alignment of: R30650_PEA_2_P5 (SEQ ID NO:992) × Q8WUJ3 (SEQ ID NO:987) ..
Alignment segment 1/1:

| | | | |
|---|---|---|---|
| Quality: | 6143.00 | Escore | 0 |
| Matching length: | 614 | Total length: | 614 |
| Matching Percent Similarity: | 99.84 | Matching Percent Identity: | 99.84 |
| Total Percent Similarity: | 99.84 | Total Percent Identity: | 99.84 |
| Gaps: | 0 | | |
| Alignment: | | | |

[chemical structure]

[chemical structure]

[chemical structure]

[chemical structure]

[chemical structure]

[chemical structure]

[chemical structure]

[chemical structure]

[chemical structure]

[chemical structure]

[chemical structure]

[chemical structure]

[chemical structure]

Sequence name: Q9NPN9 (SEQ ID NO:988)
Sequence documentation:
Alignment of: R30650_PEA_2_P5 (SEQ ID NO:992) × Q9NPN9 (SEQ ID NO:988) ..
Alignment segment 1/1:

| | | | |
|---|---|---|---|
| Quality: | 7975.00 | Escore | 0 |
| Matching length: | 797 | Total length: | 797 |
| Matching Percent Similarity: | 100.00 | Matching Percent Identity: | 100.00 |
| Total Percent Similarity: | 100.00 | Total Percent Identity: | 100.00 |
| Gaps: | 0 | | |
| Alignment: | | | |

[chemical structure]

[chemical structure]

[chemical structure]

[chemical structure]

[chemical structure]

[chemical structure]

[chemical structure]

[chemical structure]

[chemical structure]

[chemical structure]

[chemical structure]

[chemical structure]

[chemical structure]

[chemical structure]

[chemical structure]

[chemical structure]

Sequence name: Q9H1K5 (SEQ ID NO:990)
Sequence documentation:
Alignment of: R30650_PEA_2_P5 (SEQ ID NO:992) × Q9HlK5 (SEQ ID NO:990) ..
Alignment segment 1/1:

| | | | |
|---|---|---|---|
| Quality: | 4983.00 | Escore | 0 |
| Matching length: | 499 | Total length: | 499 |
| Matching Percent Similarity: | 100.00 | Matching Percent Identity: | 100.00 |
| Total Percent Similarity: | 100.00 | Total Percent Identity: | 100.00 |
| Gaps: | 0 | | |
| Alignment: | | | |

[chemical structure]

[chemical structure]

[chemical structure]

[chemical structure]

[chemical structure]

[chemical structure]

[chemical structure]

[chemical structure]

[chemical structure]

[chemical structure]

Sequence name: Q9ULM1 (SEQ ID NO:989)
Sequence documentation:
Alignment of: R30650_PEA_2_P8 (SEQ ID NO:993) × Q9ULM1 (SEQ ID NO:989) ..
Alignment segment 1/1:

| | | | |
|---|---|---|---|
| Quality: | 7919.00 | Escore: | 0 |
| Matching length: | 788 | Total length: | 788 |
| Matching Percent Similarity: | 100.00 | Matching Percent Identity: | 100.00 |
| Total Percent Similarity: | 100.00 | Total Percent Identity: | 100.00 |
| Gaps: | 0 | | |
| Alignment: | | | |

[chemical structure]

[chemical structure]

[chemical structure]

[chemical structure]

[chemical structure]

[chemical structure]

[chemical structure]

[chemical structure]

[chemical structure]

[chemical structure]

[chemical structure]

[chemical structure]

[chemical structure]

[chemical structure]

[chemical structure]

[chemical structure]

Sequence name: Q8WUJ3 (SEQ ID NO:987)
Sequence documentation:
Alignment of: R30650_PEA_2_P8 (SEQ ID NO:993) × Q8WUJ3 (SEQ ID NO:987) ..
Alignment segment 1/1:

| | | | |
|---|---|---|---|
| Quality: | 9764.00 | Escore | 0 |
| Matching length: | 979 | Total length: | 979 |
| Matching Percent Similarity: | 99.90 | Matching Percent Identity: | 99.90 |
| Total Percent Similarity: | 99.90 | Total Percent Identity: | 99.90 |
| Gaps: | 0 | | |
| Alignment: | | | |

[chemical structure]

[chemical structure]

[chemical structure]

[chemical structure]

[chemical structure]

[chemical structure]

[chemical structure]

[chemical structure]

[chemical structure]

[chemical structure]

[chemical structure]

[chemical structure]

[chemical structure]

[chemical structure]

[chemical structure]

[chemical structure]

[chemical structure]

[chemical structure]

[chemical structure]

[chemical structure]

Sequence name: Q9NPN9 (SEQ ID NO:988)
Sequence documentation:
Alignment of: R30650_PEA_2_P8 (SEQ ID NO:993) × Q9NPN9 (SEQ ID NO:988) ..
Alignment segment 1/1:

| | | | |
|---|---|---|---|
| Quality: | 5764.00 | Escore | 0 |
| Matching length: | 572 | Total length: | 572 |
| Matching Percent Similarity: | 100.00 | Matching Percent Identity: | 100.00 |
| Total Percent Similarity: | 100.00 | Total Percent Identity: | 100.00 |
| Gaps: | 0 | | |
| Alignment: | | | |

[chemical structure]

[chemical structure]

[chemical structure]

[chemical structure]

[chemical structure]

[chemical structure]

[chemical structure]

[chemical structure]

[chemical structure]

[chemical structure]

[chemical structure]

[chemical structure]

Sequence name: Q9H1K5 (SEQ ID NO:990)
Sequence documentation:
Alignment of: R30650_PEA_2_P15 (SEQ ID NO:993) × Q9H1K5 (SEQ ID NO:990) ..
Alignment segment 1/1:

| | | | |
|---|---|---|---|
| Quality: | 2772.00 | Escore | 0 |
| Matching length: | 274 | Total length: | 274 |
| Matching Percent Similarity: | 100.00 | Matching Percent Identity: | 100.00 |
| Total Percent Similarity: | 100.00 | Total Percent Identity: | 100.00 |
| Gaps: | 0 | | |
| Alignment: | | | |

[chemical structure]

[chemical structure]

[chemical structure]

[chemical structure]

[chemical structure]

[chemical structure]

Sequence name: Q9ULM1 (SEQ ID NO:989)
Sequence documentation:
Alignment of: R30650_PEA_2_P15 (SEQ ID NO:996) × Q9ULM1 (SEQ ID NO:989)
Alignment segment 1/1:

| | | | |
|---|---|---|---|
| Quality: | 7919.00 | Escore | 0 |
| Matching length: | 788 | Total length: | 788 |
| Matching Percent Similarity: | 100.00 | Matching Percent Identity: | 100.00 |
| Total Percent Similarity: | 100.00 | Total Percent Identity: | 100.00 |
| Gaps: | 0 | | |
| Alignment: | | | |

[chemical structure]

[chemical structure]

[chemical structure]

[chemical structure]

[chemical structure]

[chemical structure]

[chemical structure]

[chemical structure]

[chemical structure]

[chemical structure]

[chemical structure]

[chemical structure]

[chemical structure]

[chemical structure]

[chemical structure]

[chemical structure]

Sequence name: Q8WUJ3 (SEQ ID NO:987)
Sequence documentation:
Alignment of: R30650_PEA_2_P15 (SEQ ID NO:996) × Q8WUJ3 (SEQ ID NO:987)
Alignment segment 1/1:

| | | | |
|---|---|---|---|
| Quality: | 9764.00 | Escore | 0 |
| Matching length: | 979 | Total length: | 979 |
| Matching Percent Similarity: | 99.90 | Matching Percent Identity: | 99.90 |
| Total Percent Similarity: | 99.90 | Total Percent Identity: | 99.90 |
| Gaps: | 0 | | |
| Alignment: | | | |

[chemical structure]

[chemical structure]

[chemical structure]

[chemical structure]

[chemical structure]

[chemical structure]

[chemical structure]

[chemical structure]

[chemical structure]

[chemical structure]

[chemical structure]

[chemical structure]

[chemical structure]

[chemical structure]

[chemical structure]

[chemical structure]

[chemical structure]

[chemical structure]

[chemical structure]

[chemical structure]

Sequence name: Q9NPN9 (SEQ ID NO:988)
Sequence documentation:
Alignment of: R30650_PEA_2_P15 (SEQ ID NO:996) × Q9NPN9 (SEQ ID NO:988)
Alignment segment 1/1:

| | | | |
|---|---|---|---|
| Quality: | 5764.00 | Escore | 0 |
| Matching length: | 572 | Total length: | 572 |
| Matching Percent Similarity: | 100.00 | Matching Percent Identity: | 100.00 |
| Total Percent Similarity: | 100.00 | Total Percent Identity: | 100.00 |
| Gaps: | 0 | | |
| Alignment: | | | |

[chemical structure]

[chemical structure]

[chemical structure]

[chemical structure]

[chemical structure]

[chemical structure]

[chemical structure]

[chemical structure]

[chemical structure]

[chemical structure]

[chemical structure]

[chemical structure]

Sequence name: Q9H1K5 (SEQ ID NO:990)
Sequence documentation:
Alignment of: R30650_PEA_2_P15 (SEQ ID NO:996) × Q9H1K5 (SEQ ID NO:990)
Alignment segment 1/1:

| | | | |
|---|---|---|---|
| Quality: | 2772.00 | Escore | 0 |
| Matching length: | 324 | Total length: | 274 |
| Matching Percent Similarity: | 100.00 | Matching Percent Identity: | 100.00 |
| Total Percent Similarity: | 100.00 | Total Percent Identity: | 100.00 |
| Gaps: | 0 | | |
| Alignment: | | | |

[chemical structure]

[chemical structure]

[chemical structure]

[chemical structure]

[chemical structure]

[chemical structure]

Sequence name: Q8WUJ3 (SEQ ID NO:987)
Sequence documentation:
Alignment of: R30650_PEA_2_P17 (SEQ ID NO:997) × Q8WUJ3 (SEQ ID NO:987)
Alignment segment 1/1:

| | | | |
|---|---|---|---|
| Quality: | 3170.00 | Escore | 0 |
| Matching length: | 324 | Total length: | 324 |
| Matching Percent Similarity: | 99.38 | Matching Percent Identity: | 99.38 |
| Total Percent Similarity: | 99.38 | Total Percent Identity: | 99.38 |
| Gaps: | 0 | | |
| Alignment: | | | |

[chemical structure]

[chemical structure]

[chemical structure]

[chemical structure]

[chemical structure]

[chemical structure]

[chemical structure]

[3215] Expression of R30650 Transcripts which are Detectable by Amplicon as Depicted in Sequence Name R30650 Seg76 (SEQ ID NO: 1354) in Normal and Cancerous Colon Tissues

[3216] Expression of R30650 transcripts detectable by or according to seg76, R30650 amplicon (SEQ ID NO: 1354) and R30650 F (SEQ ID NO: 1352) and R30650 R (SEQ ID NO: 1353) primers was measured by real time PCR. In parallel the expression of four housekeeping genes —PBGD (GenBank Accession No. BC019323 (SEQ ID NO:1576); amplicon—PBGD-amplicon, SEQ ID NO:531), HPRT1 (GenBank Accession No. NM_{—}000194 (SEQ ID NO:1577); amplicon—HPRT1-amplicon, SEQ ID NO:612), G6PD (GenBank Accession No. NM_{—}000402 (SEQ ID NO:1578); G6PD amplicon, SEQ ID NO:615), RPS27A (GenBank Accession No. NM_{—}002954 (SEQ ID NO:1579); RPS27A amplicon, SEQ ID NO:1261), was measured similarly. For each RT sample, the expression of the above amplicon was normalized to the geometric mean of the quantities of the housekeeping genes. The normalized quantity of each RT sample was then divided by the median of the quantities of the normal post-mortem (PM) samples (Sample Nos. 41, 52, 62-67, 69-71, Table 1, above, “Tissue samples in testing panel”), to obtain a value of fold up-regulation for each sample relative to median of the normal PM samples.

[3217] FIG. 57 is a histogram showing over expression of the above-indicated R30650 transcripts in cancerous colon samples relative to the normal samples. The number and percentage of samples that exhibit at least 5 fold over-expression, out of the total number of samples tested is indicated in the bottom.

[3218] As is evident from FIG. 57, the expression of R30650 transcripts detectable by the above amplicon in cancer samples was significantly higher than in the non-cancerous samples (Sample Nos. 41, 52, 62-67, 69-71, Table 1, “Tissue samples in testing panel”). Notably an over-expression of at least 5 fold was found in 18 out of 37 adenocarcinoma samples,

[3219] Statistical analysis was applied to verify the significance of these results, as described below.

[3220] The P value for the difference in the expression levels of R30650 transcripts detectable by the above amplicon in colon cancer samples versus the normal tissue samples was determined by T test as 1.86E-05.

[3221] Threshold of 5 fold overexpression was found to differentiate between cancer and normal samples with P value of 2.42E-03 as checked by exact fisher test. The above values demonstrate statistical significance of the results.

[3222] Primer pairs are also optionally and preferably encompassed within the present invention; for example, for the above experiment, the following primer pair was used as a non-limiting illustrative example only of a suitable primer pair: R30650 F forward primer (SEQ ID NO: 1352); and R30650 R reverse primer (SEQ ID NO: 1353).

[3223] The present invention also preferably encompasses any amplicon obtained through the use of any suitable primer pair; for example, for the above experiment, the following amplicon was obtained as a non-limiting illustrative example only of a suitable amplicon: R30650 (SEQ ID NO: 1354).

Forward primer (SEQ ID NO: 1352):
CTTCTTGTCCACGGTTTTGTITG
Reverse primer (SEQ ID NO: 1353):
AACATTCCTGGCCACCTGAA
Amplicon (SEQ ID NO: 1354):
CTTCTTGTCCACGGTTTTGTTGAGTTTTCACTCTTCTAATGCAAGGGTCA
CACTGTGAACCACTTAGGATGTGATCACTTTCAGGTGGCCAGGAATGTT

### Description for Cluster T23657

[3224] Cluster T23657 features 31 transcript(s) and 33 segment(s) of interest, the names for which are given in Tables 1 and 2, respectively, the sequences themselves are given at the end of the application. The selected protein variants are given in table 3.

TABLE 1
Transcripts of interest

| Transcript Name | SEQ ID NO: |
|---|---|
| T23657_T0 | 998 |
| T23657_T1 | 999 |
| T23657_T2 | 1000 |
| T23657_T3 | 1001 |
| T23657_T4 | 1002 |
| T23657_T5 | 1003 |
| T23657_T6 | 1004 |
| T23657_T7 | 1005 |
| T23657_T8 | 1006 |
| T23657_T9 | 1007 |
| T23657_T10 | 1008 |
| T23657_T11 | 1009 |
| T23657_T12 | 1010 |
| T23657_T13 | 1011 |
| T23657_T14 | 1012 |
| T23657_T15 | 1013 |
| T23657_T16 | 1014 |
| T23657_T17 | 1015 |
| T23657_T19 | 1016 |
| T23657_T20 | 1017 |
| T23657_T21 | 1018 |
| T23657_T22 | 1019 |
| T23657_T23 | 1020 |
| T23657_T24 | 1021 |
| T23657_T28 | 1022 |
| T23657_T30 | 1023 |
| T23657_T31 | 1024 |
| T23657_T32 | 1025 |
| T23657_T35 | 1026 |
| T23657_T37 | 1027 |
| T23657_T38 | 1028 |

TABLE 2
Segments of interest

| Segment Name | SEQ ID NO: |
|---|---|
| T23657_node_2 | 1029 |
| T23657_node_3 | 1030 |
| T23657_node_8 | 1031 |
| T23657_node_16 | 1032 |
| T23657_node_18 | 1033 |
| T23657_node_23 | 1034 |
| T23657_node_24 | 1035 |
| T23657_node_27 | 1036 |
| T23657_node_29 | 1037 |
| T23657_node_34 | 1038 |
| T23657_node_37 | 1039 |
| T23657_node_38 | 1040 |
| T23657_node_39 | 1041 |
| T23657_node_40 | 1042 |
| T23657_node_45 | 1043 |
| T23657_node_46 | 1044 |
| T23657_node_49 | 1045 |
| T23657_node_0 | 1046 |
| T23657_node_4 | 1047 |
| T23657_node_6 | 1048 |
| T23657_node_11 | 1049 |
| T23657_node_20 | 1050 |
| T23657_node_22 | 1051 |
| T23657_node_25 | 1052 |
| T23657_node_26 | 1053 |
| T23657_node_28 | 1054 |
| T23657_node_30 | 1055 |
| T23657_node_31 | 1056 |
| T23657_node_32 | 1057 |
| T23657_node_41 | 1058 |
| T23657_node_42 | 1059 |
| T23657_node_43 | 1060 |
| T23657_node_44 | 1061 |

TABLE 3
Proteins of interest

| | SEQ | |
|---|---|---|
| Protein Name | ID NO: | Corresponding Transcript(s) |
| T23657_P1 | 1063 | T23657_T0 (SEQ ID NO: 998); |
| | | T23657_T1 (SEQ ID NO: 999); T23657_T8 |
| | | (SEQ ID NO: 1006) |
| T23657_P2 | 1064 | T23657_T2 (SEQ ID NO: 1000); |
| | | T23657_T7 (SEQ ID NO: 1005); |
| | | T23657_T16 |
| | | (SEQ ID NO: 1014); T23657_T20 |
| | | (SEQ ID NO: 1017) |
| T23657_P3 | 1065 | T23657_T3 (SEQ ID NO: 1001); |
| | | T23657_T9 (SEQ ID NO: 1007); |
| | | T23657_T21 |
| | | (SEQ ID NO: 1018) |
| T23657_P4 | 1066 | T23657_T4 (SEQ ID NO: 1002) |
| T23657_P5 | 1067 | T23657_T5 (SEQ ID NO: 1003); |
| | | T23657_T6 (SEQ ID NO: 1004) |
| T23657_P6 | 1068 | T23657_T10 (SEQ ID NO: 1008) |
| T23657_P7 | 1069 | T23657_T12 (SEQ ID NO: 1010); |
| | | T23657_T17 (SEQ ID NO: 1015); |
| | | T23657_T22 (SEQ ID NO: 1019) |
| T23657_P8 | 1070 | T23657_T13 (SEQ ID NO: 1011); |
| | | T23657_T19 (SEQ ID NO: 1016); |
| | | T23657_T28 (SEQ ID NO: 1022) |
| T23657_P9 | 1071 | T23657_T14 (SEQ ID NO: 1012) |
| T23657_P10 | 1072 | T23657_T15 (SEQ ID NO: 1013) |
| T23657_P11 | 1073 | T23657_T23 (SEQ ID NO: 1020) |
| T23657_P12 | 1074 | T23657_T24 (SEQ ID NO: 1021) |
| T23657_P16 | 1075 | T23657_T30 (SEQ ID NO: 1023) |
| T23657_P17 | 1076 | T23657_T31 (SEQ ID NO: 1024); |
| | | T23657_T32 (SEQ ID NO: 1025) |
| T23657_P19 | 1077 | T23657_T35 (SEQ ID NO: 1026) |
| T23657_P21 | 1078 | T23657_T37 (SEQ ID NO: 1027) |
| T23657_P22 | 1079 | T23657_T38 (SEQ ID NO: 1028) |
| T23657_P23 | 1080 | T23657_T11 (SEQ ID NO: 1009) |

[3225] These sequences are variants of the known protein Solute carrier family 21 member 12 (SwissProt accession identifier S21C_HUMAN; known also according to the synonyms Sodium-independent organic anion transporter E; Organic anion transporting polypeptide E; OATP-E; Colon organic anion transporter; Organic anion transporter polypeptide-related protein 1; OATP-RP1; OATPRP1; POAT), SEQ ID NO:1062, referred to herein as the previously known protein.

[3226] Protein Solute carrier family 21 member 12 (SEQ ID NO:1062) is known or believed to have the following function(s): Mediates the Na(+)-independent transport of organic anions such as the thyroid hormones T3 (triiodo-L-thyronine), T4 (thyroxine) and rT3, and of estrone-3-sulfate and taurocholate. The sequence for protein Solute carrier family 21 member 12 is given at the end of the application, as “Solute carrier family 21 member 12 amino acid sequence”. Known polymorphisms for this sequence are as shown in Table 4.

TABLE 4
Amino acid mutations for Known Protein

| SNP position(s) on amino | |
|---|---|
| acid sequence | Comment |
| 78 | V -> I |
| 246 | T -> M |

[3227] Protein Solute carrier family 21 member 12 (SEQ ID NO:1062) localization is believed to be Integral membrane protein.

[3228] The following GO Annotation(s) apply to the previously known protein. The following annotation(s) were found: ion transport, which are annotation(s) related to Biological Process; transporter, which are annotation(s) related to Molecular Function; and integral membrane protein, which are annotation(s) related to Cellular Component.

[3229] The GO assignment relies on information from one or more of the SwissProt/TremB1 Protein knowledgebase, available from <http://www.expasy.ch/sprot/>; or Locuslink, available from 20<http://www.ncbi.nim.nih.gov/projects/LocusLink/>.

[3230] Cluster T23657 can be used as a diagnostic marker according to overexpression of transcripts of this cluster in cancer. Expression of such transcripts in normal tissues is also given according to the previously described methods. The term “number” in the left hand column of the table and the numbers on the y-axis of the figure below refer to weighted expression of ESTs in each category, as “parts per million” (ratio of the expression of ESTs for a particular cluster to the expression of all ESTs in that category, according to parts per million).

[3231] Overall, the following results were obtained as shown with regard to the histograms in FIG. 58 and Table 5. This cluster is overexpressed (at least at a minimum level) in the following pathological conditions: epithelial malignant tumors.

TABLE 5
Normal tissue distribution

| Name of Tissue | Number |
|---|---|
| adrenal | 0 |
| colon | 6 |
| epithelial | 14 |
| general | 26 |
| kidney | 44 |
| lung | 30 |
| lymph nodes | 39 |
| breast | 8 |
| bone marrow | 0 |
| ovary | 0 |
| pancreas | 0 |
| prostate | 0 |
| skin | 5 |
| stomach | 0 |

TABLE 6
P values and ratios for expression in cancerous tissue

| Name of Tissue | P1 | P2 | SP1 | R3 | SP2 | R4 |
|---|---|---|---|---|---|---|
| adrenal | 4.2e−01 | 4.6e−01 | 2.1e−01 | 3.4 | 2.9e−01 | 2.7 |
| colon | 3.1e−02 | 2.9e−02 | 1.2e−01 | 3.2 | 1.6e−01 | 2.8 |
| epithelial | 1.8e−02 | 2.0e−03 | 1.6e−01 | 1.6 | 3.4e−04 | 2.2 |
| general | 2.3e−01 | 3.3e−02 | 9.6e−01 | 0.7 | 2.1e−01 | 1.0 |
| kidney | 7.0e−01 | 5.5e−01 | 9.3e−01 | 0.7 | 7.4e−01 | 1.0 |
| lung | 7.7e−01 | 7.4e−01 | 1 | 0.4 | 6.3e−01 | 0.8 |
| lymph nodes | 6.9e−01 | 7.5e−01 | 1 | 0.5 | 7.9e−01 | 0.8 |
| breast | 9.5e−01 | 5.8e−01 | 1 | 0.8 | 3.1e−01 | 1.7 |
| bone marrow | 4.3e−01 | 4.2e−01 | 1 | 2.1 | 1 | 1.4 |
| ovary | 4.0e−01 | 2.8e−01 | 6.8e−01 | 1.6 | 5.9e−01 | 1.7 |
| pancreas | 1 | 4.4e−01 | 1 | 1.0 | 7.7e−02 | 2.8 |
| prostate | 7.3e−01 | 6.0e−01 | 4.5e−01 | 2.0 | 9.9e−03 | 2.3 |
| skin | 4.0e−01 | 6.8e−01 | 1.4e−01 | 5.0 | 6.4e−01 | 1.1 |
| stomach | 1 | 1.3e−01 | 1 | 1.0 | 1.6e−01 | 2.8 |

[3232] As noted above, cluster T23657 features 31 transcript(s), which were listed in Table 1 above. These transcript(s) encode for protein(s) which are variant(s) of protein Solute carrier family 21 member 12 (SEQ ID NO:1062). A description of each variant protein according to the present invention is now provided.

[3233] Variant protein T23657_P1 (SEQ ID NO:1063) according to the present invention has an amino acid sequence as given at the end of the application; it is encoded by transcript(s) T23657_T0 (SEQ ID NO:998), T23657_T1 (SEQ ID NO:999) and T23657_T8 (SEQ ID NO:1006). The location of the variant protein was determined according to results from a number of different software programs and analyses, including analyses from SignalP and other specialized programs. The variant protein is believed to be located as follows with regard to the cell: membrane. The protein localization is believed to be membrane because both trans-membrane region prediction programs predicted a trans-membrane region for this protein.

[3234] Variant protein T23657_P1 (SEQ ID NO:1063) also has the following non-silent SNPs (Single Nucleotide Polymorphisms) as listed in Table 7, (given according to their position(s) on the amino acid sequence, with the alternative amino acid(s) listed; the last column indicates whether the SNP is known or not; the presence of known SNPs in variant protein T23657_P1 (SEQ ID NO:1063) sequence provides support for the deduced sequence of this variant protein according to the present invention).

TABLE 7
Amino acid mutations

| SNP position(s) | | |
|---|---|---|
| on amino acid | Alternative | Previously |
| sequence | amino acid(s) | known SNP? |
| 78 | V -> I | Yes |
| 206 | R -> K | Yes |
| 496 | G -> | No |
| 496 | G -> S | No |

[3235] Variant protein T23657_P1 (SEQ ID NO:1063) is encoded by the following transcript(s): T23657_T0 (SEQ ID NO:998), T23657_T1 (SEQ ID NO:999) and T23657_T8 (SEQ ID NO:1006), for which the sequence(s) is/are given at the end of the application.

[3236] The coding portion of transcript T23657_T0 (SEQ ID NO:998) is shown in bold; this coding portion starts at position 212 and ends at position 2377. The transcript also has the following SNPs as listed in Table 8 (given according to their position on the nucleotide sequence, with the alternative nucleic acid listed; the last column indicates whether the SNP is known or not; the presence of known SNPs in variant protein T23657_P1 (SEQ ID NO:1063) sequence provides support for the deduced sequence of this variant protein according to the present invention).

TABLE 8
Nucleic acid SNPs

| SNP position | | |
|---|---|---|
| on nucleotide | Alternative | Previously |
| sequence | nucleic acid | known SNP? |
| 132 | G -> A | Yes |
| 179 | G -> | No |
| 180 | A -> T | No |
| 443 | G -> A | Yes |
| 760 | G -> T | Yes |
| 828 | G -> A | Yes |
| 894 | -> G | No |
| 894 | -> T | No |
| 1252 | G -> A | Yes |
| 1697 | G -> | No |
| 1697 | G -> A | No |
| 2399 | C -> T | No |
| 2402 | C -> | No |
| 2425 | C -> T | Yes |
| 2701 | C -> T | Yes |
| 2714 | C -> T | Yes |

[3237] The coding portion of transcript T23657_T1 (SEQ ID NO:999) is shown in bold; this coding portion starts at position 212 and ends at position 2377. The transcript also has the following SNPs as listed in Table 9 (given according to their position on the nucleotide sequence, with the alternative nucleic acid listed; the last column indicates whether the SNP is known or not; the presence of known SNPs in variant protein T23657_P1 (SEQ ID NO:1063) sequence provides support for the deduced sequence of this variant protein according to the present invention).

TABLE 9
Nucleic acid SNPs

| SNP position | | |
|---|---|---|
| on nucleotide | Alternative | Previously |
| sequence | nucleic acid | known SNP? |
| 132 | G -> A | Yes |
| 179 | G -> | No |
| 180 | A -> T | No |
| 443 | G -> A | Yes |
| 760 | G -> T | Yes |
| 828 | G -> A | Yes |
| 894 | -> G | No |
| 894 | -> T | No |
| 1252 | G -> A | Yes |
| 1697 | G -> | No |
| 1697 | G -> A | No |
| 2399 | C -> T | No |
| 2402 | C -> | No |
| 2425 | C -> T | Yes |
| 2701 | C -> T | Yes |
| 2714 | C -> T | Yes |
| 2877 | C -> T | Yes |
| 2950 | T -> C | Yes |
| 2967 | A -> C | Yes |

[3238] The coding portion of transcript T23657_T8 (SEQ ID NO:1006) is shown in bold; this coding portion starts at position 212 and ends at position 2377. The transcript also has the following SNPs as listed in Table 10 (given according to their position on the nucleotide sequence, with the alternative nucleic acid listed; the last column indicates whether the SNP is known or not; the presence of known SNPs in variant protein T23657_P1 (SEQ ID NO:1063) sequence provides support for the deduced sequence of this variant protein according to the present invention).

TABLE 10
Nucleic acid SNPs

| SNP position | | |
|---|---|---|
| on nucleotide | Alternative | Previously |
| sequence | nucleic acid | known SNP? |
| 132 | G -> A | Yes |
| 179 | G -> | No |
| 180 | A -> T | No |
| 443 | G -> A | Yes |
| 760 | G -> T | Yes |
| 828 | G -> A | Yes |
| 894 | -> G | No |
| 894 | -> T | No |
| 1252 | G -> A | Yes |
| 1697 | G -> | No |
| 1697 | G -> A | No |
| 2399 | C -> T | No |
| 2402 | C -> | No |
| 2425 | C -> T | Yes |

[3239] Variant protein T23657_P2 (SEQ ID NO:1064) according to the present invention has an amino acid sequence as given at the end of the application; it is encoded by transcript(s) T23657_T2 (SEQ ID NO:1000), T23657_T7 (SEQ ID NO:1005), T23657_T16 (SEQ ID NO:1014) and T23657_T20 (SEQ ID NO:1017). An alignment is given to the known protein (Solute carrier family 21 member 12 (SEQ ID NO:1062)) at the end of the application. One or more alignments to one or more previously published protein sequences are given at the end of the application. A brief description of the relationship of the variant protein according to the present invention to each such aligned protein is as follows:

[3240] Comparison Report Between T23657_P2 (SEQ ID NO:1064) and S21C HUMAN (SEQ ID NO:1062):

[3241] 1. An isolated chimeric polypeptide encoding for T23657_P2 (SEQ ID NO:1064), comprising a first amino acid sequence being at least 90% homologous to MPLHQLGDKPLTFPSPNSAMENGLDHTPPSRRASPGTPLSPGSLRSAAHSPLDTSKQPLCQLWAEKHGARG THEVRYVSAGQSVACGWWAFAPPCLQVLNTPKGILFFLCAAAFLQGMTVNGFINTVITSLERRYDLHSYQ SGLIASSYDIAACLCLTFVSYFGGSGHKPRWLGWGVLLMGTGSLVFALPHFTAGRYEVELDAGVRTCPAN PGAVCADSTSGLSRYQLVFMLGQFLHGVGATPLYTLGVTYLDENVKSSCSPVYIAIFYTAAILGPAAGYLI GGALLNIYTEMGRRTELTTESPLWVGAWWVGFLGSGAAAFFTAVPILGYPRQLPGSQRYAVMRAAEMH QLKDSSRGEASNPDFGKTIRDLPLSIWLLLKNPTFILLCLAGATEATLITGMSTFSPKFLESQFSLSASEAATL FGYLVVPAGGGGTFLGGFFVNKLRLRGSAVIKFCLFCTVVSLLGILVFSLHCPSVPMAGVTASYGGSLLPE GHLNLTAPCNAACSCQPEHYSPVCGSDGLMYFSLCHAGCPAATETNVDGQKVYRDCSCIPQNLSSGFGHA TAGKCTSTCQRKPLLLVFIFVVIFFTFLSSIPALTATLRCVRDPQRSFALGIQWIVVRILGGIPGPIAFGWVIDK ACLLWQDQCGQQGSCLVYQNSAMSRYILIMGLLYK corresponding to amino acids 1-675 of S21C_HUMAN (SEQ ID NO:1062), which also corresponds to amino acids 1-675 of T23657_P2 (SEQ ID NO:1064), and a second amino acid sequence being at least 70%, optionally at least 80%, preferably at least 85%, more preferably at least 90% and most preferably at least 95% homologous to a polypeptide having the sequence FQLPEVHHSLNVLNRKFQKQTVHNL (SEQ ID NO:1455) corresponding to amino acids 676-700 of T23657_P2 (SEQ ID NO:1064), wherein said first amino acid sequence and second amino acid sequence are contiguous and in a sequential order.

[3242] 2. An isolated polypeptide encoding for a tail of T23657_P2 (SEQ ID NO:1064), comprising a polypeptide being at least 70%, optionally at least about 80%, preferably at least about 85%, more preferably at least about 90% and most preferably at least about 95% homologous to the sequence FQLPEVHHSLNVLNRKFQKQTVHNL (SEQ ID NO:1455) in T23657_P2 (SEQ ID NO:1064).

[3243] The location of the variant protein was determined according to results from a number of different software programs and analyses, including analyses from SignalP and other specialized programs. The variant protein is believed to be located as follows with regard to the cell: membrane. The protein localization is believed to be membrane because both trans-membrane region prediction programs predicted a trans-membrane region for this protein.

[3244] Variant protein T23657_P2 (SEQ ID NO:1064) also has the following non-silent SNPs (Single Nucleotide Polymorphisms) as listed in Table 11, (given according to their position(s) on the amino acid sequence, with the alternative amino acid(s) listed; the last column indicates whether the SNP is known or not; the presence of known SNPs in variant protein T23657_P2 (SEQ ID NO:1064) sequence provides support for the deduced sequence of this variant protein according to the present invention).

TABLE 11
Amino acid mutations

| SNP position(s) | | |
|---|---|---|
| on amino acid | Alternative | Previously |
| sequence | amino acid(s) | known SNP? |
| 78 | V -> I | Yes |
| 206 | R -> K | Yes |
| 496 | G -> | No |
| 496 | G -> S | No |

[3245] The glycosylation sites of variant protein T23657_P2 (SEQ ID NO:1064), as compared to the known protein Solute carrier family 21 member 12 (SEQ ID NO:1062), are described in Table 12 (given according to their position(s) on the amino acid sequence in the first column; the second column indicates whether the glycosylation site is present in the variant protein; and the last column indicates whether the position is different on the variant protein).

TABLE 12
Glycosylation site(s)

| Position(s) on known | Present in | Position in |
|---|---|---|
| amino acid sequence | variant protein? | variant protein? |
| 557 | yes | 557 |
| 499 | yes | 499 |

[3246] Variant protein T23657_P2 (SEQ ID NO:1064) is encoded by the following transcript(s): T23657_T2 (SEQ ID NO:1000), T23657_T7 (SEQ ID NO:1005), T23657_T16 (SEQ ID NO:1014) and T23657_T20 (SEQ ID NO:1017), for which the sequence(s) is/are given at the end of the application.

[3247] The coding portion of transcript T23657_T2 (SEQ ID NO:1000) is shown in bold; this coding portion starts at position 212 and ends at position 2311. The transcript also has the following SNPs as listed in Table 13 (given according to their position on the nucleotide sequence, with the alternative nucleic acid listed; the last column indicates whether the SNP is known or not; the presence of known SNPs in variant protein T23657_P2 (SEQ ID NO:1064) sequence provides support for the deduced sequence of this variant protein according to the present invention).

TABLE 13
Nucleic acid SNPs

| SNP position on | Alternative | Previously |
|---|---|---|
| nucleotide sequence | nucleic acid | known SNP? |
| 132 | G -> A | Yes |
| 179 | G -> | No |
| 180 | A -> T | No |
| 443 | G -> A | Yes |
| 760 | G -> T | Yes |
| 828 | G -> A | Yes |
| 894 | -> G | No |
| 894 | -> T | No |
| 1252 | G -> A | Yes |
| 1697 | G -> | No |
| 1697 | G -> A | No |
| 2503 | A -> G | Yes |
| 2789 | G -> A | Yes |
| 3444 | C -> T | Yes |
| 3936 | T -> C | Yes |
| 4196 | C -> T | No |
| 4199 | C -> | No |
| 4222 | C -> T | Yes |
| 4498 | C -> T | Yes |
| 4511 | C -> T | Yes |

[3248] The coding portion of transcript T23657_T7 (SEQ ID NO:1005) is shown in bold; this coding portion starts at position 212 and ends at position 2311. The transcript also has the following SNPs as listed in Table 14 (given according to their position on the nucleotide sequence, with the alternative nucleic acid listed; the last column indicates whether the SNP is known or not; the presence of known SNPs in variant protein T23657_P2 (SEQ ID NO:1064) sequence provides support for the deduced sequence of this variant protein according to the present invention).

TABLE 14
Nucleic acid SNPs

| SNP position on | Alternative | Previously known |
|---|---|---|
| nucleotide sequence | nucleic acid | SNP? |
| 132 | G -> A | Yes |
| 179 | G -> | No |
| 180 | A -> T | No |
| 443 | G -> A | Yes |
| 760 | G -> T | Yes |
| 828 | G -> A | Yes |
| 894 | -> G | No |
| 894 | -> T | No |
| 1252 | G -> A | Yes |
| 1697 | G -> | No |
| 1697 | G -> A | No |
| 2503 | A -> G | Yes |
| 2789 | G -> A | Yes |
| 3444 | C -> T | Yes |
| 3936 | T -> C | Yes |
| 4196 | C -> T | No |
| 4199 | C -> | No |
| 4222 | C -> T | Yes |
| 4498 | C -> T | Yes |
| 4511 | C -> T | Yes |
| 4674 | C -> T | Yes |
| 4747 | T -> C | Yes |
| 4764 | A -> C | Yes |

[3249] The coding portion of transcript T23657_T16 (SEQ ID NO:1014) is shown in bold; this coding portion starts at position 212 and ends at position 2311. The transcript also has the following SNPs as listed in Table 15 (given according to their position on the nucleotide sequence, with the alternative nucleic acid listed; the last column indicates whether the SNP is known or not; the presence of known SNPs in variant protein T23657_P2 (SEQ ID NO:1064) sequence provides support for the deduced sequence of this variant protein according to the present invention).

TABLE 15
Nucleic acid SNPs

| SNP position on | Alternative | Previously |
|---|---|---|
| nucleotide sequence | nucleic acid | known SNP? |
| 132 | G -> A | Yes |
| 179 | G -> | No |
| 180 | A -> T | No |
| 443 | G -> A | Yes |
| 760 | G -> T | Yes |
| 828 | G -> A | Yes |
| 894 | -> G | No |
| 894 | -> T | No |
| 1252 | G -> A | Yes |
| 1697 | G -> | No |
| 1697 | G -> A | No |
| 2503 | A -> G | Yes |
| 2789 | G -> A | Yes |
| 3444 | C -> T | Yes |
| 3936 | T -> C | Yes |
| 4103 | C -> T | No |
| 4106 | C -> | No |
| 4129 | C -> T | Yes |
| 4405 | C -> T | Yes |
| 4418 | C -> T | Yes |

[3250] The coding portion of transcript T23657_T20 (SEQ ID NO:1017) is shown in bold; this coding portion starts at position 212 and ends at position 2311. The transcript also has the following SNPs as listed in Table 16 (given according to their position on the nucleotide sequence, with the alternative nucleic acid listed; the last column indicates whether the SNP is known or not; the presence of known SNPs in variant protein T23657_P2 (SEQ ID NO:1064) sequence provides support for the deduced sequence of this variant protein according to the present invention).

TABLE 16
Nucleic acid SNPs

| SNP position on | Alternative | Previously |
|---|---|---|
| nucleotide sequence | nucleic acid | known SNP? |
| 132 | G -> A | Yes |
| 179 | G -> | No |
| 180 | A -> T | No |
| 443 | G -> A | Yes |
| 760 | G -> T | Yes |
| 828 | G -> A | Yes |
| 894 | -> G | No |
| 894 | -> T | No |
| 1252 | G -> A | Yes |
| 1697 | G -> | No |
| 1697 | G -> A | No |
| 2569 | C -> T | No |
| 2572 | C -> | No |
| 2595 | C -> T | Yes |
| 2871 | C -> T | Yes |
| 2884 | C -> T | Yes |

[3251] Variant protein T23657_P3 (SEQ ID NO:1065) according to the present invention has an amino acid sequence as given at the end of the application; it is encoded by transcript(s) T23657_T3 (SEQ ID NO:1001), T23657_T9 (SEQ ID NO:1007) and T23657_T21 (SEQ ID NO:1018). An alignment is given to the known protein (Solute carrier family 21 member 12 (SEQ ID NO:1062)) at the end of the application. One or more alignments to one or more previously published protein sequences are given at the end of the application. A brief description of the relationship of the variant protein according to the present invention to each such aligned protein is as follows:

[3252] Comparison Report Between T23657_P3 (SEQ ID NO:1065) and S21C_HUMAN (SEQ ID NO:1062):

[3253] 1. An isolated chimeric polypeptide encoding for T23657_P3 (SEQ ID NO:1065), comprising a first amino acid sequence being at least 90% homologous to MPLHQLGDKPLTFPSPNSAMENGLDHTPPSRRASPGTPLSPGSLRSAAHSPLDTSKQPLCQLWAEKHGARG THEVRYVSAGQSVACGWWAFAPPCLQVLNTPKGILFFLCAAAFLQGMTVNGFINTVITSLERRYDLHSYQ SGLIASSYDIAACLCLTFVSYFGGSGHKPRWLGWGVLLMGTGSLVFALPHFTAGRYEVELDAGVRTCPAN PGAVCADSTSGLSRYQLVFMLGQFLHGVGATPLYTLGVTYLDENVKSSCSPVYIAIFYTAAILGPAAGYLI GGALLNIYTEMGRRTELTTESPLWVGAWWVGFLGSGAAAFFTAVPILGYPRQLPGSQRYAVMRAAEMH QLKDSSRGEASNPDFGKTIRDLPLSIWLLLKNPTFILLCLAGATEATLITGMSTFSPKFLESQFSLSASEAATL FGYLVVPAGGGGTFLGGFFVNKLRLRGSAVIKFCLFCTVVSLLGILVFSLHCPSVPMAGVTASYGGSLLPE GHLNLTAPCNAACSCQPEHYSPVCGSDGLMYFSLCHAGCPAATETNVDGQKVYRDCSCIPQNLSSGFGHA TAGKCTSTCQRKPLLLVFIFVVIFFTFLSSIPALTATLRCVRDPQRSFALGIQWIVVRILGGIPGPIAFGWVIDK ACLLWQDQCGQQGSCLVYQNSAMSRYILIMGLLYK corresponding to amino acids 1-675 of S21C_HUMAN (SEQ ID NO:1062), which also corresponds to amino acids 1-675 of T23657_P3 (SEQ ID NO:1065), and a second amino acid sequence being at least 70%, optionally at least 80%, preferably at least 85%, more preferably at least 90% and most preferably at least 95% homologous to a polypeptide having the sequence TIKHKAF corresponding to amino acids 676-682 of T23657_P3 (SEQ ID NO:1065), wherein said first amino acid sequence and second amino acid sequence are contiguous and in a sequential order.

[3254] 2. An isolated polypeptide encoding for a tail of T23657_P3 (SEQ ID NO:1065), comprising a polypeptide being at least 70%, optionally at least about 80%, preferably at least about 85%, more preferably at least about 90% and most preferably at least about 95% homologous to the sequence TIKHKAF in T23657_P3 (SEQ ID NO:1065).

[3255] The location of the variant protein was determined according to results from a number of different software programs and analyses, including analyses from SignalP and other specialized programs. The variant protein is believed to be located as follows with regard to the cell: membrane. The protein localization is believed to be membrane because both trans-membrane region prediction programs predicted a trans-membrane region for this protein.

[3256] Variant protein T23657_P3 (SEQ ID NO:1065) also has the following non-silent SNPs (Single Nucleotide Polymorphisms) as listed in Table 17, (given according to their position(s) on the amino acid sequence, with the alternative amino acid(s) listed; the last column indicates whether the SNP is known or not; the presence of known SNPs in variant protein T23657_P3 (SEQ ID NO:1065) sequence provides support for the deduced sequence of this variant protein according to the present invention).

TABLE 17
Amino acid mutations

| SNP position(s) on | Alternative | Previously |
|---|---|---|
| amino acid sequence | amino acid(s) | known SNP? |
| 78 | V -> I | Yes |
| 206 | R -> K | Yes |
| 496 | G -> | No |
| 496 | G -> S | No |

[3257] The glycosylation sites of variant protein T23657_P3 (SEQ ID NO:1065), as compared to the known protein Solute carrier family 21 member 12 (SEQ ID NO:1062), are described in Table 18 (given according to their position(s) on the amino acid sequence in the first column; the second column indicates whether the glycosylation site is present in the variant protein; and the last column indicates whether the position is different on the variant protein).

TABLE 18
Glycosylation site(s)

| Position(s) on known | Present in | Position |
|---|---|---|
| amino acid sequence | variant protein? | in variant protein? |
| 557 | yes | 557 |
| 499 | yes | 499 |

[3258] Variant protein T23657_P3 (SEQ ID NO:1065) is encoded by the following transcript(s): T23657_T3 (SEQ ID NO:1001), T23657_T9 (SEQ ID NO:1007) and T23657_T21 (SEQ ID NO:1018), for which the sequence(s) is/are given at the end of the application.

[3259] The coding portion of transcript T23657_T3 (SEQ ID NO:1001) is shown in bold; this coding portion starts at position 212 and ends at position 2257. The transcript also has the following SNPs as listed in Table 19 (given according to their position on the nucleotide sequence, with the alternative nucleic acid listed; the last column indicates whether the SNP is known or not; the presence of known SNPs in variant protein T23657_P3 (SEQ ID NO:1065) sequence provides support for the deduced sequence of this variant protein according to the present invention).

TABLE 19
Nucleic acid SNPs

| SNP position on | Alternative | Previously known |
|---|---|---|
| nucleotide sequence | nucleic acid | SNP? |
| 132 | G -> A | Yes |
| 179 | G -> | No |
| 180 | A -> T | No |
| 443 | G -> A | Yes |
| 760 | G -> T | Yes |
| 828 | G -> A | Yes |
| 894 | -> G | No |
| 894 | -> T | No |
| 1252 | G -> A | Yes |
| 1697 | G -> | No |
| 1697 | G -> A | No |
| 2270 | G -> A | Yes |
| 2801 | A -> G | Yes |
| 3087 | G -> A | Yes |
| 3742 | C -> T | Yes |
| 4234 | T -> C | Yes |
| 4494 | C -> T | No |
| 4497 | C -> | No |
| 4520 | C -> T | Yes |
| 4796 | C -> T | Yes |
| 4809 | C -> T | Yes |

[3260] The coding portion of transcript T23657_T9 (SEQ ID NO:1007) is shown in bold; this coding portion starts at position 212 and ends at position 2257. The transcript also has the following SNPs as listed in Table 20 (given according to their position on the nucleotide sequence, with the alternative nucleic acid listed; the last column indicates whether the SNP is known or not; the presence of known SNPs in variant protein T23657_P3 (SEQ ID NO:1065) sequence provides support for the deduced sequence of this variant protein according to the present invention).

TABLE 20
Nucleic acid SNPs

| SNP position on | Alternative | Previously |
|---|---|---|
| nucleotide sequence | nucleic acid | known SNP? |
| 132 | G -> A | Yes |
| 179 | G -> | No |
| 180 | A -> T | No |
| 443 | G -> A | Yes |
| 760 | G -> T | Yes |
| 828 | G -> A | Yes |
| 894 | -> G | No |
| 894 | -> T | No |
| 1252 | G -> A | Yes |
| 1697 | G -> | No |
| 1697 | G -> A | No |
| 2270 | G -> A | Yes |
| 2801 | A -> G | Yes |
| 3087 | G -> A | Yes |
| 3742 | C -> T | Yes |
| 4234 | T -> C | Yes |
| 4494 | C -> T | No |
| 4497 | C -> | No |
| 4520 | C -> T | Yes |

[3261] The coding portion of transcript T23657_T21 (SEQ ID NO:1018) is shown in bold; this coding portion starts at position 212 and ends at position 2257. The transcript also has the following SNPs as listed in Table 21 (given according to their position on the nucleotide sequence, with the alternative nucleic acid listed; the last column indicates whether the SNP is known or not; the presence of known SNPs in variant protein T23657_P3 (SEQ ID NO:1065) sequence provides support for the deduced sequence of this variant protein according to the present invention).

TABLE 21
Nucleic acid SNPs

| SNP position on | Alternative | Previously |
|---|---|---|
| nucleotide sequence | nucleic acid | known SNP? |
| 132 | G -> A | Yes |
| 179 | G -> | No |
| 180 | A -> T | No |
| 443 | G -> A | Yes |
| 760 | G -> T | Yes |
| 828 | G -> A | Yes |
| 894 | -> G | No |
| 894 | -> T | No |
| 1252 | G -> A | Yes |
| 1697 | G -> | No |
| 1697 | G -> A | No |
| 2270 | G -> A | Yes |
| 2539 | C -> T | No |
| 2542 | C -> | No |
| 2565 | C -> T | Yes |
| 2841 | C -> T | Yes |
| 2854 | C -> T | Yes |

[3262] Variant protein T23657_P4 (SEQ ID NO:1066) according to the present invention has an amino acid sequence as given at the end of the application; it is encoded by transcript(s) T23657_T4 (SEQ ID NO:1002). An alignment is given to the known protein (Solute carrier family 21 member 12 (SEQ ID NO:1062)) at the end of the application. One or more alignments to one or more previously published protein sequences are given at the end of the application. A brief description of the relationship of the variant protein according to the present invention to each such aligned protein is as follows:

[3263] Comparison Report Between T23657_P4 (SEQ ID NO:1066) and S21C_HUMAN (SEQ ID NO:1062):

[3264] 1. An isolated chimeric polypeptide encoding for T23657_P4 (SEQ ID NO:1066), comprising a first amino acid sequence being at least 90% homologous to MPLHQLGDKPLTFPSPNSAMENGLDHTPPSRRASPGTPLSPGSLRSAAHSPLDTSKQPLCQLWAEKHGARG THEVRYVSAGQSVACGWWAFAPPCLQVLNTPKGILFFLCAAAFLQGMTVNGFINTVITSLERRYDLHSYQ SGLIASSYDIAACLCLTFVSYFGGSGHKPRWLGWGVLLMGTGSLVFALPHFTAGRYEVELDAGVRTCPAN PGAVCADSTSGLSRYQLVFMLGQFLHGVGATPLYTLGVTYLDENVKSSCSPVYIAIFYTAAILGPAAGYLI GGALLNIYTEMGRRTELTTESPLWVGAWWVGFLGSGAAAFFTAVPILGYPRQLPGSQRYAVMRAAEMH QLKDSSRGEASNPDFGKTIRDLPLSIWLLLKNPTFILLCLAGATEATLITGMSTFSPKFLESQFSLSASEAATL FGYLVVPAGGGGTFLGGFFVNKLRLRGSAVIKFCLFCTVVSLLGILVFSLHCPSVPMAGVTASYGGSLLPE GHLNLTAPCNAACSCQPEHYSPVCGSDGLMYFSLCHAGCPAATETNVDGQKVYRDCSCIPQNLSSGFGHA TAGKCTSTCQRKPLLLVFIFVVIFFTFLSSIPALTATLRCVRDPQRSFALGIQWIVVRIL corresponding to amino acids 1-625 of S21C_HUMAN (SEQ ID NO:1062), which also corresponds to amino acids 1-625 of T23657_P4 (SEQ ID NO:1066), a second amino acid sequence being at least 70%, optionally at least 80%, preferably at least 85%, more preferably at least 90% and most preferably at least 95% homologous to a polypeptide having the sequence GTVQCEEAMVSCTVCSLHKGM (SEQ ID NO:1574) corresponding to amino acids 626-646 of T23657_P4 (SEQ ID NO:1066), a third amino acid sequence being at least 90% homologous to GGIPGPIAFGWVIDKACLLWQDQCGQQGSCLVYQNSAMSRYILIMGLLYK corresponding to amino acids 626-675 of S21C_HUMAN (SEQ ID NO:1062), which also corresponds to amino acids 647-696 of T23657_P4 (SEQ ID NO:1066), and a fourth amino acid sequence being at least 70%, optionally at least 80%, preferably at least 85%, more preferably at least 90% and most preferably at least 95% homologous to a polypeptide having the sequence TIKHKAF corresponding to amino acids 697-703 of T23657_P4 (SEQ ID NO:1066), wherein said first amino acid sequence, second amino acid sequence, third amino acid sequence and fourth amino acid sequence are contiguous and in a sequential order.

[3265] 2. An isolated polypeptide encoding for an edge portion of T23657_P4 (SEQ ID NO:1066), comprising an amino acid sequence being at least 70%, optionally at least about 80%, preferably at least about 85%, more preferably at least about 90% and most preferably at least about 95% homologous to the sequence encoding for GTVQCEEAMVSCTVCSLHKGM (SEQ ID NO:1574), corresponding to T23657_P4 (SEQ ID NO:1066).

[3266] 3. An isolated polypeptide encoding for a tail of T23657_P4 (SEQ ID NO:1066), comprising a polypeptide being at least 70%, optionally at least about 80%, preferably at least about 85%, more preferably at least about 90% and most preferably at least about 95% homologous to the sequence TIKHKAF in T23657_P4 (SEQ ID NO:1066).

[3267] The location of the variant protein was determined according to results from a number of different software programs and analyses, including analyses from SignalP and other specialized programs. The variant protein is believed to be located as follows with regard to the cell: membrane. The protein localization is believed to be membrane because both trans-membrane region prediction programs predicted a trans-membrane region for this protein.

[3268] Variant protein T23657_P4 (SEQ ID NO:1066) also has the following non-silent SNPs (Single Nucleotide Polymorphisms) as listed in Table 22, (given according to their position(s) on the amino acid sequence, with the alternative amino acid(s) listed; the last column indicates whether the SNP is known or not; the presence of known SNPs in variant protein T23657_P4 (SEQ ID NO:1066) sequence provides support for the deduced sequence of this variant protein according to the present invention).

TABLE 22
Amino acid mutations

| SNP position(s) on | Alternative | Previously |
|---|---|---|
| amino acid sequence | amino acid(s) | known SNP? |
| 78 | V -> I | Yes |
| 206 | R -> K | Yes |
| 496 | G -> | No |
| 496 | G -> S | No |

[3269] The glycosylation sites of variant protein T23657_P4 (SEQ ID NO:1066), as compared to the known protein Solute carrier family 21 member 12 (SEQ ID NO:1062), are described in Table 23 (given according to their position(s) on the amino acid sequence in the first column; the second column indicates whether the glycosylation site is present in the variant protein; and the last column indicates whether the position is different on the variant protein).

TABLE 23
Glycosylation site(s)

| Position(s) on known | Present in | Position |
|---|---|---|
| amino acid sequence | variant protein? | in variant protein? |
| 557 | yes | 557 |
| 499 | yes | 499 |

[3270] Variant protein T23657_P4 (SEQ ID NO:1066) is encoded by the following transcript(s): T23657_T4 (SEQ ID NO:1002), for which the sequence(s) is/are given at the end of the application. The coding portion of transcript T23657_T4 (SEQ ID NO:1002) is shown in bold; this coding portion starts at position 212 and ends at position 2320. The transcript also has the following SNPs as listed in Table 24 (given according to their position on the nucleotide sequence, with the alternative nucleic acid listed; the last column indicates whether the SNP is known or not; the presence of known SNPs in variant protein T23657_P4 (SEQ ID NO:1066) sequence provides support for the deduced sequence of this variant protein according to the present invention).

TABLE 24
Nucleic acid SNPs

| SNP position on | Alternative | Previously |
|---|---|---|
| nucleotide sequence | nucleic acid | known SNP? |
| 132 | G -> A | Yes |
| 179 | G -> | No |
| 180 | A -> T | No |
| 443 | G -> A | Yes |
| 760 | G -> T | Yes |
| 828 | G -> A | Yes |
| 894 | -> G | No |
| 894 | -> T | No |
| 1252 | G -> A | Yes |
| 1697 | G -> | No |
| 1697 | G -> A | No |
| 2333 | G -> A | Yes |
| 2864 | A -> G | Yes |
| 3150 | G -> A | Yes |
| 3805 | C -> T | Yes |
| 4297 | T -> C | Yes |
| 4557 | C -> T | No |
| 4560 | C -> | No |
| 4583 | C -> T | Yes |
| 4859 | C -> T | Yes |
| 4872 | C -> T | Yes |

[3271] Variant protein T23657_P5 (SEQ ID NO:1067) according to the present invention has an amino acid sequence as given at the end of the application; it is encoded by transcript(s) T23657_T5 (SEQ ID NO:1003) and T23657_T6 (SEQ ID NO:1004). An alignment is given to the known protein (Solute carrier family 21 member 12 (SEQ ID NO:1062)) at the end of the application. One or more alignments to one or more previously published protein sequences are given at the end of the application. A brief description of the relationship of the variant protein according to the present invention to each such aligned protein is as follows:

[3272] Comparison Report Between T23657_P5 (SEQ ID NO:1067) and S21C_HUMAN (SEQ ID NO:1062):

[3273] 1. An isolated chimeric polypeptide encoding for T23657_P5 (SEQ ID NO:1067), comprising a first amino acid sequence being at least 90% homologous to MPLHQLGDKPLTFPSPNSAMENGLDHTPPSRRASPGTPLSPGSLRSAAHSPLDTSKQPLCQLWAEKHGARG THEVRYVSAGQSVACGWWAFAPPCLQVLNTPKGILFFLCAAAFLQGMTVNGFINTVITSLERRYDLHSYQ SGLIASSYDIAACLCLTFVSYFGGSGHKPRWLGWGVLLMGTGSLVFALPHFTAGRYEVELDAGVRTCPAN PGAVCADSTSGLSRYQLVFMLGQFLHGVGATPLYTLGVTYLDENVKSSCSPVYIAIFYTAAILGPAAGYLI GGALLNIYTEMGRRTELTTESPLWVGAWWVGFLGSGAAAFFTAVPILGYPRQLPGSQRYAVMRAAEMH QLKDSSRGEASNPDFGKTIRDLPLSIWLLLKNPTFILLCLAGATEATLITGMSTFSPKFLESQFSLSASEAATL FGYLVVPAGGGGTFLGGFFVNKLRLRGSAVIKFCLFCTVVSLLGILVFSLHCPSVPMAGVTASYGGSLLPE GHLNLTAPCNAACSCQPEHYSPVCGSDGLMYFSLCHAGCPAATETNVDGQKVYRDCSCIPQNLSSGFGHA TAGKCTSTCQRKPLLLVFIFVVIFFTFLSSIPALTATLR corresponding to amino acids 1-604 of S21C_HUMAN (SEQ ID NO:1062), which also corresponds to amino acids 1-604 of T23657_P5 (SEQ ID NO:1067).

[3274] The location of the variant protein was determined according to results from a number of different software programs and analyses, including analyses from SignalP and other specialized programs. The variant protein is believed to be located as follows with regard to the cell: membrane. The protein localization is believed to be membrane because both trans-membrane region prediction programs predicted a trans-membrane region for this protein.

[3275] Variant protein T23657_P5 (SEQ ID NO:1067) also has the following non-silent SNPs (Single Nucleotide Polymorphisms) as listed in Table 25, (given according to their position(s) on the amino acid sequence, with the alternative amino acid(s) listed; the last column indicates whether the SNP is known or not; the presence of known SNPs in variant protein T23657_P5 (SEQ ID NO:1067) sequence provides support for the deduced sequence of this variant protein according to the present invention).

TABLE 25
Amino acid mutations

| SNP position(s) on amino | Alternative | Previously |
|---|---|---|
| acid sequence | amino acid(s) | known SNP? |
| 78 | V -> I | Yes |
| 206 | R -> K | Yes |
| 496 | G -> | No |
| 496 | G -> S | No |

[3276] The glycosylation sites of variant protein T23657_P5 (SEQ ID NO:1067), as compared to the known protein Solute carrier family 21 member 12 (SEQ ID NO:1062), are described in Table 26 (given according to their position(s) on the amino acid sequence in the first column; the second column indicates whether the glycosylation site is present in the variant protein; and the last column indicates whether the position is different on the variant protein).

TABLE 26
Glycosylation site(s)

| Position(s) on known | Present in | Position |
|---|---|---|
| amino acid sequence | variant protein? | in variant protein? |
| 557 | yes | 557 |
| 499 | yes | 499 |

[3277] Variant protein T23657_P5 (SEQ ID NO:1067) is encoded by the following transcript(s): T23657_T5 (SEQ ID NO:1003) and T23657_T6 (SEQ ID NO:1004), for which the sequence(s) is/are given at the end of the application.

[3278] The coding portion of transcript T23657_T5 (SEQ ID NO:1003) is shown in bold; this coding portion starts at position 212 and ends at position 2023. The transcript also has the following SNPs as listed in Table 27 (given according to their position on the nucleotide sequence, with the alternative nucleic acid listed; the last column indicates whether the SNP is known or not; the presence of known SNPs in variant protein T23657_P5 (SEQ ID NO:1067) sequence provides support for the deduced sequence of this variant protein according to the present invention).

TABLE 27
Nucleic acid SNPs

| SNP position on | Alternative | Previously |
|---|---|---|
| nucleotide sequence | nucleic acid | known SNP? |
| 132 | G -> A | Yes |
| 179 | G -> | No |
| 180 | A -> T | No |
| 443 | G -> A | Yes |
| 760 | G -> T | Yes |
| 828 | G -> A | Yes |
| 894 | -> G | No |
| 894 | -> T | No |
| 1252 | G -> A | Yes |
| 1697 | G -> | No |
| 1697 | G -> A | No |
| 2156 | G -> A | Yes |
| 2795 | A -> G | Yes |
| 3081 | G -> A | Yes |
| 3736 | C -> T | Yes |
| 4228 | T -> C | Yes |
| 4488 | C -> T | No |
| 4491 | C -> | No |
| 4514 | C -> T | Yes |
| 4790 | C -> T | Yes |
| 4803 | C -> T | Yes |

[3279] The coding portion of transcript T23657_T6 (SEQ ID NO:1004) is shown in bold; this coding portion starts at position 212 and ends at position 2023. The transcript also has the following SNPs as listed in Table 28 (given according to their position on the nucleotide sequence, with the alternative nucleic acid listed; the last column indicates whether the SNP is known or not; the presence of known SNPs in variant protein T23657_P5 (SEQ ID NO:1067) sequence provides support for the deduced sequence of this variant protein according to the present invention).

TABLE 28
Nucleic acid SNPs

| SNP position on | Alternative | Previously |
|---|---|---|
| nucleotide sequence | nucleic acid | known SNP? |
| 132 | G -> A | Yes |
| 179 | G -> | No |
| 180 | A -> T | No |
| 443 | G -> A | Yes |
| 760 | G -> T | Yes |
| 828 | G -> A | Yes |
| 894 | -> G | No |
| 894 | -> T | No |
| 1252 | G -> A | Yes |
| 1697 | G -> | No |
| 1697 | G -> A | No |
| 2156 | G -> A | Yes |
| 2625 | G -> A | Yes |
| 3156 | A -> G | Yes |
| 3442 | G -> A | Yes |
| 4097 | C -> T | Yes |
| 4589 | T -> C | Yes |
| 4849 | C -> T | No |
| 4852 | C -> | No |
| 4875 | C -> T | Yes |
| 5151 | C -> T | Yes |
| 5164 | C -> T | Yes |

[3280] Variant protein T23657_P6 (SEQ ID NO:1068) according to the present invention has an amino acid sequence as given at the end of the application; it is encoded by transcript(s) T23657_T10 (SEQ ID NO:1008). An alignment is given to the known protein (Solute carrier family 21 member 12 (SEQ ID NO:1062)) at the end of the application. One or more alignments to one or more previously published protein sequences are given at the end of the application. A brief description of the relationship of the variant protein according to the present invention to each such aligned protein is as follows:

[3281] Comparison Report Between T23657_P6 (SEQ ID NO:1068) and S21C_HUMAN (SEQ ID NO:1062):

[3282] 1. An isolated chimeric polypeptide encoding for T23657_P6 (SEQ ID NO:1068), comprising a first amino acid sequence being at least 90% homologous to MPLHQLGDKPLTFPSPNSAMENGLDHTPPSRRASPGTPLSPGSLRSAAHSPLDTSKQPLCQLWAEKHGARG THEVRYVSAGQSVACGWWAFAPPCLQVLNTPKGILFFLCAAAFLQGMTVNGFINTVITSLERRYDLHSYQ SGLIASSYDIAACLCLTFVSYFGGSGHKPRWLGWGVLLMGTGSLVFALPHFTAGRYEVELDAGVRTCPAN PGAVCADSTSGLSRYQLVFMLGQFLHGVGATPLYTLGVTYLDENVKSSCSPVYIAIFYTAAILGPAAGYLI GGALLNIYTEMGRRTELTTESPLWVGAWWVGFLGSGAAAFFTAVPILGYPRQLPGSQRYAVMRAAEMH QLKDSSRGEASNPDFGKTIRDLPLSIWLLLKNPTFILLCLAGATEATLITGMSTFSPKFLESQFSLSASEAATL FGYLVVPAGGGGTFLGGFFVNKLRLRGSAVIKFCLFCTVVSLLGILVFSLHCPSVPMAGVTASYGGSLLPE GHLNLTAPCNAACSCQPEHYSPVCGSDGLMYFSLCHAGCPAATETNVDGQKV corresponding to amino acids 1-547 of S21C_HUMAN (SEQ ID NO:1062), which also corresponds to amino acids 1-547 of T23657_P6 (SEQ ID NO:1068), and a second amino acid sequence being at least 70%, optionally at least 80%, preferably at least 85%, more preferably at least 90% and most preferably at least 95% homologous to a polypeptide having the sequence SGAAAYRPCPPLDPGKGPPCLPLVIGAIVGLPRCTETVAVSLRIFPLVLAMPLQGNALQLVRESPSFWFSYS L (SEQ ID NO:1458) corresponding to amino acids 548-620 of T23657_P6 (SEQ ID NO:1068), wherein said first amino acid sequence and second amino acid sequence are contiguous and in a sequential order.

[3283] 2. An isolated polypeptide encoding for a tail of T23657_P6 (SEQ ID NO:1068), comprising a polypeptide being at least 70%, optionally at least about 80%, preferably at least about 85%, more preferably at least about 90% and most preferably at least about 95% homologous to the sequence SGAAAYRPCPPLDPGKGPPCLPLVIGAIVGLPRCTETVAVSLRIFPLVLAMPLQGNALQLVRESPSFWFSYS L (SEQ ID NO:1458) in T23657_P6 (SEQ ID NO:1068).

[3284] The location of the variant protein was determined according to results from a number of different software programs and analyses, including analyses from SignalP and other specialized programs. The variant protein is believed to be located as follows with regard to the cell: membrane. The protein localization is believed to be membrane because both trans-membrane region prediction programs predicted a trans-membrane region for this protein.

[3285] Variant protein T23657_P6 (SEQ ID NO:1068) also has the following non-silent SNPs (Single Nucleotide Polymorphisms) as listed in Table 29, (given according to their position(s) on the amino acid sequence, with the alternative amino acid(s) listed; the last column indicates whether the SNP is known or not; the presence of known SNPs in variant protein T23657_P6 (SEQ ID NO:1068) sequence provides support for the deduced sequence of this variant protein according to the present invention).

TABLE 29
Amino acid mutations

| SNP position on | Alternative | Previously |
|---|---|---|
| amino acid sequence | amino acid | known SNP? |
| 78 | V -> I | Yes |
| 206 | R -> K | Yes |
| 496 | G -> | No |
| 496 | G -> S | No |
| 573 | G -> R | Yes |

[3286] The glycosylation sites of variant protein T23657_P6 (SEQ ID NO:1068), as compared to the known protein Solute carrier family 21 member 12 (SEQ ID NO:1062), are described in Table 30 (given according to their position(s) on the amino acid sequence in the first column; the second column indicates whether the glycosylation site is present in the variant protein; and the last column indicates whether the position is different on the variant protein).

TABLE 30
Glycosylation site(s)

| Position(s) on known | Present in | Position in |
|---|---|---|
| amino acid sequence | variant protein? | variant protein? |
| 557 | no | |
| 499 | yes | 499 |

[3287] Variant protein T23657_P6 (SEQ ID NO:1068) is encoded by the following transcript(s): T23657_T10 (SEQ ID NO:1008), for which the sequence(s) is/are given at the end of the application. The coding portion of transcript T23657_T10 (SEQ ID NO:1008) is shown in bold; this coding portion starts at position 212 and ends at position 2071. The transcript also has the following SNPs as listed in Table 31 (given according to their position on the nucleotide sequence, with the alternative nucleic acid listed; the last column indicates whether the SNP is known or not; the presence of known SNPs in variant protein T23657_P6 (SEQ ID NO:1068) sequence provides support for the deduced sequence of this variant protein according to the present invention).

TABLE 31
Nucleic acid SNPs

| SNP position on | Alternative | Previously |
|---|---|---|
| nucleotide sequence | nucleic acid | known SNP? |
| 132 | G -> A | Yes |
| 179 | G -> | No |
| 180 | A -> T | No |
| 443 | G -> A | Yes |
| 760 | G -> T | Yes |
| 828 | G -> A | Yes |
| 894 | -> G | No |
| 894 | -> T | No |
| 1252 | G -> A | Yes |
| 1697 | G -> | No |
| 1697 | G -> A | No |
| 1928 | G -> A | Yes |
| 2257 | G -> A | Yes |
| 2896 | A -> G | Yes |
| 3182 | G -> A | Yes |
| 3837 | C -> T | Yes |
| 4329 | T -> C | Yes |
| 4589 | C -> T | No |
| 4592 | C -> | No |
| 4615 | C -> T | Yes |
| 4891 | C -> T | Yes |
| 4904 | C -> T | Yes |

[3288] Variant protein T23657_P7 (SEQ ID NO:1069) according to the present invention has an amino acid sequence as given at the end of the application; it is encoded by transcript(s) T23657_T12 (SEQ ID NO:1010), T23657_T17 (SEQ ID NO:1015) and T23657_T22 (SEQ ID NO:1019). An alignment is given to the known protein (Solute carrier family 21 member 12 (SEQ ID NO:1062)) at the end of the application. One or more alignments to one or more previously published protein sequences are given at the end of the application. A brief description of the relationship of the variant protein according to the present invention to each such aligned protein is as follows:

[3289] Comparison Report Between T23657_P7 (SEQ ID NO:1069) and S21C_HUMAN (SEQ ID NO:1062):

[3290] 1. An isolated chimeric polypeptide encoding for T23657_P7 (SEQ ID NO:1069), comprising a first amino acid sequence being at least 90% homologous to MPLHQLGDKPLTFPSPNSAMENGLDHTPPSRRASPGTPLSPGSLRSAAHSPLDTSKQPLCQLWAEKHGARG THEVRYVSAGQSVACGWWAFAPPCLQVLNTPKGILFFLCAAAFLQGMTVNGFINTVITSLERRYDLHSYQ SGLIASSYDIAACLCLTFVSYFGGSGHKPRWLGWGVLLMGTGSLVFALPHFTAGRYEVELDAGVRTCPAN PGAVCADSTSGLSRYQLVFMLGQFLHGVGATPLYTLGVTYLDENVKSSCSPVYIAIFYTAAILGPAAGYLI GGALLNIYTEMGRRTELTTESPLWVGAWWVGFLGSGAAAFFTAVPILGYPRQLPGSQRYAVMRAAEMH QLKDSSRGEASNPDFGKTIRDLPLSIWLLLKNPTFILLCLAGATEATLITGMSTFSPKFLESQFSLSASEAATL FGYLVVPAGGGGTFLGGFFVNKLRLRGSAVIKFCLFCTVVSLLGILVFSLHCPSVPMAGVTASYGGSLLPE GHLNLTAPCNAACSCQPEHYSPVCGSDGLMYFSLCHAGCPAATETNVDGQK corresponding to amino acids 1-546 of S21C_HUMAN (SEQ ID NO:1062), which also corresponds to amino acids 1-546 of T23657_P7 (SEQ ID NO:1069), and a second amino acid sequence being at least 70%, optionally at least 80%, preferably at least 85%, more preferably at least 90% and most preferably at least 95% homologous to a polypeptide having the sequence MCP corresponding to amino acids 547-549 of T23657_P7 (SEQ ID NO:1069), wherein said first amino acid sequence and second amino acid sequence are contiguous and in a sequential order.

[3291] The location of the variant protein was determined according to results from a number of different software programs and analyses, including analyses from SignalP and other specialized programs. The variant protein is believed to be located as follows with regard to the cell: membrane. The protein localization is believed to be membrane because both trans-membrane region prediction programs predicted a trans-membrane region for this protein.

[3292] Variant protein T23657_P7 (SEQ ID NO:1069) also has the following non-silent SNPs (Single Nucleotide Polymorphisms) as listed in Table 32, (given according to their position(s) on the amino acid sequence, with the alternative amino acid(s) listed; the last column indicates whether the SNP is known or not; the presence of known SNPs in variant protein T23657_P7 (SEQ ID NO:1069) sequence provides support for the deduced sequence of this variant protein according to the present invention).

TABLE 32
Amino acid mutations

| SNP position on | Alternative | Previously |
|---|---|---|
| amino sequence | amino acid | known SNP? |
| 78 | V -> I | Yes |
| 206 | R -> K | Yes |
| 496 | G -> | No |
| 496 | G -> S | No |

[3293] The glycosylation sites of variant protein T23657_P7 (SEQ ID NO:1069), as compared to the known protein Solute carrier family 21 member 12 (SEQ ID NO:1062), are described in Table 33 (given according to their position(s) on the amino acid sequence in the first column; the second column indicates whether the glycosylation site is present in the variant protein; and the last column indicates whether the position is different on the variant protein).

TABLE 33
Glycosylation site(s)

| Position(s) on known | Present in | Position in |
|---|---|---|
| amino acid sequence | variant protein? | variant protein? |
| 557 | no | |
| 499 | yes | 499 |

[3294] Variant protein T23657_P7 (SEQ ID NO:1069) is encoded by the following transcript(s): T23657_T12 (SEQ ID NO:1010), T23657_T17 (SEQ ID NO:1015) and T23657_T22 (SEQ ID NO:1019), for which the sequence(s) is/are given at the end of the application.

[3295] The coding portion of transcript T23657_T12 (SEQ ID NO:1010) is shown in bold; this coding portion starts at position 212 and ends at position 1858. The transcript also has the following SNPs as listed in Table 34 (given according to their position on the nucleotide sequence, with the alternative nucleic acid listed; the last column indicates whether the SNP is known or not; the presence of known SNPs in variant protein T23657_P7 (SEQ ID NO:1069) sequence provides support for the deduced sequence of this variant protein according to the present invention).

TABLE 34
Nucleic acid SNPs

| SNP position on | Alternative | Previously |
|---|---|---|
| nucleotide sequence | nucleic acid | known SNP? |
| 132 | G -> A | Yes |
| 179 | G -> | No |
| 180 | A -> T | No |
| 443 | G -> A | Yes |
| 760 | G -> T | Yes |
| 828 | G -> A | Yes |
| 894 | -> G | No |
| 894 | -> T | No |
| 1252 | G -> A | Yes |
| 1697 | G -> | No |
| 1697 | G -> A | No |
| 2330 | A -> G | Yes |
| 2616 | G -> A | Yes |
| 3271 | C -> T | Yes |
| 3763 | T -> C | Yes |
| 4023 | C -> T | No |
| 4026 | C -> | No |
| 4049 | C -> T | Yes |
| 4325 | C -> T | Yes |
| 4338 | C -> T | Yes |

[3296] The coding portion of transcript T23657_T17 (SEQ ID NO:1015) is shown in bold; this coding portion starts at position 212 and ends at position 1858. The transcript also has the following SNPs as listed in Table 35 (given according to their position on the nucleotide sequence, with the alternative nucleic acid listed; the last column indicates whether the SNP is known or not; the presence of known SNPs in variant protein T23657_P7 (SEQ ID NO:1069) sequence provides support for the deduced sequence of this variant protein according to the present invention).

TABLE 35
Nucleic acid SNPs

| SNP position on | Alternative | Previously |
|---|---|---|
| nucleotide sequence | nucleic acid | known SNP? |
| 132 | G -> A | Yes |
| 179 | G -> | No |
| 180 | A -> T | No |
| 443 | G -> A | Yes |
| 760 | G -> T | Yes |
| 828 | G -> A | Yes |
| 894 | -> G | No |
| 894 | -> T | No |
| 1252 | G -> A | Yes |
| 1697 | G -> | No |
| 1697 | G -> A | No |
| 2226 | C -> T | No |
| 2229 | C -> | No |
| 2252 | C -> T | Yes |
| 2528 | C -> T | Yes |
| 2541 | C -> T | Yes |

[3297] The coding portion of transcript T23657_T22 (SEQ ID NO:1019) is shown in bold; this coding portion starts at position 212 and ends at position 1858. The transcript also has the following SNPs as listed in Table 36 (given according to their position on the nucleotide sequence, with the alternative nucleic acid listed; the last column indicates whether the SNP is known or not; the presence of known SNPs in variant protein T23657_P7 (SEQ ID NO:1069) sequence provides support for the deduced sequence of this variant protein according to the present invention).

TABLE 36
Nucleic acid SNPs

| SNP position on | Alternative | Previously |
|---|---|---|
| nucleotide sequence | nucleic acid | known SNP? |
| 132 | G -> A | Yes |
| 179 | G -> | No |
| 180 | A -> T | No |
| 443 | G -> A | Yes |
| 760 | G -> T | Yes |
| 828 | G -> A | Yes |
| 894 | -> G | No |
| 894 | -> T | No |
| 1252 | G -> A | Yes |
| 1697 | G -> | No |
| 1697 | G -> A | No |
| 2396 | C -> T | No |
| 2399 | C -> | No |
| 2422 | C -> T | Yes |
| 2698 | C -> T | Yes |
| 2711 | C -> T | Yes |

[3298] Variant protein T23657_P8 (SEQ ID NO:1070) according to the present invention has an amino acid sequence as given at the end of the application; it is encoded by transcript(s) T23657_T13 (SEQ ID NO:1011), T23657_T19 (SEQ ID NO:1016) and T23657_T28 (SEQ ID NO:1022). An alignment is given to the known protein (Solute carrier family 21 member 12 (SEQ ID NO:1062)) at the end of the application. One or more alignments to one or more previously published protein sequences are given at the end of the application. A brief description of the relationship of the variant protein according to the present invention to each such aligned protein is as follows:

[3299] Comparison Report Between T23657_P8 (SEQ ID NO:1070) and S21C_HUMAN (SEQ ID NO:1062):

[3300] 1. An isolated chimeric polypeptide encoding for T23657_P8 (SEQ ID NO:1070), comprising a first amino acid sequence being at least 90% homologous to MPLHQLGDKPLTFPSPNSAMENGLDHTPPSRRASPGTPLSPGSLRSAAHSPLDTSKQPLCQLWAEKHGARG THEVRYVSAGQSVACGWWAFAPPCLQVLNTPKGILFFLCAAAFLQGMTVNGFINTVITSLERRYDLHSYQ SGLIASSYDIAACLCLTFVSYFGGSGHKPRWLGWGVLLMGTGSLVFALPHFTAGRYEVELDAGVRTCPAN PGAVCADSTSGLSRYQLVFMLGQFLHGVGATPLYTLGVTYLDENVKSSCSPVYIAIFYTAAILGPAAGYLI GGALLNIYTEMGRRTELTTESPLWVGAWWVGFLGSGAAAFFTAVPILGYPRQLPGSQRYAVMRAAEMH QLKDSSRGEASNPDFGKTIRDLPLSIWLLLKNPTFILLCLAGATEATLITGMSTFSPKFLESQFSLSASEAATL FGYLVVPAGGGGTFLGGFFVNKLRLRGSAVIKFCLFCTVVSLLGILVFSLHCPSVPMAGVTASYGGSLLPE GHLNLTAPCNAACSCQPEHYSPVCGSDGLMYFSLCHAGCPAATETNVDGQK corresponding to amino acids 1-546 of S21C_HUMAN (SEQ ID NO:1062), which also corresponds to amino acids 1-546 of T23657_P8 (SEQ ID NO:1070), and a second amino acid sequence being at least 70%, optionally at least 80%, preferably at least 85%, more preferably at least 90% and most preferably at least 95% homologous to a polypeptide having the sequence QHSCTNGNSTMCP (SEQ ID NO:1459) corresponding to amino acids 547-559 of T23657_P8 (SEQ ID NO:1070), wherein said first amino acid sequence and second amino acid sequence are contiguous and in a sequential order.

[3301] 2. An isolated polypeptide encoding for a tail of T23657_P8 (SEQ ID NO:1070), comprising a polypeptide being at least 70%, optionally at least about 80%, preferably at least about 85%, more preferably at least about 90% and most preferably at least about 95% homologous to the sequence QHSCTNGNSTMCP (SEQ ID NO:1459) in T23657_P8 (SEQ ID NO:1070).

[3302] The location of the variant protein was determined according to results from a number of different software programs and analyses, including analyses from SignalP and other specialized programs. The variant protein is believed to be located as follows with regard to the cell: membrane. The protein localization is believed to be membrane because both trans-membrane region prediction programs predicted a trans-membrane region for this protein.

[3303] Variant protein T23657_P8 (SEQ ID NO:1070) also has the following non-silent SNPs (Single Nucleotide Polymorphisms) as listed in Table 37, (given according to their position(s) on the amino acid sequence, with the alternative amino acid(s) listed; the last column indicates whether the SNP is known or not; the presence of known SNPs in variant protein T23657_P8 (SEQ ID NO:1070) sequence provides support for the deduced sequence of this variant protein according to the present invention).

TABLE 37
Amino acid mutations

| SNP position(s) on | Alternative | Previously |
|---|---|---|
| amino acid sequence | amino acid(s) | known SNP? |
| 78 | V -> I | Yes |
| 206 | R -> K | Yes |
| 496 | G -> | No |
| 496 | G -> S | No |

[3304] The glycosylation sites of variant protein T23657_P8 (SEQ ID NO:1070), as compared to the known protein Solute carrier family 21 member 12 (SEQ ID NO:1062), are described in Table 38 (given according to their position(s) on the amino acid sequence in the first column; the second column indicates whether the glycosylation site is present in the variant protein; and the last column indicates whether the position is different on the variant protein).

TABLE 38
Glycosylation site(s)

| Position(s) on known | Present in | Position in |
|---|---|---|
| amino acid sequence | variant protein? | variant protein? |
| 557 | no | |
| 499 | yes | 499 |

[3305] Variant protein T23657_P8 (SEQ ID NO:1070) is encoded by the following transcript(s): T23657_T13 (SEQ ID NO:1011), T23657_T19 (SEQ ID NO:1016) and T23657_T28 (SEQ ID NO:1022), for which the sequence(s) is/are given at the end of the application.

[3306] The coding portion of transcript T23657_T13 (SEQ ID NO:1011) is shown in bold; this coding portion starts at position 212 and ends at position 1888. The transcript also has the following SNPs as listed in Table 39 (given according to their position on the nucleotide sequence, with the alternative nucleic acid listed; the last column indicates whether the SNP is known or not; the presence of known SNPs in variant protein T23657_P8 (SEQ ID NO:1070) sequence provides support for the deduced sequence of this variant protein according to the present invention).

TABLE 39
Nucleic acid SNPs

| SNP position on | Alternative | Previously |
|---|---|---|
| nucleotide sequence | nucleic acid | known SNP? |
| 132 | G -> A | Yes |
| 179 | G -> | No |
| 180 | A -> T | No |
| 443 | G -> A | Yes |
| 760 | G -> T | Yes |
| 828 | G -> A | Yes |
| 894 | -> G | No |
| 894 | -> T | No |
| 1252 | G -> A | Yes |
| 1697 | G -> | No |
| 1697 | G -> A | No |
| 2127 | G -> A | Yes |
| 2658 | A -> G | Yes |
| 2944 | G -> A | Yes |
| 3599 | C -> T | Yes |
| 4091 | T -> C | Yes |
| 4351 | C -> T | No |
| 4354 | C -> | No |
| 4377 | C -> T | Yes |
| 4653 | C -> T | Yes |
| 4666 | C -> T | Yes |

[3307] The coding portion of transcript T23657_T19 (SEQ ID NO:1016) is shown in bold; this coding portion starts at position 212 and ends at position 1888. The transcript also has the following SNPs as listed in Table 40 (given according to their position on the nucleotide sequence, with the alternative nucleic acid listed; the last column indicates whether the SNP is known or not; the presence of known SNPs in variant protein T23657_P8 (SEQ ID NO:1070) sequence provides support for the deduced sequence of this variant protein according to the present invention).

TABLE 40
Nucleic acid SNPs

| SNP position on | Alternative | Previously |
|---|---|---|
| nucleotide sequence | nucleic acid | known SNP? |
| 132 | G -> A | Yes |
| 179 | G -> | No |
| 180 | A -> T | No |
| 443 | G -> A | Yes |
| 760 | G -> T | Yes |
| 828 | G -> A | Yes |
| 894 | -> G | No |
| 894 | -> T | No |
| 1252 | G -> A | Yes |
| 1697 | G -> | No |
| 1697 | G -> A | No |
| 2256 | C -> T | No |
| 2259 | C -> | No |
| 2282 | C -> T | Yes |
| 2558 | C -> T | Yes |
| 2571 | C -> T | Yes |

[3308] The coding portion of transcript T23657_T28 (SEQ ID NO:1022) is shown in bold; this coding portion starts at position 212 and ends at position 1888. The transcript also has the following SNPs as listed in Table 41 (given according to their position on the nucleotide sequence, with the alternative nucleic acid listed; the last column indicates whether the SNP is known or not; the presence of known SNPs in variant protein T23657_P8 (SEQ ID NO:1070) sequence provides support for the deduced sequence of this variant protein according to the present invention).

TABLE 41
Nucleic acid SNPs

| SNP position on | Alternative | Previously |
|---|---|---|
| nucleotide sequence | nucleic acid | known SNP? |
| 132 | G -> A | Yes |
| 179 | G -> | No |
| 180 | A -> T | No |
| 443 | G -> A | Yes |
| 760 | G -> T | Yes |
| 828 | G -> A | Yes |
| 894 | -> G | No |
| 894 | -> T | No |
| 1252 | G -> A | Yes |
| 1697 | G -> | No |
| 1697 | G -> A | No |
| 2308 | C -> T | Yes |
| 2442 | G -> A | Yes |

[3309] Variant protein T23657_P9 (SEQ ID NO:1071) according to the present invention has an amino acid sequence as given at the end of the application; it is encoded by transcript(s) T23657_T14 (SEQ ID NO:1012). The location of the variant protein was determined according to results from a number of different software programs and analyses, including analyses from SignalP and other specialized programs. The variant protein is believed to be located as follows with regard to the cell: secreted. The protein localization is believed to be secreted because one of the two signal-peptide prediction programs (HMM:Signal peptide,NN:NO) predicts that this protein has a signal peptide.

[3310] Variant protein T23657_P9 (SEQ ID NO:1071) also has the following non-silent SNPs (Single Nucleotide Polymorphisms) as listed in Table 42, (given according to their position(s) on the amino acid sequence, with the alternative amino acid(s) listed; the last column indicates whether the SNP is known or not; the presence of known SNPs in variant protein T23657_P9 (SEQ ID NO:1071) sequence provides support for the deduced sequence of this variant protein according to the present invention).

TABLE 42
Amino acid mutations

| SNP position(s) on | Alternative | Previously |
|---|---|---|
| amino acid sequence | amino acid(s) | known SNP? |
| 63 | G -> V | Yes |
| 86 | G -> R | Yes |
| 197 | G -> R | Yes |
| 345 | R -> | No |
| 345 | R -> K | No |

[3311] Variant protein T23657_P9 (SEQ ID NO:1071) is encoded by the following transcript(s): T23657_T14 (SEQ ID NO:1012), for which the sequence(s) is/are given at the end of the application. The coding portion of transcript T23657_T14 (SEQ ID NO:1012) is shown in bold; this coding portion starts at position 573 and ends at position 1772. The transcript also has the following SNPs as listed in Table 43 (given according to their position on the nucleotide sequence, with the alternative nucleic acid listed; the last column indicates whether the SNP is known or not; the presence of known SNPs in variant protein T23657_P9 (SEQ ID NO:1071) sequence provides support for the deduced sequence of this variant protein according to the present invention).

TABLE 43
Nucleic acid SNPs

| SNP position on | Alternative | Previously |
|---|---|---|
| nucleotide sequence | nucleic acid | known SNP? |
| 132 | G -> A | Yes |
| 179 | G -> | No |
| 180 | A -> T | No |
| 443 | G -> A | Yes |
| 760 | G -> T | Yes |
| 828 | G -> A | Yes |
| 894 | -> G | No |
| 894 | -> T | No |
| 1161 | G -> A | Yes |
| 1606 | G -> | No |
| 1606 | G -> A | No |
| 2308 | C -> T | No |
| 2311 | C -> | No |
| 2334 | C -> T | Yes |
| 2610 | C -> T | Yes |
| 2623 | C -> T | Yes |

[3312] Variant protein T23657_P10 (SEQ ID NO:1072) according to the present invention has an amino acid sequence as given at the end of the application; it is encoded by transcript(s) T23657_T15 (SEQ ID NO:1013). An alignment is given to the known protein (Solute carrier family 21 member 12 (SEQ ID NO:1062)) at the end of the application. One or more alignments to one or more previously published protein sequences are given at the end of the application. A brief description of the relationship of the variant protein according to the present invention to each such aligned protein is as follows:

[3313] Comparison Report Between T23657_P10 (SEQ ID NO:1072) and S21C_HUMAN (SEQ ID NO:1062):

[3314] 1. An isolated chimeric polypeptide encoding for T23657_P10 (SEQ ID NO:1072), comprising a first amino acid sequence being at least 90% homologous to MPLHQLGDKPLTFPSPNSAMENGLDHTPPSRRASPGTPLSPGSLRSAAHSPLDTSKQPLCQLWAEKHGARG THEVRYVSAGQSVACGWWAFAPPCLQVLNTPKGILFFLCAAAFLQGMTVNGFINTVITSLERRYDLHSYQ SGLIASSYDIAACLCLTFVSYFGGSGHKPRWLGWGVLLMGTGSLVFALPHFTAGRYEVELDAGVRTCPAN PGAVCADSTSGLSRYQLVFMLGQFLHGVGATPLYTLGVTYLDENVKSSCSPVYIAIFYTAAILGPAAGYLI GGALLNIYTEMGRRTELTTESPLWVGAWWVGFLGSGAAAFFTAVPILGYPRQLPGSQRYAVMRAAEMH QLKDSSRGEASNPDFGKTIRDLPLSIWLLLKNPTFILLCLAGATEATLITGMSTFSPKFLESQFSLSASEAATL FGYLVVPAGGGGTFLGGFFVNKLRLRGSAVIKFCLFCTVVSLLGILVFSLHCPSVPMAGVTASYGGSLLPE GHLNLTAPCNAACSCQPEHYSPVCGSDGLMYFSLCHAGCPAATETNVDGQKVYRDCSCIPQNLSSGFGHA TAGKCTSTCQRKPLLLVFIFVVIFFTFLSSIPALTATLRCVRDPQRSFALGIQWIVVRIL corresponding to amino acids 1-625 of S21C_HUMAN (SEQ ID NO:1062), which also corresponds to amino acids 1-625 of T23657_P10 (SEQ ID NO:1072), a second amino acid sequence being at least 70%, optionally at least 80%, preferably at least 85%, more preferably at least 90% and most preferably at least 95% homologous to a polypeptide having the sequence GTVQCEEAMVSCTVCSLHKGM (SEQ ID NO:1574) corresponding to amino acids 626-646 of T23657_P10 (SEQ ID NO:1072), and a third amino acid sequence being at least 90% homologous to GGIPGPIAFGWVIDKACLLWQDQCGQQGSCLVYQNSAMSRYILIMGLLYKVLGVLFFAIACFLYKPLSESS DGLETCLPSQSSAPDSATDSQLQSSV corresponding to amino acids 626-722 of S21C_HUMAN (SEQ ID NO:1062), which also corresponds to amino acids 647-743 of T23657_P10 (SEQ ID NO:1072), wherein said first amino acid sequence, second amino acid sequence and third amino acid sequence are contiguous and in a sequential order.

[3315] 2. An isolated polypeptide encoding for an edge portion of T23657_P10 (SEQ ID NO:1072), comprising an amino acid sequence being at least 70%, optionally at least about 80%, preferably at least about 85%, more preferably at least about 90% and most preferably at least about 95% homologous to the sequence encoding for GTVQCEEAMVSCTVCSLHKGM (SEQ ID NO:1574), corresponding to T23657_P10 (SEQ ID NO:1072).

[3316] The location of the variant protein was determined according to results from a number of different software programs and analyses, including analyses from SignalP and other specialized programs. The variant protein is believed to be located as follows with regard to the cell: membrane. The protein localization is believed to be membrane because both trans-membrane region prediction programs predicted a trans-membrane region for this protein.

[3317] Variant protein T23657_P10 (SEQ ID NO:1072) also has the following non-silent SNPs (Single Nucleotide Polymorphisms) as listed in Table 44, (given according to their position(s) on the amino acid sequence, with the alternative amino acid(s) listed; the last column indicates whether the SNP is known or not; the presence of known SNPs in variant protein T23657_P10 (SEQ ID NO:1072) sequence provides support for the deduced sequence of this variant protein according to the present invention).

TABLE 44
Amino acid mutations

| SNP position(s) on | Alternative | Previously |
|---|---|---|
| amino acid sequence | amino acid(s) | known SNP? |
| 78 | V -> I | Yes |
| 206 | R -> K | Yes |
| 496 | G -> | No |
| 496 | G -> S | No |

[3318] The glycosylation sites of variant protein T23657_P10 (SEQ ID NO:1072), as compared to the known protein Solute carrier family 21 member 12 (SEQ ID NO:1062), are described in Table 45 (given according to their position(s) on the amino acid sequence in the first column; the second column indicates whether the glycosylation site is present in the variant protein; and the last column indicates whether the position is different on the variant protein).

TABLE 45
Glycosylation site(s)

| Position(s) on known | Present in | Position in |
|---|---|---|
| amino acid sequence | variant protein? | variant protein? |
| 557 | yes | 557 |
| 499 | yes | 499 |

[3319] Variant protein T23657_P10 (SEQ ID NO:1072) is encoded by the following transcript(s): T23657_T15 (SEQ ID NO:1013), for which the sequence(s) is/are given at the end of the application. The coding portion of transcript T23657_T15 (SEQ ID NO:1013) is shown in bold; this coding portion starts at position 212 and ends at position 2440. The transcript also has the following SNPs as listed in Table 46 (given according to their position on the nucleotide sequence, with the alternative nucleic acid listed; the last column indicates whether the SNP is known or not; the presence of known SNPs in variant protein T23657_P10 (SEQ ID NO:1072) sequence provides support for the deduced sequence of this variant protein according to the present invention).

TABLE 46
Nucleic acid SNPs

| SNP position on | Alternative | Previously |
|---|---|---|
| nucleotide sequence | nucleic acid | known SNP? |
| 132 | G -> A | Yes |
| 179 | G -> | No |
| 180 | A -> T | No |
| 443 | G -> A | Yes |
| 760 | G -> T | Yes |
| 828 | G -> A | Yes |
| 894 | -> G | No |
| 894 | -> T | No |
| 1252 | G -> A | Yes |
| 1697 | G -> | No |
| 1697 | G -> A | No |
| 2462 | C -> T | No |
| 2465 | C -> | No |
| 2488 | C -> T | Yes |
| 2764 | C -> T | Yes |
| 2777 | C -> T | Yes |

[3320] Variant protein T23657_P11 (SEQ ID NO:1073) according to the present invention has an amino acid sequence as given at the end of the application; it is encoded by transcript(s) T23657_T23 (SEQ ID NO:1020). An alignment is given to the known protein (Solute carrier family 21 member 12 (SEQ ID NO:1062)) at the end of the application. One or more alignments to one or more previously published protein sequences are given at the end of the application. A brief description of the relationship of the variant protein according to the present invention to each such aligned protein is as follows:

[3321] Comparison Report Between T23657_P11 (SEQ ID NO:1073) and S21C_HUMAN (SEQ ID NO:1062):

[3322] 1. An isolated chimeric polypeptide encoding for T23657_P11 (SEQ ID NO:1073), comprising a first amino acid sequence being at least 90% homologous to MPLHQLGDKPLTFPSPNSAMENGLDHTPPSRRASPGTPLSPGSLRSAAHSPLDTSKQPLCQLWAEKHGARG THEVRYVSAGQSVACGWWAFAPPCLQVLNTPKGILFFLCAAAFLQGMTVNGFINTVITSLERRYDLHSYQ SGLIASSYDIAACLCLTFVSYFGGSGHKPRWLGWGVLLMGTGSLVFALPHFTAGRYEVELDAGVRTCPAN PGAVCADSTSGLSRYQLVFMLGQFLHGVGATPLYTLGVTYLDENVKSSCSPVYIAIFYTAAILGPAAGYLI GGALLNIYTEMGRRTELTTESPLWVGAWWVGFLGSGAAAFFTAVPILGYPRQLPGSQRYAVMRAAEMH QLKDSSRGEASNPDFGKTIRDLPLSIWLLLKNPTFILLCLAGATEATLITGMSTFSPKFLESQFSLSASEAATL F corresponding to amino acids 1-425 of S21C_HUMAN (SEQ ID NO:1062), which also corresponds to amino acids 1-425 of T23657_P11 (SEQ ID NO:1073), and a second amino acid sequence being at least 70%, optionally at least 80%, preferably at least 85%, more preferably at least 90% and most preferably at least 95% homologous to a polypeptide having the sequence ASCPKAT (SEQ ID NO:1460) corresponding to amino acids 426-432 of T23657_P11 (SEQ ID NO:1073), wherein said first amino acid sequence and second amino acid sequence are contiguous and in a sequential order.

[3323] 2. An isolated polypeptide encoding for a tail of T23657_P11 (SEQ ID NO:1073), comprising a polypeptide being at least 70%, optionally at least about 80%, preferably at least about 85%, more preferably at least about 90% and most preferably at least about 95% homologous to the sequence ASCPKAT (SEQ ID NO:1460) in T23657_P11 (SEQ ID NO:1073).

[3324] The location of the variant protein was determined according to results from a number of different software programs and analyses, including analyses from SignalP and other specialized programs. The variant protein is believed to be located as follows with regard to the cell: membrane. The protein localization is believed to be membrane because both trans-membrane region prediction programs predicted a trans-membrane region for this protein.

[3325] Variant protein T23657_P11 (SEQ ID NO:1073) also has the following non-silent SNPs (Single Nucleotide Polymorphisms) as listed in Table 47, (given according to their position(s) on the amino acid sequence, with the alternative amino acid(s) listed; the last column indicates whether the SNP is known or not; the presence of known SNPs in variant protein T23657_P11 (SEQ ID NO:1073) sequence provides support for the deduced sequence of this variant protein according to the present invention).

TABLE 47
Amino acid mutations

| SNP position(s) on | Alternative | Previously |
|---|---|---|
| amino acid sequence | amino acid(s) | known SNP? |
| 78 | V -> I | Yes |
| 206 | R -> K | Yes |
| 430 | K -> | No |

[3326] The glycosylation sites of variant protein T23657_P11 (SEQ ID NO:1073), as compared to the known protein Solute carrier family 21 member 12 (SEQ ID NO:1062), are described in Table 48 (given according to their position(s) on the amino acid sequence in the first column; the second column indicates whether the glycosylation site is present in the variant protein; and the last column indicates whether the position is different on the variant protein).

TABLE 48
Glycosylation site(s)

| Position(s) on known | Present in | Position in |
|---|---|---|
| amino acid sequence | variant protein? | variant protein? |
| 557 | no | |
| 499 | no | |

[3327] Variant protein T23657_P11 (SEQ ID NO:1073) is encoded by the following transcript(s): T23657_T23 (SEQ ID NO:1020), for which the sequence(s) is/are given at the end of the application. The coding portion of transcript T23657_T23 (SEQ ID NO:1020) is shown in bold; this coding portion starts at position 212 and ends at position 1507. The transcript also has the following SNPs as listed in Table 49 (given according to their position on the nucleotide sequence, with the alternative nucleic acid listed; the last column indicates whether the SNP is known or not; the presence of known SNPs in variant protein T23657_P11 (SEQ ID NO:1073) sequence provides support for the deduced sequence of this variant protein according to the present invention).

TABLE 49
Nucleic acid SNPs

| SNP position on | Alternative | Previously |
|---|---|---|
| nucleotide sequence | nucleic acid | known SNP? |
| 132 | G -> A | Yes |
| 179 | G -> | No |
| 180 | A -> T | No |
| 443 | G -> A | Yes |
| 760 | G -> T | Yes |
| 828 | G -> A | Yes |
| 894 | -> G | No |
| 894 | -> T | No |
| 1252 | G -> A | Yes |
| 1501 | G -> | No |
| 1501 | G -> A | No |
| 2030 | C -> T | No |
| 2033 | C -> | No |
| 2056 | C -> T | Yes |
| 2332 | C -> T | Yes |
| 2345 | C -> T | Yes |

[3328] Variant protein T23657_P12 (SEQ ID NO:1074) according to the present invention has an amino acid sequence as given at the end of the application; it is encoded by transcript(s) T23657_T24 (SEQ ID NO:1021). An alignment is given to the known protein (Solute carrier family 21 member 12 (SEQ ID NO:1062)) at the end of the application. One or more alignments to one or more previously published protein sequences are given at the end of the application. A brief description of the relationship of the variant protein according to the present invention to each such aligned protein is as follows:

[3329] Comparison Report Between T23657_P12 (SEQ ID NO:1074) and S21C_HUMAN (SEQ ID NO:1062):

[3330] 1. An isolated chimeric polypeptide encoding for T23657_P12 (SEQ ID NO:1074), comprising a first amino acid sequence being at least 90% homologous to MPLHQLGDKPLTFPSPNSAMENGLDHTPPSRRASPGTPLSPGSLRSAAHSPLDTSKQPLCQLWAEKHGARG THEVRYVSAGQSVACGWWAFAPPCLQVLNTPKGILFFLCAAAFLQGMTVNGFINTVITSLERRYDLHSYQ SGLIASSYDIAACLCLTFVSYFGGSGHKPRWLGWGVLLMGTGSLVFALPHFTAGRYEVELDAGVRTCPAN PGAVCADSTSGLSRYQLVFMLGQFLHGVGATPLYTLGVTYLDENVKSSCSPVYIAIFYTAAILGPAAGYLI GGALLNIYTEMGRRTELTTESPLWVGAWWVGFLGSGAAAFFTAVPILGYPRQLPGSQRYAVMRAAEMH QLKDSSRGEASNPDFGKTIRDLPLSIWLLLKNPTFILLCLAGATEATLITGMSTFSPKFLESQFSLSASEAATL FGYLVVPAGGGGTFLGGFFVNKLRLRGSAVIKFCLFCTVVSLLGILVFSLHCPSVPMAGVTASYGGSLLPE GHLNLTAPCNAACSCQPEHYSPVCGSDGLMYFSLCHAGCPAATETNVDGQKVYRDCSCIPQNLSSGFGHA TAGKCTSTCQRKPLLLVFIFVVIFFTFLSSIPALTATLRCVRDPQRSFALGIQWIVVRILGGIPGPIAFGWVIDK ACLLWQDQCGQQGSCLVYQNSAMSRYILIMGLLYK corresponding to amino acids 1-675 of S21C_HUMAN (SEQ ID NO:1062), which also corresponds to amino acids 1-675 of T23657_P12 (SEQ ID NO:1074), and a second amino acid sequence being at least 70%, optionally at least 80%, preferably at least 85%, more preferably at least 90% and most preferably at least 95% homologous to a polypeptide having the sequence EEENEFRRL (SEQ ID NO:1461) corresponding to amino acids 676-684 of T23657_P12 (SEQ ID NO:1074), wherein said first amino acid sequence and second amino acid sequence are contiguous and in a sequential order.

[3331] 2. An isolated polypeptide encoding for a tail of T23657_P12 (SEQ ID NO:1074), comprising a polypeptide being at least 70%, optionally at least about 80%, preferably at least about 85%, more preferably at least about 90% and most preferably at least about 95% homologous to the sequence EEENEFRRL (SEQ ID NO:1461) in T23657_P12 (SEQ ID NO:1074).

[3332] The location of the variant protein was determined according to results from a number of different software programs and analyses, including analyses from SignalP and other specialized programs. The variant protein is believed to be located as follows with regard to the cell: membrane. The protein localization is believed to be membrane because both trans-membrane region prediction programs predicted a trans-membrane region for this protein.

[3333] Variant protein T23657_P12 (SEQ ID NO:1074) also has the following non-silent SNPs (Single Nucleotide Polymorphisms) as listed in Table 50, (given according to their position(s) on the amino acid sequence, with the alternative amino acid(s) listed; the last column indicates whether the SNP is known or not; the presence of known SNPs in variant protein T23657_P12 (SEQ ID NO:1074) sequence provides support for the deduced sequence of this variant protein according to the present invention).

TABLE 50
Amino acid mutations

| SNP position(s) on | Alternative | Previously |
|---|---|---|
| amino acid sequence | amino acid(s) | known SNP? |
| 78 | V -> I | Yes |
| 206 | R -> K | Yes |
| 496 | G -> | No |
| 496 | G -> S | No |

[3334] The glycosylation sites of variant protein T23657_P12 (SEQ ID NO:1074), as compared to the known protein Solute carrier family 21 member 12 (SEQ ID NO:1062), are described in Table 51 (given according to their position(s) on the amino acid sequence in the first column; the second column indicates whether the glycosylation site is present in the variant protein; and the last column indicates whether the position is different on the variant protein).

TABLE 51
Glycosylation site(s)

| Position(s) on known | Present in | Position in |
|---|---|---|
| amino acid sequence | variant protein? | variant protein? |
| 557 | yes | 557 |
| 499 | yes | 499 |

[3335] Variant protein T23657_P12 (SEQ ID NO:1074) is encoded by the following transcript(s): T23657_T24 (SEQ ID NO:1021), for which the sequence(s) is/are given at the end of the application. The coding portion of transcript T23657_T24 (SEQ ID NO:1021) is shown in bold; this coding portion starts at position 212 and ends at position 2263. The transcript also has the following SNPs as listed in Table 52 (given according to their position on the nucleotide sequence, with the alternative nucleic acid listed; the last column indicates whether the SNP is known or not; the presence of known SNPs in variant protein T23657_P12 (SEQ ID NO:1074) sequence provides support for the deduced sequence of this variant protein according to the present invention).

TABLE 52
Nucleic acid SNPs

| SNP position on | Alternative | Previously |
|---|---|---|
| nucleotide sequence | nucleic acid | known SNP? |
| 132 | G -> A | Yes |
| 179 | G -> | No |
| 180 | A -> T | No |
| 443 | G -> A | Yes |
| 760 | G -> T | Yes |
| 828 | G -> A | Yes |
| 894 | -> G | No |
| 894 | -> T | No |
| 1252 | G -> A | Yes |
| 1697 | G -> | No |
| 1697 | G -> A | No |
| 2451 | C -> T | Yes |
| 2585 | G -> A | Yes |

[3336] Variant protein T23657_P16 (SEQ ID NO:1075) according to the present invention has an amino acid sequence as given at the end of the application; it is encoded by transcript(s) T23657_T30 (SEQ ID NO:1023). An alignment is given to the known protein (Solute carrier family 21 member 12 (SEQ ID NO:1062)) at the end of the application. One or more alignments to one or more previously published protein sequences are given at the end of the application. A brief description of the relationship of the variant protein according to the present invention to each such aligned protein is as follows:

[3337] Comparison Report Between T23657_P16 (SEQ ID NO:1075) and S21C_HUMAN (SEQ ID NO:1062):

[3338] 1. An isolated chimeric polypeptide encoding for T23657_P16 (SEQ ID NO:1075), comprising a first amino acid sequence being at least 70%, optionally at least 80%, preferably at least 85%, more preferably at least 90% and most preferably at least 95% homologous to a polypeptide having the sequence MGTSPMADPVPAGRQHGSGLDPTTRLSPLC corresponding to amino acids 1-30 of T23657_P16 (SEQ ID NO:1075), and a second amino acid sequence being at least 90% homologous to SLLPEGHLNLTAPCNAACSCQPEHYSPVCGSDGLMYFSLCHAGCPAATETNVDGQKVYRDCSCIPQNLSS GFGHATAGKCTSTCQRKPLLLVFIFVVIFFTFLSSIPALTATLRCVRDPQRSFALGIQWIVVRILGGIPGPIAFG WVIDKACLLWQDQCGQQGSCLVYQNSAMSRYILIMGLLYKVLGVLFFAIACFLYKPLSESSDGLETCLPS QSSAPDSATDSQLQSSV corresponding to amino acids 491-722 of S21C_HUMAN (SEQ ID NO:1062), which also corresponds to amino acids 31-262 of T23657_P16 (SEQ ID NO:1075), wherein said first amino acid sequence and second amino acid sequence are contiguous and in a sequential order.

[3339] 2. An isolated polypeptide encoding for a head of T23657_P16 (SEQ ID NO:1075), comprising a polypeptide being at least 70%, optionally at least about 80%, preferably at least about 85%, more preferably at least about 90% and most preferably at least about 95% homologous to the sequence MGTSPMADPVPAGRQHGSGLDPTTRLSPLC of T23657_P16 (SEQ ID NO:1075).

[3340] The location of the variant protein was determined according to results from a number of different software programs and analyses, including analyses from SignalP and other specialized programs. The variant protein is believed to be located as follows with regard to the cell: membrane. The protein localization is believed to be membrane because both trans-membrane region prediction programs predicted a trans-membrane region for this protein.

[3341] Variant protein T23657_P16 (SEQ ID NO:1075) also has the following non-silent SNPs (Single Nucleotide Polymorphisms) as listed in Table 53, (given according to their position(s) on the amino acid sequence, with the alternative amino acid(s) listed; the last column indicates whether the SNP is known or not; the presence of known SNPs in variant protein T23657_P16 (SEQ ID NO:1075) sequence provides support for the deduced sequence of this variant protein according to the present invention).

TABLE 53
Amino acid mutations

| SNP position(s) on | Alternative | Previously |
|---|---|---|
| amino acid sequence | amino acid(s) | known SNP? |
| 36 | G -> | No |
| 36 | G -> S | No |

[3342] The glycosylation sites of variant protein T23657_P16 (SEQ ID NO:1075), as compared to the known protein Solute carrier family 21 member 12 (SEQ ID NO:1062), are described in Table 54 (given according to their position(s) on the amino acid sequence in the first column; the second column indicates whether the glycosylation site is present in the variant protein; and the last column indicates whether the position is different on the variant protein).

TABLE 54
Glycosylation site(s)

| Position(s) on known | Present in | Position in |
|---|---|---|
| amino acid sequence | variant protein? | variant protein? |
| 557 | yes | 97 |
| 499 | yes | 39 |

[3343] Variant protein T23657_P16 (SEQ ID NO:1075) is encoded by the following transcript(s): T23657_T30 (SEQ ID NO:1023), for which the sequence(s) is/are given at the end of the application. The coding portion of transcript T23657_T30 (SEQ ID NO:1023) is shown in bold; this coding portion starts at position 184 and ends at position 969. The transcript also has the following SNPs as listed in Table 55 (given according to their position on the nucleotide sequence, with the alternative nucleic acid listed; the last column indicates whether the SNP is known or not; the presence of known SNPs in variant protein T23657_P16 (SEQ ID NO:1075) sequence provides support for the deduced sequence of this variant protein according to the present invention).

TABLE 55
Nucleic acid SNPs

| SNP position on | Alternative | Previously |
|---|---|---|
| nucleotide sequence | nucleic acid | known SNP? |
| 35 | G -> A | Yes |
| 38 | G -> A | Yes |
| 145 | G -> T | Yes |
| 146 | C -> G | Yes |
| 289 | G -> | No |
| 289 | G -> A | No |
| 991 | C -> T | No |
| 994 | C -> | No |
| 1017 | C -> T | Yes |
| 1293 | C -> T | Yes |
| 1306 | C -> T | Yes |

[3344] Variant protein T23657_P17 (SEQ ID NO:1076) according to the present invention has an amino acid sequence as given at the end of the application; it is encoded by transcript(s) T23657_T31 (SEQ ID NO:1024) and T23657_T32 (SEQ ID NO:1025). An alignment is given to the known protein (Solute carrier family 21 member 12 (SEQ ID NO:1062)) at the end of the application. One or more alignments to one or more previously published protein sequences are given at the end of the application. A brief description of the relationship of the variant protein according to the present invention to each such aligned protein is as follows:

[3345] Comparison Report Between T23657_P17 (SEQ ID NO:1076) and S21C_HUMAN (SEQ ID NO:1062):

[3346] 1. An isolated chimeric polypeptide encoding for T23657_P17 (SEQ ID NO:1076), comprising a first amino acid sequence being at least 90% homologous to MYFSLCHAGCPAATETNVDGQKVYRDCSCIPQNLSSGFGHATAGKCTSTCQRKPLLLVFIFVVIFFTFLSSIP ALTATLRCVRDPQRSFALGIQWIVVRILGGIPGPIAFGWVIDKACLLWQDQCGQQGSCLVYQNSAMSRYIL IMGLLYKVLGVLFFAIACFLYKPLSESSDGLETCLPSQSSAPDSATDSQLQSSV corresponding to amino acids 525-722 of S21C_HUMAN (SEQ ID NO:1062), which also corresponds to amino acids 1-198 of T23657_P17 (SEQ ID NO:1076).

[3347] The location of the variant protein was determined according to results from a number of different software programs and analyses, including analyses from SignalP and other specialized programs. The variant protein is believed to be located as follows with regard to the cell: membrane. The protein localization is believed to be membrane because both trans-membrane region prediction programs predicted a trans-membrane region for this protein.

[3348] The glycosylation sites of variant protein T23657_P17 (SEQ ID NO:1076), as compared to the known protein Solute carrier family 21 member 12 (SEQ ID NO:1062), are described in Table 56 (given according to their position(s) on the amino acid sequence in the first column; the second column indicates whether the glycosylation site is present in the variant protein; and the last column indicates whether the position is different on the variant protein).

TABLE 56
Glycosylation site(s)

| Position(s) on known | Present in | Position in |
|---|---|---|
| amino acid sequence | variant protein? | variant protein? |
| 557 | yes | 33 |
| 499 | no | |

[3349] Variant protein T23657_P17 (SEQ ID NO:1076) is encoded by the following transcript(s): T23657_T31 (SEQ ID NO:1024) and T23657_T32 (SEQ ID NO:1025), for which the sequence(s) is/are given at the end of the application.

[3350] The coding portion of transcript T23657_T31 (SEQ ID NO:1024) is shown in bold; this coding portion starts at position 216 and ends at position 809. The transcript also has the following SNPs as listed in Table 57 (given according to their position on the nucleotide sequence, with the alternative nucleic acid listed; the last column indicates whether the SNP is known or not; the presence of known SNPs in variant protein T23657_P17 (SEQ ID NO:1076) sequence provides support for the deduced sequence of this variant protein according to the present invention).

TABLE 57
Nucleic acid SNPs

| SNP position on nucleotide | Alternative | |
|---|---|---|
| sequence | nucleic acid | Previously known SNP? |
| 129 | G -> | No |
| 129 | G -> A | No |
| 831 | C -> T | No |
| 834 | C -> | No |
| 857 | C -> T | Yes |
| 1133 | C -> T | Yes |
| 1146 | C -> T | Yes |

[3351] The coding portion of transcript T23657_T32 (SEQ ID NO:1025) is shown in bold; this coding portion starts at position 174 and ends at position 767. The transcript also has the following SNPs as listed in Table 58 (given according to their position on the nucleotide sequence, with the alternative nucleic acid listed; the last column indicates whether the SNP is known or not; the presence of known SNPs in variant protein T23657_P17 (SEQ ID NO:1076) sequence provides support for the deduced sequence of this variant protein according to the present invention).

TABLE 58
Nucleic acid SNPs

| SNP position on nucleotide | Alternative | |
|---|---|---|
| sequence | nucleic acid | Previously known SNP? |
| 87 | G -> | No |
| 87 | G -> A | No |
| 789 | C -> T | No |
| 792 | C -> | No |
| 815 | C -> T | Yes |
| 1091 | C -> T | Yes |
| 1104 | C -> T | Yes |

[3352] Variant protein T23657_P19 (SEQ ID NO:1077) according to the present invention has an amino acid sequence as given at the end of the application; it is encoded by transcript(s) T23657_T35 (SEQ ID NO:1026). The location of the variant protein was determined according to results from a number of different software programs and analyses, including analyses from SignalP and other specialized programs. The variant protein is believed to be located as follows with regard to the cell: intracellularly. The protein localization is believed to be intracellularly because neither of the trans-membrane region prediction programs predicted a trans-membrane region for this protein. In addition both signal-peptide prediction programs predict that this protein is a non-secreted protein.

[3353] Variant protein T23657_P19 (SEQ ID NO:1077) also has the following non-silent SNPs (Single Nucleotide Polymorphisms) as listed in Table 59, (given according to their position(s) on the amino acid sequence, with the alternative amino acid(s) listed; the last column indicates whether the SNP is known or not; the presence of known SNPs in variant protein T23657_P19 (SEQ ID NO:1077) sequence provides support for the deduced sequence of this variant protein according to the present invention).

TABLE 59
Amino acid mutations

| SNP position(s) on amino acid | Alternative | |
|---|---|---|
| sequence | amino acid(s) | Previously known SNP? |
| 36 | G -> | No |
| 36 | G -> S | No |
| 113 | G -> R | Yes |

[3354] Variant protein T23657_P19 (SEQ ID NO:1077) is encoded by the following transcript(s): T23657_T35 (SEQ ID NO:1026), for which the sequence(s) is/are given at the end of the application. The coding portion of transcript T23657_T35 (SEQ ID NO:1026) is shown in bold; this coding portion starts at position 184 and ends at position 663. The transcript also has the following SNPs as listed in Table 60 (given according to their position on the nucleotide sequence, with the alternative nucleic acid listed; the last column indicates whether the SNP is known or not; the presence of known SNPs in variant protein T23657_P19 (SEQ ID NO:1077) sequence provides support for the deduced sequence of this variant protein according to the present invention).

TABLE 60
Nucleic acid SNPs

| SNP position on nucleotide | Alternative | |
|---|---|---|
| sequence | nucleic acid | Previously known SNP? |
| 35 | G -> A | Yes |
| 38 | G -> A | Yes |
| 145 | G -> T | Yes |
| 146 | C -> G | Yes |
| 289 | G -> | No |
| 289 | G -> A | No |
| 520 | G -> A | Yes |
| 849 | G -> A | Yes |
| 1488 | A -> G | Yes |
| 1774 | G -> A | Yes |
| 2429 | C -> T | Yes |
| 2921 | T -> C | Yes |
| 3181 | C -> T | No |
| 3184 | C -> | No |
| 3207 | C -> T | Yes |
| 3483 | C -> T | Yes |
| 3496 | C -> T | Yes |

[3355] Variant protein T23657_P21 (SEQ ID NO:1078) according to the present invention has an amino acid sequence as given at the end of the application; it is encoded by transcript(s) T23657_T37 (SEQ ID NO:1027). An alignment is given to the known protein (Solute carrier family 21 member 12 (SEQ ID NO:1062)) at the end of the application. One or more alignments to one or more previously published protein sequences are given at the end of the application. A brief description of the relationship of the variant protein according to the present invention to each such aligned protein is as follows:

[3356] Comparison Report Between T23657_P21 (SEQ ID NO:1078) and S21C_HUMAN:

[3357] 1. An isolated chimeric polypeptide encoding for T23657_P21 (SEQ ID NO:1078), comprising a first amino acid sequence being at least 70%, optionally at least 80%, preferably at least 85%, more preferably at least 90% and most preferably at least 95% homologous to a polypeptide having the sequence MWTAR corresponding to amino acids 1-5 of T23657_P21 (SEQ ID NO:1078), and a second amino acid sequence being at least 90% homologous to RCVRDPQRSFALGIQWIVVRILGGIPGPIAFGWVIDKACLLWQDQCGQQGSCLVYQNSAMSRYILIMGLLY KVLGVLFFAIACFLYKPLSESSDGLETCLPSQSSAPDSATDSQLQSSV corresponding to amino acids 604-722 of S21C_HUMAN (SEQ ID NO:1062), which also corresponds to amino acids 6-124 of T23657_P21 (SEQ ID NO:1078), wherein said first amino acid sequence and second amino acid sequence are contiguous and in a sequential order.

[3358] 2. An isolated polypeptide encoding for a head of T23657_P21 (SEQ ID NO:1078), comprising a polypeptide being at least 70%, optionally at least about 80%, preferably at least about 85%, more preferably at least about 90% and most preferably at least about 95% homologous to the sequence MWTAR of T23657_P21 (SEQ ID NO:1078).

[3359] The location of the variant protein was determined according to results from a number of different software programs and analyses, including analyses from SignalP and other specialized programs. The variant protein is believed to be located as follows with regard to the cell: membrane. The protein localization is believed to be membrane because although one of the signal-peptide prediction programs predicts that this protein has a signal peptide (HMM: Signal peptide/NN: NO), both trans-membrane region prediction programs predict that this protein has a trans-membrane region downstream of this signal peptide.

[3360] The glycosylation sites of variant protein T23657_P21 (SEQ ID NO:1078), as compared to the known protein Solute carrier family 21 member 12 (SEQ ID NO:1062), are described in Table 61 (given according to their position(s) on the amino acid sequence in the first column; the second column indicates whether the glycosylation site is present in the variant protein; and the last column indicates whether the position is different on the variant protein).

TABLE 61
Glycosylation site(s)

| Position(s) on known amino acid | Present in | Position in |
|---|---|---|
| sequence | variant protein? | variant protein? |
| 557 | no | |
| 499 | no | |

[3361] Variant protein T23657_P21 (SEQ ID NO:1078) is encoded by the following transcript(s): T23657_T37 (SEQ ID NO:1027), for which the sequence(s) is/are given at the end of the application. The coding portion of transcript T23657_T37 (SEQ ID NO:1027) is shown in bold; this coding portion starts at position 223 and ends at position 594. The transcript also has the following SNPs as listed in Table 62 (given according to their position on the nucleotide sequence, with the alternative nucleic acid listed; the last column indicates whether the SNP is known or not; the presence of known SNPs in variant protein T23657_P21 (SEQ ID NO:1078) sequence provides support for the deduced sequence of this variant protein according to the present invention).

TABLE 62
Nucleic acid SNPs

| SNP position on nucleotide | Alternative | |
|---|---|---|
| sequence | nucleic acid | Previously known SNP? |
| 87 | G -> | No |
| 87 | G -> A | No |
| 616 | C -> T | No |
| 619 | C -> | No |
| 642 | C -> T | Yes |
| 918 | C -> T | Yes |
| 931 | C -> T | Yes |

[3362] Variant protein T23657_P22 (SEQ ID NO:1079) according to the present invention has an amino acid sequence as given at the end of the application; it is encoded by transcript(s) T23657_T38 (SEQ ID NO:1028). The location of the variant protein was determined according to results from a number of different software programs and analyses, including analyses from SignalP and other specialized programs. The variant protein is believed to be located as follows with regard to the cell: unknown.

[3363] Variant protein T23657_P22 (SEQ ID NO:1079) also has the following non-silent SNPs (Single Nucleotide Polymorphisms) as listed in Table 63, (given according to their position(s) on the amino acid sequence, with the alternative amino acid(s) listed; the last column indicates whether the SNP is known or not; the presence of known SNPs in variant protein T23657_P22 (SEQ ID NO:1079) sequence provides support for the deduced sequence of this variant protein according to the present invention).

TABLE 63
Amino acid mutations

| SNP position(s) on amino acid | Alternative | |
|---|---|---|
| sequence | amino acid(s) | Previously known SNP? |
| 119 | L -> P | Yes |
| 125 | T -> P | Yes |

[3364] Variant protein T23657_P22 (SEQ ID NO:1079) is encoded by the following transcript(s): T23657_T38 (SEQ ID NO:1028), for which the sequence(s) is/are given at the end of the application. The coding portion of transcript T23657_T38 (SEQ ID NO:1028) is shown in bold; this coding portion starts at position 55 and ends at position 88889. The transcript also has the following SNPs as listed in Table 64 (given according to their position on the nucleotide sequence, with the alternative nucleic acid listed; the last column indicates whether the SNP is known or not; the presence of known SNPs in variant protein T23657_P22 (SEQ ID NO:1079) sequence provides support for the deduced sequence of this variant protein according to the present invention).

TABLE 64
Nucleic acid SNPs

| SNP position on nucleotide | Alternative | |
|---|---|---|
| sequence | nucleic acid | Previously known SNP? |
| 35 | G -> A | Yes |
| 38 | G -> A | Yes |
| 410 | T -> C | Yes |
| 427 | A -> C | Yes |

[3365] Variant protein T23657_P23 (SEQ ID NO:1080) according to the present invention has an amino acid sequence as given at the end of the application; it is encoded by transcript(s) T23657_T11 (SEQ ID NO:1009). An alignment is given to the known protein (Solute carrier family 21 member 12 (SEQ ID NO:1062)) at the end of the application. One or more alignments to one or more previously published protein sequences are given at the end of the application. A brief description of the relationship of the variant protein according to the present invention to each such aligned protein is as follows:

[3366] Comparison Report Between T23657_P23 (SEQ ID NO:1080) and S21C_HUMAN (SEQ ID NO:1062):

[3367] 1. An isolated chimeric polypeptide encoding for T23657_P23 (SEQ ID NO:1080), comprising a first amino acid sequence being at least 90% homologous to MPLHQLGDKPLTFPSPNSAMENGLDHTPPSRRASPGTPLSPGSLRSAAHSPLDTSKQPLCQLWAEKHGARG THEVRYVSAGQSVACGWWAFAPPCLQVLNTPKGILFFLCAAAFLQGMTVNGFINTVITSLERRYDLHSYQ SGLIASSYDIAACLCLTFVSYFGGSGHKPRWLGWGVLLMGTGSLVFALPHFTAGRYEVELDAGVRTCPAN PGAVCADSTSGLSRYQLVFMLGQFLHGVGATPLYTLGVTYLDENVKSSCSPVYIAIFYTAAILGPAAGYLI GGALLNIYTEMGRRTELTTESPLWVGAWWVGFLGSGAAAFFTAVPILGYPRQLPGSQRYAVMRAAEMH QLKDSSRGEASNPDFGKTIRDLPLSIWLLLKNPTFILLCLAGATEATLITGMSTFSPKFLESQFSLSASEAATL FGYLVVPAGGGGTFLGGFFVNKLRLRGSAVIKFCLFCTVVSLLGILVFSLHCPSVPMAGVTASYGGSLLPE GHLNLTAPCNAACSCQPEHYSPVCGSDGLMYFSLCHAGCPAATETNVDGQKV corresponding to amino acids 1-547 of S21C_HUMAN (SEQ ID NO:1062), which also corresponds to amino acids 1-547 of T23657_P23 (SEQ ID NO:1080), and a second amino acid sequence being at least 70%, optionally at least 80%, preferably at least 85%, more preferably at least 90% and most preferably at least 95% homologous to a polypeptide having the sequence SGAAAYRPCPPLDPGKGPPCLPLVIGAIVGLPRCTETVAVSLRIFPLVLAMHCREMHFNLSEKAPPSGFHIR CNFLYIPQQHSCTNGNSTVSWGRVCACPELSLQHPEAELCRS (SEQ ID NO:1464) corresponding to amino acids 548-661 of T23657_P23 (SEQ ID NO:1080), wherein said first amino acid sequence and second amino acid sequence are contiguous and in a sequential order.

[3368] 2. An isolated polypeptide encoding for a tail of T23657_P23 (SEQ ID NO:1080), comprising a polypeptide being at least 70%, optionally at least about 80%, preferably at least about 85%, more preferably at least about 90% and most preferably at least about 95% homologous to the sequence SGAAAYRPCPPLDPGKGPPCLPLVIGAIVGLPRCTETVAVSLRIFPLVLAMHCREMHFNLSEKAPPSGFHIR CNFLYIPQQHSCTNGNSTVSWGRVCACPELSLQHPEAELCRS (SEQ ID NO:1464) in T23657_P23 (SEQ ID NO:1080).

[3369] The location of the variant protein was determined according to results from a number of different software programs and analyses, including analyses from SignalP and other specialized programs. The variant protein is believed to be located as follows with regard to the cell: membrane. The protein localization is believed to be membrane because both trans-membrane region prediction programs predicted a trans-membrane region for this protein.

[3370] Variant protein T23657_P23 (SEQ ID NO:1080) also has the following non-silent SNPs (Single Nucleotide Polymorphisms) as listed in Table 65, (given according to their position(s) on the amino acid sequence, with the alternative amino acid(s) listed; the last column indicates whether the SNP is known or not; the presence of known SNPs in variant protein T23657_P23 (SEQ ID NO:1080) sequence provides support for the deduced sequence of this variant protein according to the present invention).

TABLE 65
Amino acid mutations

| SNP position(s) on amino acid | Alternative | |
|---|---|---|
| sequence | amino acid(s) | Previously known SNP? |
| 78 | V -> I | Yes |
| 206 | R -> K | Yes |
| 496 | G -> | No |
| 496 | G -> S | No |
| 573 | G -> R | Yes |

[3371] The glycosylation sites of variant protein T23657_P23 (SEQ ID NO:1080), as compared to the known protein Solute carrier family 21 member 12 (SEQ ID NO:1062), are described in Table 66 (given according to their position(s) on the amino acid sequence in the first column; the second column indicates whether the glycosylation site is present in the variant protein; and the last column indicates whether the position is different on the variant protein).

TABLE 66
Glycosylation site(s)

| Position(s) on known amino acid | Present in | Position in |
|---|---|---|
| sequence | variant protein? | variant protein? |
| 557 | no | |
| 499 | yes | 499 |

[3372] Variant protein T23657_P23 (SEQ ID NO:1080) is encoded by the following transcript(s): T23657_T11 (SEQ ID NO:1009), for which the sequence(s) is/are given at the end of the application. The coding portion of transcript T23657_T11 (SEQ ID NO:1009) is shown in bold; this coding portion starts at position 212 and ends at position 2195. The transcript also has the following SNPs as listed in Table 67 (given according to their position on the nucleotide sequence, with the alternative nucleic acid listed; the last column indicates whether the SNP is known or not; the presence of known SNPs in variant protein T23657_P23 (SEQ ID NO:1080) sequence provides support for the deduced sequence of this variant protein according to the present invention).

TABLE 67
Nucleic acid SNPs

| SNP position on nucleotide | Alternative | |
|---|---|---|
| sequence | nucleic acid | Previously known SNP? |
| 132 | G -> A | Yes |
| 179 | G -> | No |
| 180 | A -> T | No |
| 443 | G -> A | Yes |
| 760 | G -> T | Yes |
| 828 | G -> A | Yes |
| 894 | -> G | No |
| 894 | -> T | No |
| 1252 | G -> A | Yes |
| 1697 | G -> | No |
| 1697 | G -> A | No |
| 1928 | G -> A | Yes |
| 2257 | G -> A | Yes |
| 2792 | C -> T | No |
| 2795 | C -> | No |
| 2818 | C -> T | Yes |
| 3094 | C -> T | Yes |
| 3107 | C -> T | Yes |

[3373] As noted above, cluster T23657 features 33 segment(s), which were listed in Table 2 above and for which the sequence(s) are given at the end of the application. These segment(s) are portions of nucleic acid sequence(s) which are described herein separately because they are of particular interest. A description of each segment according to the present invention is now provided.

[3374] Segment cluster T23657_node_{—}2 (SEQ ID NO:1029) according to the present invention is supported by 30 libraries. The number of libraries was determined as previously described. This segment can be found in the following transcript(s): T23657_T0 (SEQ ID NO:998), T23657_T1 (SEQ ID NO:999), T23657_T2 (SEQ ID NO:1000), T23657_T3 (SEQ ID NO:1001), T23657_T4 (SEQ ID NO:1002), T23657_T5 (SEQ ID NO:1003), T23657_T6 (SEQ ID NO:1004), T23657_T7 (SEQ ID NO:1005), T23657_T8 (SEQ ID NO:1006), T23657_T9 (SEQ ID NO:1007), T23657_T10 (SEQ ID NO:1008), T23657_T11 (SEQ ID NO:1009), T23657_T12 (SEQ ID NO:1001), T23657_T13 (SEQ ID NO:1011), T23657_T14 (SEQ ID NO:1012), T23657_T15 (SEQ ID NO:1013), T23657_T16 (SEQ ID NO:1014), T23657_T17 (SEQ ID NO:1015), T23657_T19 (SEQ ID NO:1016), T23657_T20 (SEQ ID NO:1017), T23657_T21 (SEQ ID NO:1018), T23657_T22 (SEQ ID NO:1019), T23657_T23 (SEQ ID NO:1020), T23657_T24 (SEQ ID NO:1021) and T23657_T28 (SEQ ID NO:1022). Table 68 below describes the starting and ending position of this segment on each transcript.

TABLE 68
Segment location on transcripts

| | Segment | Segment |
|---|---|---|
| Transcript name | starting position | ending position |
| T23657_T0 (SEQ ID NO: 998) | 116 | 292 |
| T23657_T1 (SEQ ID NO: 999) | 116 | 292 |
| T23657_T2 (SEQ ID NO: 1000) | 116 | 292 |
| T23657_T3 (SEQ ID NO: 1001) | 116 | 292 |
| T23657_T4 (SEQ ID NO: 1002) | 116 | 292 |
| T23657_T5 (SEQ ID NO: 1003) | 116 | 292 |
| T23657_T6 (SEQ ID NO: 1004) | 116 | 292 |
| T23657_T7 (SEQ ID NO: 1005) | 116 | 292 |
| T23657_T8 (SEQ ID NO: 1006) | 116 | 292 |
| T23657_T9 (SEQ ID NO: 1007) | 116 | 292 |
| T23657_T10 (SEQ ID NO: 1008) | 116 | 292 |
| T23657_T11 (SEQ ID NO: 1009) | 116 | 292 |
| T23657_T12 (SEQ ID NO: 1010) | 116 | 292 |
| T23657_T13 (SEQ ID NO: 1011) | 116 | 292 |
| T23657_T14 (SEQ ID NO: 1012) | 116 | 292 |
| T23657_T15 (SEQ ID NO: 1013) | 116 | 292 |
| T23657_T16 (SEQ ID NO: 1014) | 116 | 292 |
| T23657_T17 (SEQ ID NO: 1015) | 116 | 292 |
| T23657_T19 (SEQ ID NO: 1016) | 116 | 292 |
| T23657_T20 (SEQ ID NO: 1017) | 116 | 292 |
| T23657_T21 (SEQ ID NO: 1018) | 116 | 292 |
| T23657_T22 (SEQ ID NO: 1019) | 116 | 292 |
| T23657_T23 (SEQ ID NO: 1020) | 116 | 292 |
| T23657_T24 (SEQ ID NO: 1021) | 116 | 292 |
| T23657_T28 (SEQ ID NO: 1022) | 116 | 292 |

[3375] Segment cluster T23657_node_{—}3 (SEQ ID NO:1030) according to the present invention is supported by 54 libraries. The number of libraries was determined as previously described. This segment can be found in the following transcript(s): T23657_T0 (SEQ ID NO:998), T23657_T1 (SEQ ID NO:999), T23657_T2 (SEQ ID NO:1000), T23657_T3 (SEQ ID NO:1001), T23657_T4 (SEQ ID NO:1002), T23657_T5 (SEQ ID NO:1003), T23657_T6 (SEQ ID NO:1004), T23657_T7 (SEQ ID NO:1005), T23657_T8 (SEQ ID NO:1006), T23657_T9 (SEQ ID NO:1007), T23657_T10 (SEQ ID NO:1008), T23657_T11 (SEQ ID NO:1009), T23657_T12 (SEQ ID NO:1010), T23657_T13 (SEQ ID NO:1011), T23657_T14 (SEQ ID NO:1012), T23657_T15 (SEQ ID NO:1013), T23657_T16 (SEQ ID NO:1014), T23657_T17 (SEQ ID NO:1015), T23657_T19 (SEQ ID NO:1016), T23657_T20 (SEQ ID NO:1017), T23657_T21 (SEQ ID NO:1018), T23657_T22 (SEQ ID NO:1019), T23657_T23 (SEQ ID NO:1020), T23657_T24 (SEQ ID NO:1021) and T23657_T28 (SEQ ID NO:1022). Table 69 below describes the starting and ending position of this segment on each transcript.

TABLE 69
Segment location on transcripts

| | Segment | Segment |
|---|---|---|
| Transcript name | starting position | ending position |
| T23657_T0 (SEQ ID NO: 998) | 293 | 938 |
| T23657_T1 (SEQ ID NO: 999) | 293 | 938 |
| T23657_T2 (SEQ ID NO: 1000) | 293 | 938 |
| T23657_T3 (SEQ ID NO: 1001) | 293 | 938 |
| T23657_T4 (SEQ ID NO: 1002) | 293 | 938 |
| T23657_T5 (SEQ ID NO: 1003) | 293 | 938 |
| T23657_T6 (SEQ ID NO: 1004) | 293 | 938 |
| T23657_T7 (SEQ ID NO: 1005) | 293 | 938 |
| T23657_T8 (SEQ ID NO: 1006) | 293 | 938 |
| T23657_T9 (SEQ ID NO: 1007) | 293 | 938 |
| T23657_T10 (SEQ ID NO: 1008) | 293 | 938 |
| T23657_T11 (SEQ ID NO: 1009) | 293 | 938 |
| T23657_T12 (SEQ ID NO: 1010) | 293 | 938 |
| T23657_T13 (SEQ ID NO: 1011) | 293 | 938 |
| T23657_T14 (SEQ ID NO: 1012) | 293 | 938 |
| T23657_T15 (SEQ ID NO: 1013) | 293 | 938 |
| T23657_T16 (SEQ ID NO: 1014) | 293 | 938 |
| T23657_T17 (SEQ ID NO: 1015) | 293 | 938 |
| T23657_T19 (SEQ ID NO: 1016) | 293 | 938 |
| T23657_T20 (SEQ ID NO: 1017) | 293 | 938 |
| T23657_T21 (SEQ ID NO: 1018) | 293 | 938 |
| T23657_T22 (SEQ ID NO: 1019) | 293 | 938 |
| T23657_T23 (SEQ ID NO: 1020) | 293 | 938 |
| T23657_T24 (SEQ ID NO: 1021) | 293 | 938 |
| T23657_T28 (SEQ ID NO: 1022) | 293 | 938 |

[3376] Segment cluster T23657_node_{—}8 (SEQ ID NO:1031) according to the present invention is supported by 25 libraries. The number of libraries was determined as previously described. This segment can be found in the following transcript(s): T23657_T0 (SEQ ID NO:998), T23657_T1 (SEQ ID NO:999), T23657_T2 (SEQ ID NO:1000), T23657_T3 (SEQ ID NO:1001), T23657_T4 (SEQ ID NO:1002), T23657_T5 (SEQ ID NO:1003), T23657_T6 (SEQ ID NO:1004), T23657_T7 (SEQ ID NO:1005), T23657_T8 (SEQ ID NO:1006), T23657_T9 (SEQ ID NO:1007), T23657_T10 (SEQ ID NO:1008), T23657_T11 (SEQ ID NO:1009), T23657_T12 (SEQ ID NO:1010), T23657_T13 (SEQ ID NO:1011), T23657_T14 (SEQ ID NO:1012), T23657_T15 (SEQ ID NO:1013), T23657_T16 (SEQ ID NO:1014), T23657_T17 (SEQ ID NO:1015), T23657_T19 (SEQ ID NO:1016), T23657_T20 (SEQ ID NO:1017), T23657_T21 (SEQ ID NO:1018), T23657_T22 (SEQ ID NO:1019), T23657_T23 (SEQ ID NO:1020), T23657_T24 (SEQ ID NO:1021) and T23657_T28 (SEQ ID NO:1022). Table 70 below describes the starting and ending position of this segment on each transcript.

TABLE 70
Segment location on transcripts

| | Segment | Segment |
|---|---|---|
| Transcript name | starting position | ending position |
| T23657_T0 (SEQ ID NO: 998) | 1099 | 1220 |
| T23657_T1 (SEQ ID NO: 999) | 1099 | 1220 |
| T23657_T2 (SEQ ID NO: 1000) | 1099 | 1220 |
| T23657_T3 (SEQ ID NO: 1001) | 1099 | 1220 |
| T23657_T4 (SEQ ID NO: 1002) | 1099 | 1220 |
| T23657_T5 (SEQ ID NO: 1003) | 1099 | 1220 |
| T23657_T6 (SEQ ID NO: 1004) | 1099 | 1220 |
| T23657_T7 (SEQ ID NO: 1005) | 1099 | 1220 |
| T23657_T8 (SEQ ID NO: 1006) | 1099 | 1220 |
| T23657_T9 (SEQ ID NO: 1007) | 1099 | 1220 |
| T23657_T10 (SEQ ID NO: 1008) | 1099 | 1220 |
| T23657_T11 (SEQ ID NO: 1009) | 1099 | 1220 |
| T23657_T12 (SEQ ID NO: 1010) | 1099 | 1220 |
| T23657_T13 (SEQ ID NO: 1011) | 1099 | 1220 |
| T23657_T14 (SEQ ID NO: 1012) | 1008 | 1129 |
| T23657_T15 (SEQ ID NO: 1013) | 1099 | 1220 |
| T23657_T16 (SEQ ID NO: 1014) | 1099 | 1220 |
| T23657_T17 (SEQ ID NO: 1015) | 1099 | 1220 |
| T23657_T19 (SEQ ID NO: 1016) | 1099 | 1220 |
| T23657_T20 (SEQ ID NO: 1017) | 1099 | 1220 |
| T23657_T21 (SEQ ID NO: 1018) | 1099 | 1220 |
| T23657_T22 (SEQ ID NO: 1019) | 1099 | 1220 |
| T23657_T23 (SEQ ID NO: 1020) | 1099 | 1220 |
| T23657_T24 (SEQ ID NO: 1021) | 1099 | 1220 |
| T23657_T28 (SEQ ID NO: 1022) | 1099 | 1220 |

[3377] Segment cluster T23657_node_{—}16 (SEQ ID NO:1032) according to the present invention is supported by 39 libraries. The number of libraries was determined as previously described. This segment can be found in the following transcript(s): T23657_T0 (SEQ ID NO:998), T23657_T1 (SEQ ID NO:999), T23657_T2 (SEQ ID NO:1000), T23657_T3 (SEQ ID NO:1001), T23657_T4 (SEQ ID NO:1002), T23657_T5 (SEQ ID NO:1003), T23657_T6 (SEQ ID NO:1004), T23657_T7 (SEQ ID NO:1005), T23657_T8 (SEQ ID NO:1006), T23657_T9 (SEQ ID NO:1007), T23657_T10 (SEQ ID NO:1008), T23657_T11 (SEQ ID NO:1009), T23657_T12 (SEQ ID NO:1010), T23657_T13 (SEQ ID NO:1011), T23657_T14 (SEQ ID NO:1012), T23657_T15 (SEQ ID NO:1013), T23657_T16 (SEQ ID NO:1014), T23657_T17 (SEQ ID NO:1015), T23657_T19 (SEQ ID NO:1016), T23657_T20 (SEQ ID NO:1017), T23657_T21 (SEQ ID NO:1018), T23657_T22 (SEQ ID NO:1019), T23657_T23 (SEQ ID NO:1020), T23657_T24 (SEQ ID NO:1021) and T23657_T28 (SEQ ID NO:1022). Table 71 below describes the starting and ending position of this segment on each transcript.

TABLE 71
Segment location on transcripts

| | Segment | Segment |
|---|---|---|
| Transcript name | starting position | ending position |
| T23657_T0 (SEQ ID NO: 998) | 1333 | 1487 |
| T23657_T1 (SEQ ID NO: 999) | 1333 | 1487 |
| T23657_T2 (SEQ ID NO: 1000) | 1333 | 1487 |
| T23657_T3 (SEQ ID NO: 1001) | 1333 | 1487 |
| T23657_T4 (SEQ ID NO: 1002) | 1333 | 1487 |
| T23657_T5 (SEQ ID NO: 1003) | 1333 | 1487 |
| T23657_T6 (SEQ ID NO: 1004) | 1333 | 1487 |
| T23657_T7 (SEQ ID NO: 1005) | 1333 | 1487 |
| T23657_T8 (SEQ ID NO: 1006) | 1333 | 1487 |
| T23657_T9 (SEQ ID NO: 1007) | 1333 | 1487 |
| T23657_T10 (SEQ ID NO: 1008) | 1333 | 1487 |
| T23657_T11 (SEQ ID NO: 1009) | 1333 | 1487 |
| T23657_T12 (SEQ ID NO: 1010) | 1333 | 1487 |
| T23657_T13 (SEQ ID NO: 1011) | 1333 | 1487 |
| T23657_T14 (SEQ ID NO: 1012) | 1242 | 1396 |
| T23657_T15 (SEQ ID NO: 1013) | 1333 | 1487 |
| T23657_T16 (SEQ ID NO: 1014) | 1333 | 1487 |
| T23657_T17 (SEQ ID NO: 1015) | 1333 | 1487 |
| T23657_T19 (SEQ ID NO: 1016) | 1333 | 1487 |
| T23657_T20 (SEQ ID NO: 1017) | 1333 | 1487 |
| T23657_T21 (SEQ ID NO: 1018) | 1333 | 1487 |
| T23657_T22 (SEQ ID NO: 1019) | 1333 | 1487 |
| T23657_T23 (SEQ ID NO: 1020) | 1333 | 1487 |
| T23657_T24 (SEQ ID NO: 1021) | 1333 | 1487 |
| T23657_T28 (SEQ ID NO: 1022) | 1333 | 1487 |

[3378] Segment cluster T23657_node_{—}18 (SEQ ID NO:1033) according to the present invention is supported by 40 libraries. The number of libraries was determined as previously described. This segment can be found in the following transcript(s): T23657_T0 (SEQ ID NO:998), T23657_T1 (SEQ ID NO:999), T23657_T2 (SEQ ID NO:1000), T23657_T3 (SEQ ID NO:1001), T23657_T4 (SEQ ID NO:1002), T23657_T5 (SEQ ID NO:1003), T23657_T6 (SEQ ID NO:1004), T23657_T7 (SEQ ID NO:1005), T23657_T8 (SEQ ID NO:1006), T23657_T9 (SEQ ID NO:1007), T23657_T10 (SEQ ID NO:1008), T23657_T11 (SEQ ID NO:1009), T23657_T12 (SEQ ID NO:1010), T23657_T13 (SEQ ID NO:1011), T23657_T14 (SEQ ID NO:1012), T23657_T15 (SEQ ID NO:1013), T23657_T16 (SEQ ID NO:1014), T23657_T17 (SEQ ID NO:1015), T23657_T19 (SEQ ID NO:1016), T23657_T20 (SEQ ID NO:1017), T23657_T21 (SEQ ID NO:1018), T23657_T22 (SEQ ID NO:1019), T23657_T24 (SEQ ID NO:1021) and T23657_T28 (SEQ ID NO:1022). Table 72 below describes the starting and ending position of this segment on each transcript.

TABLE 72
Segment location on transcripts

| | Segment | Segment |
|---|---|---|
| Transcript name | starting position | ending position |
| T23657_T0 (SEQ ID NO: 998) | 1488 | 1683 |
| T23657_T1 (SEQ ID NO: 999) | 1488 | 1683 |
| T23657_T2 (SEQ ID NO: 1000) | 1488 | 1683 |
| T23657_T3 (SEQ ID NO: 1001) | 1488 | 1683 |
| T23657_T4 (SEQ ID NO: 1002) | 1488 | 1683 |
| T23657_T5 (SEQ ID NO: 1003) | 1488 | 1683 |
| T23657_T6 (SEQ ID NO: 1004) | 1488 | 1683 |
| T23657_T7 (SEQ ID NO: 1005) | 1488 | 1683 |
| T23657_T8 (SEQ ID NO: 1006) | 1488 | 1683 |
| T23657_T9 (SEQ ID NO: 1007) | 1488 | 1683 |
| T23657_T10 (SEQ ID NO: 1008) | 1488 | 1683 |
| T23657_T11 (SEQ ID NO: 1009) | 1488 | 1683 |
| T23657_T12 (SEQ ID NO: 1010) | 1488 | 1683 |
| T23657_T13 (SEQ ID NO: 1011) | 1488 | 1683 |
| T23657_T14 (SEQ ID NO: 1012) | 1397 | 1592 |
| T23657_T15 (SEQ ID NO: 1013) | 1488 | 1683 |
| T23657_T16 (SEQ ID NO: 1014) | 1488 | 1683 |
| T23657_T17 (SEQ ID NO: 1015) | 1488 | 1683 |
| T23657_T19 (SEQ ID NO: 1016) | 1488 | 1683 |
| T23657_T20 (SEQ ID NO: 1017) | 1488 | 1683 |
| T23657_T21 (SEQ ID NO: 1018) | 1488 | 1683 |
| T23657_T22 (SEQ ID NO: 1019) | 1488 | 1683 |
| T23657_T24 (SEQ ID NO: 1021) | 1488 | 1683 |
| T23657_T28 (SEQ ID NO: 1022) | 1488 | 1683 |

[3379] Segment cluster T23657_node_{—}23 (SEQ ID NO:1034) according to the present invention is supported by 4 libraries. The number of libraries was determined as previously described. This segment can be found in the following transcript(s): T23657_T30 (SEQ ID NO:1023) and T23657_T35 (SEQ ID NO:1026). Table 73 below describes the starting and ending position of this segment on each transcript.

TABLE 73
Segment location on transcripts

| | Segment | Segment |
|---|---|---|
| Transcript name | starting position | ending position |
| T23657_T30 (SEQ ID NO: 1023) | 118 | 275 |
| T23657_T35 (SEQ ID NO: 1026) | 118 | 275 |

[3380] Segment cluster T23657_node_{—}24 (SEQ ID NO:1035) according to the present invention is supported by 42 libraries. The number of libraries was determined as previously described. This segment can be found in the following transcript(s): T23657_T0 (SEQ ID NO:998), T23657_T1 (SEQ ID NO:999), T23657_T2 (SEQ ID NO:1000), T23657_T3 (SEQ ID NO:1001), T23657_T4 (SEQ ID NO:1002), T23657_T5 (SEQ ID NO:1003), T23657_T6 (SEQ ID NO:1004), T23657_T7 (SEQ ID NO:1005), T23657_T8 (SEQ ID NO:1006), T23657_T9 (SEQ ID NO:1007), T23657_T10 (SEQ ID NO:1008), T23657_T11 (SEQ ID NO:1009), T23657_T12 (SEQ ID NO:1010), T23657_T13 (SEQ ID NO:1011), T23657_T14 (SEQ ID NO:1012), T23657_T15 (SEQ ID NO:1013), T23657_T16 (SEQ ID NO:1014), T23657_T17 (SEQ ID NO:1015), T23657_T19 (SEQ ID NO:1016), T23657_T20 (SEQ ID NO:1017), T23657_T21 (SEQ ID NO:1018), T23657_T22 (SEQ ID NO:1019), T23657_T23 (SEQ ID NO:1020), T23657_T24 (SEQ ID NO:1021), T23657_T28 (SEQ ID NO:1022), T23657_T30 (SEQ ID NO:1023), T23657_T31 (SEQ ID NO:1024), T23657_T32 (SEQ ID NO:1025), T23657_T35 (SEQ ID NO:1026) and T23657_T37 (SEQ ID NO:1027). Table 74 below describes the starting and ending position of this segment on each transcript.

TABLE 74
Segment location on transcripts

| | Segment | Segment |
|---|---|---|
| Transcript name | starting position | ending position |
| T23657_T0 (SEQ ID NO: 998) | 1684 | 1808 |
| T23657_T1 (SEQ ID NO: 999) | 1684 | 1808 |
| T23657_T2 (SEQ ID NO: 1000) | 1684 | 1808 |
| T23657_T3 (SEQ ID NO: 1001) | 1684 | 1808 |
| T23657_T4 (SEQ ID NO: 1002) | 1684 | 1808 |
| T23657_T5 (SEQ ID NO: 1003) | 1684 | 1808 |
| T23657_T6 (SEQ ID NO: 1004) | 1684 | 1808 |
| T23657_T7 (SEQ ID NO: 1005) | 1684 | 1808 |
| T23657_T8 (SEQ ID NO: 1006) | 1684 | 1808 |
| T23657_T9 (SEQ ID NO: 1007) | 1684 | 1808 |
| T23657_T10 (SEQ ID NO: 1008) | 1684 | 1808 |
| T23657_T11 (SEQ ID NO: 1009) | 1684 | 1808 |
| T23657_T12 (SEQ ID NO: 1010) | 1684 | 1808 |
| T23657_T13 (SEQ ID NO: 1011) | 1684 | 1808 |
| T23657_T14 (SEQ ID NO: 1012) | 1593 | 1717 |
| T23657_T15 (SEQ ID NO: 1013) | 1684 | 1808 |
| T23657_T16 (SEQ ID NO: 1014) | 1684 | 1808 |
| T23657_T17 (SEQ ID NO: 1015) | 1684 | 1808 |
| T23657_T19 (SEQ ID NO: 1016) | 1684 | 1808 |
| T23657_T20 (SEQ ID NO: 1017) | 1684 | 1808 |
| T23657_T21 (SEQ ID NO: 1018) | 1684 | 1808 |
| T23657_T22 (SEQ ID NO: 1019) | 1684 | 1808 |
| T23657_T23 (SEQ ID NO: 1020) | 1488 | 1612 |
| T23657_T24 (SEQ ID NO: 1021) | 1684 | 1808 |
| T23657_T28 (SEQ ID NO: 1022) | 1684 | 1808 |
| T23657_T30 (SEQ ID NO: 1023) | 276 | 400 |
| T23657_T31 (SEQ ID NO: 1024) | 116 | 240 |
| T23657_T32 (SEQ ID NO: 1025) | 74 | 198 |
| T23657_T35 (SEQ ID NO: 1026) | 276 | 400 |
| T23657_T37 (SEQ ID NO: 1027) | 74 | 198 |

[3381] Segment cluster T23657_node_{—}27 (SEQ ID NO:1036) according to the present invention is supported by 38 libraries. The number of libraries was determined as previously described. This segment can be found in the following transcript(s): T23657_T0 (SEQ ID NO:998), T23657_T1 (SEQ ID NO:999), T23657_T2 (SEQ ID NO:1000), T23657_T3 (SEQ ID NO:1001), T23657_T4 (SEQ ID NO:1002), T23657_T5 (SEQ ID NO:1003), T23657_T6 (SEQ ID NO:1004), T23657_T7 (SEQ ID NO:1005), T23657_T8 (SEQ ID NO:1006), T23657_T9 (SEQ ID NO:1007), T23657_T10 (SEQ ID NO:1008), T23657_T11 (SEQ ID NO:1009), T23657_T14 (SEQ ID NO:1012), T23657_T15 (SEQ ID NO:1013), T23657_T16 (SEQ ID NO:1014), T23657_T20 (SEQ ID NO:1017), T23657_T21 (SEQ ID NO:1018), T23657_T24 (SEQ ID NO:1021), T23657_T30 (SEQ ID NO:1023), T23657_T31 (SEQ ID NO:1024), T23657_T32 (SEQ ID NO:1025) and T23657_T35 (SEQ ID NO:1026). Table 75 below describes the starting and ending position of this segment on each transcript.

TABLE 75
Segment location on transcripts

| | Segment | Segment |
|---|---|---|
| Transcript name | starting position | ending position |
| T23657_T0 (SEQ ID NO: 998) | 1850 | 1992 |
| T23657_T1 (SEQ ID NO: 999) | 1850 | 1992 |
| T23657_T2 (SEQ ID NO: 1000) | 1850 | 1992 |
| T23657_T3 (SEQ ID NO: 1001) | 1850 | 1992 |
| T23657_T4 (SEQ ID NO: 1002) | 1850 | 1992 |
| T23657_T5 (SEQ ID NO: 1003) | 1850 | 1992 |
| T23657_T6 (SEQ ID NO: 1004) | 1850 | 1992 |
| T23657_T7 (SEQ ID NO: 1005) | 1850 | 1992 |
| T23657_T8 (SEQ ID NO: 1006) | 1850 | 1992 |
| T23657_T9 (SEQ ID NO: 1007) | 1850 | 1992 |
| T23657_T10 (SEQ ID NO: 1008) | 1951 | 2093 |
| T23657_T11 (SEQ ID NO: 1009) | 1951 | 2093 |
| T23657_T14 (SEQ ID NO: 1012) | 1759 | 1901 |
| T23657_T15 (SEQ ID NO: 1013) | 1850 | 1992 |
| T23657_T16 (SEQ ID NO: 1014) | 1850 | 1992 |
| T23657_T20 (SEQ ID NO: 1017) | 1850 | 1992 |
| T23657_T21 (SEQ ID NO: 1018) | 1850 | 1992 |
| T23657_T24 (SEQ ID NO: 1021) | 1850 | 1992 |
| T23657_T30 (SEQ ID NO: 1023) | 442 | 584 |
| T23657_T31 (SEQ ID NO: 1024) | 282 | 424 |
| T23657_T32 (SEQ ID NO: 1025) | 240 | 382 |
| T23657_T35 (SEQ ID NO: 1026) | 543 | 685 |

[3382] Segment cluster T23657_node_{—}29 (SEQ ID NO:1037) according to the present invention is supported by 12 libraries. The number of libraries was determined as previously described. This segment can be found in the following transcript(s): T23657_T5 (SEQ ID NO:1003), T23657_T6 (SEQ ID NO:1004), T23657_T10 (SEQ ID NO:1008), T23657_T11 (SEQ ID NO:1009) and T23657_T35 (SEQ ID NO:1026). Table 76 below describes the starting and ending position of this segment on each transcript.

TABLE 76
Segment location on transcripts

| | Segment | Segment |
|---|---|---|
| Transcript name | starting position | ending position |
| T23657_T5 (SEQ ID NO: 1003) | 2023 | 2278 |
| T23657_T6 (SEQ ID NO: 1004) | 2023 | 2278 |
| T23657_T10 (SEQ ID NO: 1008) | 2124 | 2379 |
| T23657_T11 (SEQ ID NO: 1009) | 2124 | 2379 |
| T23657_T35 (SEQ ID NO: 1026) | 716 | 971 |

[3383] Segment cluster T23657_node_{—}34 (SEQ ID NO:1038) according to the present invention is supported by 65 libraries. The number of libraries was determined as previously described. This segment can be found in the following transcript(s): T23657_T0 (SEQ ID NO:998), T23657_T1 (SEQ ID NO:999), T23657_T2 (SEQ ID NO:1000), T23657_T3 (SEQ ID NO:1001), T23657_T4 (SEQ ID NO:1002), T23657_T5 (SEQ ID NO:1003), T23657_T6 (SEQ ID NO:1004), T23657_T7 (SEQ ID NO:1005), T23657_T8 (SEQ ID NO:1006), T23657_T9 (SEQ ID NO:1007), T23657_T10 (SEQ ID NO:1008), T23657_T11 (SEQ ID NO:1009), T23657_T12 (SEQ ID NO:1010), T23657_T13 (SEQ ID NO:1011), T23657_T14 (SEQ ID NO:1012), T23657_T15 (SEQ ID NO:1013), T23657_T16 (SEQ ID NO:1014), T23657_T17 (SEQ ID NO:1015), T23657_T19 (SEQ ID NO:1016), T23657_T20 (SEQ ID NO:1017), T23657_T21 (SEQ ID NO:1018), T23657_T22 (SEQ ID NO:1019), T23657_T23 (SEQ ID NO:1020), T23657_T24 (SEQ ID NO:1021), T23657_T28 (SEQ ID NO:1022), T23657_T30 (SEQ ID NO:1023), T23657_T31 (SEQ ID NO:1024), T23657_T32 (SEQ ID NO:1025), T23657_T35 (SEQ ID NO:1026), T23657_T37 (SEQ ID NO:1027) and T23657_T38 (SEQ ID NO:1028). Table 77 below describes the starting and ending position of this segment on each transcript.

TABLE 77
Segment location on transcripts

| | Segment | Segment |
|---|---|---|
| Transcript name | starting position | ending position |
| T23657_T0 (SEQ ID NO: 998) | 2088 | 2236 |
| T23657_T1 (SEQ ID NO: 999) | 2088 | 2236 |
| T23657_T2 (SEQ ID NO: 1000) | 2088 | 2236 |
| T23657_T3 (SEQ ID NO: 1001) | 2088 | 2236 |
| T23657_T4 (SEQ ID NO: 1002) | 2151 | 2299 |
| T23657_T5 (SEQ ID NO: 1003) | 2380 | 2528 |
| T23657_T6 (SEQ ID NO: 1004) | 2443 | 2591 |
| T23657_T7 (SEQ ID NO: 1005) | 2088 | 2236 |
| T23657_T8 (SEQ ID NO: 1006) | 2088 | 2236 |
| T23657_T9 (SEQ ID NO: 1007) | 2088 | 2236 |
| T23657_T10 (SEQ ID NO: 1008) | 2481 | 2629 |
| T23657_T11 (SEQ ID NO: 1009) | 2481 | 2629 |
| T23657_T12 (SEQ ID NO: 1010) | 1915 | 2063 |
| T23657_T13 (SEQ ID NO: 1011) | 1945 | 2093 |
| T23657_T14 (SEQ ID NO: 1012) | 1997 | 2145 |
| T23657_T15 (SEQ ID NO: 1013) | 2151 | 2299 |
| T23657_T16 (SEQ ID NO: 1014) | 2088 | 2236 |
| T23657_T17 (SEQ ID NO: 1015) | 1915 | 2063 |
| T23657_T19 (SEQ ID NO: 1016) | 1945 | 2093 |
| T23657_T20 (SEQ ID NO: 1017) | 2088 | 2236 |
| T23657_T21 (SEQ ID NO: 1018) | 2088 | 2236 |
| T23657_T22 (SEQ ID NO: 1019) | 1915 | 2063 |
| T23657_T23 (SEQ ID NO: 1020) | 1719 | 1867 |
| T23657_T24 (SEQ ID NO: 1021) | 2088 | 2236 |
| T23657_T28 (SEQ ID NO: 1022) | 1945 | 2093 |
| T23657_T30 (SEQ ID NO: 1023) | 680 | 828 |
| T23657_T31 (SEQ ID NO: 1024) | 520 | 668 |
| T23657_T32 (SEQ ID NO: 1025) | 478 | 626 |
| T23657_T35 (SEQ ID NO: 1026) | 1073 | 1221 |
| T23657_T37 (SEQ ID NO: 1027) | 305 | 453 |
| T23657_T38 (SEQ ID NO: 1028) | 254 | 402 |

[3384] Segment cluster T23657_node_{—}37 (SEQ ID NO:1039) according to the present invention is supported by 2 libraries. The number of libraries was determined as previously described. This segment can be found in the following transcript(s): T23657_T3 (SEQ ID NO:1001), T23657_T4 (SEQ ID NO:1002), T23657_T6 (SEQ ID NO:1004), T23657_T9 (SEQ ID NO:1007), T23657_T13 (SEQ ID NO:1011) and T23657_T21 (SEQ ID NO:1018). Table 78 below describes the starting and ending position of this segment on each transcript.

TABLE 78
Segment location on transcripts

| | Segment | Segment |
|---|---|---|
| Transcript name | starting position | ending position |
| T23657_T3 (SEQ ID NO: 1001) | 2237 | 2376 |
| T23657_T4 (SEQ ID NO: 1002) | 2300 | 2439 |
| T23657_T6 (SEQ ID NO: 1004) | 2592 | 2731 |
| T23657_T9 (SEQ ID NO: 1007) | 2237 | 2376 |
| T23657_T13 (SEQ ID NO: 1011) | 2094 | 2233 |
| T23657_T21 (SEQ ID NO: 1018) | 2237 | 2376 |

[3385] Segment cluster T23657_node_{—}38 (SEQ ID NO:1040) according to the present invention is supported by 2 libraries. The number of libraries was determined as previously described. This segment can be found in the following transcript(s): T23657_T3 (SEQ ID NO:1001), T23657_T4 (SEQ ID NO:1002), T23657_T6 (SEQ ID NO:1004), T23657_T9 (SEQ ID NO:1007) and T23657_T13 (SEQ ID NO:1011). Table 79 below describes the starting and ending position of this segment on each transcript.

TABLE 79
Segment location on transcripts

| | Segment | Segment |
|---|---|---|
| Transcript name | starting position | ending position |
| T23657_T3 (SEQ ID NO: 1001) | 2377 | 2534 |
| T23657_T4 (SEQ ID NO: 1002) | 2440 | 2597 |
| T23657_T6 (SEQ ID NO: 1004) | 2732 | 2889 |
| T23657_T9 (SEQ ID NO: 1007) | 2377 | 2534 |
| T23657_T13 (SEQ ID NO: 1011) | 2234 | 2391 |

[3386] Segment cluster T23657_node_{—}39 (SEQ ID NO:1041) according to the present invention is supported by 13 libraries. The number of libraries was determined as previously described. This segment can be found in the following transcript(s): T23657_T2 (SEQ ID NO:1000), T23657_T3 (SEQ ID NO:1001), T23657_T4 (SEQ ID NO:1002), T23657_T5 (SEQ ID NO:1003), T23657_T6 (SEQ ID NO:1004), T23657_T7 (SEQ ID NO:1005), T23657_T9 (SEQ ID NO:1007), T23657_T10 (SEQ ID NO:1008), T23657_T12 (SEQ ID NO:1010), T23657_T13 (SEQ ID NO:1011), T23657_T16 (SEQ ID NO:1014), T23657_T20 (SEQ ID NO:1017), T23657_T22 (SEQ ID NO:1019) and T23657_T35 (SEQ ID NO:1026). Table 80 below describes the starting and ending position of this segment on each transcript.

TABLE 80
Segment location on transcripts

| | Segment | Segment |
|---|---|---|
| Transcript name | starting position | ending position |
| T23657_T2 (SEQ ID NO: 1000) | 2237 | 2406 |
| T23657_T3 (SEQ ID NO: 1001) | 2535 | 2704 |
| T23657_T4 (SEQ ID NO: 1002) | 2598 | 2767 |
| T23657_T5 (SEQ ID NO: 1003) | 2529 | 2698 |
| T23657_T6 (SEQ ID NO: 1004) | 2890 | 3059 |
| T23657_T7 (SEQ ID NO: 1005) | 2237 | 2406 |
| T23657_T9 (SEQ ID NO: 1007) | 2535 | 2704 |
| T23657_T10 (SEQ ID NO: 1008) | 2630 | 2799 |
| T23657_T12 (SEQ ID NO: 1010) | 2064 | 2233 |
| T23657_T13 (SEQ ID NO: 1011) | 2392 | 2561 |
| T23657_T16 (SEQ ID NO: 1014) | 2237 | 2406 |
| T23657_T20 (SEQ ID NO: 1017) | 2237 | 2406 |
| T23657_T22 (SEQ ID NO: 1019) | 2064 | 2233 |
| T23657_T35 (SEQ ID NO: 1026) | 1222 | 1391 |

[3387] Segment cluster T23657_node_{—}40 (SEQ ID NO:1042) according to the present invention is supported by 40 libraries. The number of libraries was determined as previously described. This segment can be found in the following transcript(s): T23657_T2 (SEQ ID NO:1000), T23657_T3 (SEQ ID NO:1001), T23657_T4 (SEQ ID NO:1002), T23657_T5 (SEQ ID NO:1003), T23657_T6 (SEQ ID NO:1004), T23657_T7 (SEQ ID NO:1005), T23657_T9 (SEQ ID NO:1007), T23657_T10 (SEQ ID NO:1008), T23657_T12 (SEQ ID NO:1010), T23657_T13 (SEQ ID NO:1011), T23657_T16 (SEQ ID NO:1014) and T23657_T35 (SEQ ID NO:1026). Table 81 below describes the starting and ending position of this segment on each transcript.

TABLE 81
Segment location on transcripts

| | Segment | Segment |
|---|---|---|
| Transcript name | starting position | ending position |
| T23657_T2 (SEQ ID NO: 1000) | 2407 | 3973 |
| T23657_T3 (SEQ ID NO: 1001) | 2705 | 4271 |
| T23657_T4 (SEQ ID NO: 1002) | 2768 | 4334 |
| T23657_T5 (SEQ ID NO: 1003) | 2699 | 4265 |
| T23657_T6 (SEQ ID NO: 1004) | 3060 | 4626 |
| T23657_T7 (SEQ ID NO: 1005) | 2407 | 3973 |
| T23657_T9 (SEQ ID NO: 1007) | 2705 | 4271 |
| T23657_T10 (SEQ ID NO: 1008) | 2800 | 4366 |
| T23657_T12 (SEQ ID NO: 1010) | 2234 | 3800 |
| T23657_T13 (SEQ ID NO: 1011) | 2562 | 4128 |
| T23657_T16 (SEQ ID NO: 1014) | 2407 | 3973 |
| T23657_T35 (SEQ ID NO: 1026) | 1392 | 2958 |

[3388] Segment cluster T23657_node_{—}45 (SEQ ID NO:1043) according to the present invention is supported by 91 libraries. The number of libraries was determined as previously described. This segment can be found in the following transcript(s): T23657_T0 (SEQ ID NO:998), T23657_T1 (SEQ ID NO:999), T23657_T2 (SEQ ID NO:1000), T23657_T3 (SEQ ID NO:1001), T23657_T4 (SEQ ID NO:1002), T23657_T5 (SEQ ID NO:1003), T23657_T6 (SEQ ID NO:1004), T23657_T7 (SEQ ID NO:1005), T23657_T8 (SEQ ID NO:1006), T23657_T9 (SEQ ID NO:1007), T23657_T10 (SEQ ID NO:1008), T23657_T11 (SEQ ID NO:1009), T23657_T12 (SEQ ID NO:1010), T23657_T13 (SEQ ID NO:1011), T23657_T14 (SEQ ID NO:1012), T23657_T15 (SEQ ID NO:1013), T23657_T16 (SEQ ID NO:1014), T23657_T17 (SEQ ID NO:1015), T23657_T19 (SEQ ID NO:1016), T23657_T20 (SEQ ID NO:1017), T23657_T21 (SEQ ID NO:1018), T23657_T22 (SEQ ID NO:1019), T23657_T23 (SEQ ID NO:1020), T23657_T30 (SEQ ID NO:1023), T23657_T31 (SEQ ID NO:1024), T23657_T32 (SEQ ID NO:1025), T23657_T35 (SEQ ID NO:1026) and T23657_T37 (SEQ ID NO:1027). Table 82 below describes the starting and ending position of this segment on each transcript.

TABLE 82
Segment location on transcripts

| | Segment | Segment |
|---|---|---|
| Transcript name | starting position | ending position |
| T23657_T0 (SEQ ID NO: 998) | 2363 | 2789 |
| T23657_T1 (SEQ ID NO: 999) | 2363 | 2942 |
| T23657_T2 (SEQ ID NO: 1000) | 4160 | 4586 |
| T23657_T3 (SEQ ID NO: 1001) | 4458 | 4884 |
| T23657_T4 (SEQ ID NO: 1002) | 4521 | 4947 |
| T23657_T5 (SEQ ID NO: 1003) | 4452 | 4878 |
| T23657_T6 (SEQ ID NO: 1004) | 4813 | 5239 |
| T23657_T7 (SEQ ID NO: 1005) | 4160 | 4739 |
| T23657_T8 (SEQ ID NO: 1006) | 2363 | 2594 |
| T23657_T9 (SEQ ID NO: 1007) | 4458 | 4689 |
| T23657_T10 (SEQ ID NO: 1008) | 4553 | 4979 |
| T23657_T11 (SEQ ID NO: 1009) | 2756 | 3182 |
| T23657_T12 (SEQ ID NO: 1010) | 3987 | 4413 |
| T23657_T13 (SEQ ID NO: 1011) | 4315 | 4741 |
| T23657_T14 (SEQ ID NO: 1012) | 2272 | 2698 |
| T23657_T15 (SEQ ID NO: 1013) | 2426 | 2852 |
| T23657_T16 (SEQ ID NO: 1014) | 4067 | 4493 |
| T23657_T17 (SEQ ID NO: 1015) | 2190 | 2616 |
| T23657_T19 (SEQ ID NO: 1016) | 2220 | 2646 |
| T23657_T20 (SEQ ID NO: 1017) | 2533 | 2959 |
| T23657_T21 (SEQ ID NO: 1018) | 2503 | 2929 |
| T23657_T22 (SEQ ID NO: 1019) | 2360 | 2786 |
| T23657_T23 (SEQ ID NO: 1020) | 1994 | 2420 |
| T23657_T30 (SEQ ID NO: 1023) | 955 | 1381 |
| T23657_T31 (SEQ ID NO: 1024) | 795 | 1221 |
| T23657_T32 (SEQ ID NO: 1025) | 753 | 1179 |
| T23657_T35 (SEQ ID NO: 1026) | 3145 | 3571 |
| T23657_T37 (SEQ ID NO: 1027) | 580 | 1006 |

[3389] Segment cluster T23657_node_{—}46 (SEQ ID NO:1044) according to the present invention is supported by 7 libraries. The number of libraries was determined as previously described. This segment can be found in the following transcript(s): T23657_T1 (SEQ ID NO:999), T23657_T7 (SEQ ID NO:1005) and T23657_T38 (SEQ ID NO:1028). Table 83 below describes the starting and ending position of this segment on each transcript.

TABLE 83
Segment location on transcripts

| | Segment | Segment |
|---|---|---|
| Transcript name | starting position | ending position |
| T23657_T1 (SEQ ID NO: 999) | 2943 | 3109 |
| T23657_T7 (SEQ ID NO: 1005) | 4740 | 4906 |
| T23657_T38 (SEQ ID NO: 1028) | 403 | 569 |

[3390] Segment cluster T23657_node_{—}49 (SEQ ID NO:1045) according to the present invention is supported by 5 libraries. The number of libraries was determined as previously described. This segment can be found in the following transcript(s): T23657_T24 (SEQ ID NO:1021) and T23657_T28 (SEQ ID NO:1022). Table 84 below describes the starting and ending position of this segment on each transcript.

TABLE 84
Segment location on transcripts

| | Segment | Segment |
|---|---|---|
| Transcript name | starting position | ending position |
| T23657_T24 (SEQ ID NO: 1021) | 2237 | 2587 |
| T23657_T28 (SEQ ID NO: 1022) | 2094 | 2444 |

[3391] According to an optional embodiment of the present invention, short segments related to the above cluster are also provided. These segments are up to about 120 bp in length, and so are included in a separate description.

[3392] Segment cluster T23657_node_{—}0 (SEQ ID NO:1046) according to the present invention is supported by 24 libraries. The number of libraries was determined as previously described. This segment can be found in the following transcript(s): T23657_T0 (SEQ ID NO:998), T23657_T1 (SEQ ID NO:999), T23657_T2 (SEQ ID NO:1000), T23657_T3 (SEQ ID NO:1001), T23657_T4 (SEQ ID NO:1002), T23657_T5 (SEQ ID NO:1003), T23657_T6 (SEQ ID NO:1004), T23657_T7 (SEQ ID NO:1005), T23657_T8 (SEQ ID NO:1006), T23657_T9 (SEQ ID NO:1007), T23657_T10 (SEQ ID NO:1008), T23657_T11 (SEQ ID NO:1009), T23657_T12 (SEQ ID NO:1000), T23657_T13 (SEQ ID NO:1011), T23657_T14 (SEQ ID NO:1012), T23657_T15 (SEQ ID NO:1013), T23657_T16 (SEQ ID NO:1014), T23657_T17 (SEQ ID NO:1015), T23657_T19 (SEQ ID NO:1016), T23657_T20 (SEQ ID NO:1017), T23657_T21 (SEQ ID NO:1018), T23657_T22 (SEQ ID NO:1019), T23657_T23 (SEQ ID NO:1020), T23657_T24 (SEQ ID NO:1021), T23657_T28 (SEQ ID NO:1022) and T23657_T31 (SEQ ID NO:1024). Table 85 below describes the starting and ending position of this segment on each transcript.

TABLE 85
Segment location on transcripts

| | Segment | Segment |
|---|---|---|
| Transcript name | starting position | ending position |
| T23657_T0 (SEQ ID NO: 998) | 1 | 115 |
| T23657_T1 (SEQ ID NO: 999) | 1 | 115 |
| T23657_T2 (SEQ ID NO: 1000) | 1 | 115 |
| T23657_T3 (SEQ ID NO: 1001) | 1 | 115 |
| T23657_T4 (SEQ ID NO: 1002) | 1 | 115 |
| T23657_T5 (SEQ ID NO: 1003) | 1 | 115 |
| T23657_T6 (SEQ ID NO: 1004) | 1 | 115 |
| T23657_T7 (SEQ ID NO: 1005) | 1 | 115 |
| T23657_T8 (SEQ ID NO: 1006) | 1 | 115 |
| T23657_T9 (SEQ ID NO: 1007) | 1 | 115 |
| T23657_T10 (SEQ ID NO: 1008) | 1 | 115 |
| T23657_T11 (SEQ ID NO: 1009) | 1 | 115 |
| T23657_T12 (SEQ ID NO: 1010) | 1 | 115 |
| T23657_T13 (SEQ ID NQ: 1011) | 1 | 115 |
| T23657_T14 (SEQ ID NO: 1012) | 1 | 115 |
| T23657_T15 (SEQ ID NO: 1013) | 1 | 115 |
| T23657_T16 (SEQ ID NO: 1014) | 1 | 115 |
| T23657_T17 (SEQ ID NO: 1015) | 1 | 115 |
| T23657_T19 (SEQ ID NO: 1016) | 1 | 115 |
| T23657_T20 (SEQ ID NO: 1017) | 1 | 115 |
| T23657_T21 (SEQ ID NO: 1018) | 1 | 115 |
| T23657_T22 (SEQ ID NO: 1019) | 1 | 115 |
| T23657_T23 (SEQ ID NO: 1020) | 1 | 115 |
| T23657_T24 (SEQ ID NO: 1021) | 1 | 115 |
| T23657_T28 (SEQ ID NO: 1022) | 1 | 115 |
| T23657_T31 (SEQ ID NO: 1024) | 1 | 115 |

[3393] Segment cluster T23657_node_{—}4 (SEQ ID NO:1047) according to the present invention is supported by 31 libraries. The number of libraries was determined as previously described. This segment can be found in the following transcript(s): T23657_T0 (SEQ ID NO:998), T23657_T1 (SEQ ID NO:999), T23657_T2 (SEQ ID NO:1000), T23657_T3 (SEQ ID NO:1001), T23657_T4 (SEQ ID NO:1002), T23657_T5 (SEQ ID NO:1003), T23657_T6 (SEQ ID NO:1004), T23657_T7 (SEQ ID NO:1005), T23657_T8 (SEQ ID NO:1006), T23657_T9 (SEQ ID NO:1007), T23657_T10 (SEQ ID NO:1008), T23657_T11 (SEQ ID NO:1009), T23657_T12 (SEQ ID NO:1010), T23657_T13 (SEQ ID NO:1011), T23657_T14 (SEQ ID NO:1012), T23657_T15 (SEQ ID NO:1013), T23657_T16 (SEQ ID NO:1014), T23657_T17 (SEQ ID NO:1015), T23657_T19 (SEQ ID NO:1016), T23657_T20 (SEQ ID NO:1017), T23657_T21 (SEQ ID NO:1018), T23657_T22 (SEQ ID NO:1019), T23657_T23 (SEQ ID NO:1020), T23657_T24 (SEQ ID NO:1021) and T23657_T28 (SEQ ID NO:1022). Table 86 below describes the starting and ending position of this segment on each transcript.

TABLE 86
Segment location on transcripts

| | Segment | Segment |
|---|---|---|
| Transcript name | starting position | ending position |
| T23657_T0 (SEQ ID NO: 998) | 939 | 1007 |
| T23657_T1 (SEQ ID NO: 999) | 939 | 1007 |
| T23657_T2 (SEQ ID NO: 1000) | 939 | 1007 |
| T23657_T3 (SEQ ID NO: 1001) | 939 | 1007 |
| T23657_T4 (SEQ ID NO: 1002) | 939 | 1007 |
| T23657_T5 (SEQ ID NO: 1003) | 939 | 1007 |
| T23657_T6 (SEQ ID NO: 1004) | 939 | 1007 |
| T23657_T7 (SEQ ID NO: 1005) | 939 | 1007 |
| T23657_T8 (SEQ ID NO: 1006) | 939 | 1007 |
| T23657_T9 (SEQ ID NO: 1007) | 939 | 1007 |
| T23657_T10 (SEQ ID NO: 1008) | 939 | 1007 |
| T23657_T11 (SEQ ID NO: 1009) | 939 | 1007 |
| T23657_T12 (SEQ ID NO: 1010) | 939 | 1007 |
| T23657_T13 (SEQ ID NO: 1011) | 939 | 1007 |
| T23657_T14 (SEQ ID NO: 1012) | 939 | 1007 |
| T23657_T15 (SEQ ID NO: 1013) | 939 | 1007 |
| T23657_T16 (SEQ ID NO: 1014) | 939 | 1007 |
| T23657_T17 (SEQ ID NO: 1015) | 939 | 1007 |
| T23657_T19 (SEQ ID NO: 1016) | 939 | 1007 |
| T23657_T20 (SEQ ID NO: 1017) | 939 | 1007 |
| T23657_T21 (SEQ ID NO: 1018) | 939 | 1007 |
| T23657_T22 (SEQ ID NO: 1019) | 939 | 1007 |
| T23657_T23 (SEQ ID NO: 1020) | 939 | 1007 |
| T23657_T24 (SEQ ID NO: 1021) | 939 | 1007 |
| T23657_T28 (SEQ ID NO: 1022) | 939 | 1007 |

[3394] Segment cluster T23657_node_{—}6 (SEQ ID NO:1048) according to the present invention is supported by 28 libraries. The number of libraries was determined as previously described. This segment can be found in the following transcript(s): T23657_T0 (SEQ ID NO:998), T23657_T1 (SEQ ID NO:999), T23657_T2 (SEQ ID NO:1000), T23657_T3 (SEQ ID NO:1001), T23657_T4 (SEQ ID NO:1002), T23657_T5 (SEQ ID NO:1003), T23657_T6 (SEQ ID NO:1004), T23657_T7 (SEQ ID NO:1005), T23657_T8 (SEQ ID NO:1006), T23657_T9 (SEQ ID NO:1007), T23657_T10 (SEQ ID NO:1008), T23657_T11 (SEQ ID NO:1009), T23657_T12 (SEQ ID NO:1010), T23657_T13 (SEQ ID NO:1011), T23657_T15 (SEQ ID NO:1013), T23657_T16 (SEQ ID NO:1014), T23657_T17 (SEQ ID NO:1015), T23657_T19 (SEQ ID NO:1016), T23657_T20 (SEQ ID NO:1017), T23657_T21 (SEQ ID NO:1018), T23657_T22 (SEQ ID NO:1019), T23657_T23 (SEQ ID NO:1020), T23657_T24 (SEQ ID NO:1021) and T23657_T28 (SEQ ID NO:1022). Table 87 below describes the starting and ending position of this segment on each transcript.

TABLE 87
Segment location on transcripts

| | Segment | Segment |
|---|---|---|
| Transcript name | starting position | ending position |
| T23657_T0 (SEQ ID NO: 998) | 1008 | 1098 |
| T23657_T1 (SEQ ID NO: 999) | 1008 | 1098 |
| T23657_T2 (SEQ ID NO: 1000) | 1008 | 1098 |
| T23657_T3 (SEQ ID NO: 1001) | 1008 | 1098 |
| T23657_T4 (SEQ ID NO: 1002) | 1008 | 1098 |
| T23657_T5 (SEQ ID NO: 1003) | 1008 | 1098 |
| T23657_T6 (SEQ ID NO: 1004) | 1008 | 1098 |
| T23657_T7 (SEQ ID NO: 1005) | 1008 | 1098 |
| T23657_T8 (SEQ ID NO: 1006) | 1008 | 1098 |
| T23657_T9 (SEQ ID NO: 1007) | 1008 | 1098 |
| T23657_T10 (SEQ ID NO: 1008) | 1008 | 1098 |
| T23657_T11 (SEQ ID NO: 1009) | 1008 | 1098 |
| T23657_T12 (SEQ ID NO: 1010) | 1008 | 1098 |
| T23657_T13 (SEQ ID NO: 1011) | 1008 | 1098 |
| T23657_T15 (SEQ ID NO: 1013) | 1008 | 1098 |
| T23657_T16 (SEQ ID NO: 1014) | 1008 | 1098 |
| T23657_T17 (SEQ ID NO: 1015) | 1008 | 1098 |
| T23657_T19 (SEQ ID NO: 1016) | 1008 | 1098 |
| T23657_T20 (SEQ ID NO: 1017) | 1008 | 1098 |
| T23657_T21 (SEQ ID NO: 1018) | 1008 | 1098 |
| T23657_T22 (SEQ ID NO: 1019) | 1008 | 1098 |
| T23657_T23 (SEQ ID NO: 1020) | 1008 | 1098 |
| T23657_T24 (SEQ ID NO: 1021) | 1008 | 1098 |
| T23657_T28 (SEQ ID NO: 1022) | 1008 | 1098 |

[3395] Segment cluster T23657_node_{—}11 (SEQ ID NO:1049) according to the present invention is supported by 33 libraries. The number of libraries was determined as previously described. This segment can be found in the following transcript(s): T23657_T0 (SEQ ID NO:998), T23657_T1 (SEQ ID NO:999), T23657_T2 (SEQ ID NO:1000), T23657_T3 (SEQ ID NO:1001), T23657_T4 (SEQ ID NO:1002), T23657_T5 (SEQ ID NO:1003), T23657_T6 (SEQ ID NO:1004), T23657_T7 (SEQ ID NO:1005), T23657_T8 (SEQ ID NO:1006), T23657_T9 (SEQ ID NO:1007), T23657_T10 (SEQ ID NO:1008), T23657_T11 (SEQ ID NO:1009), T23657_T12 (SEQ ID NO:1010), T23657_T13 (SEQ ID NO:1011), T23657_T14 (SEQ ID NO:1012), T23657_T15 (SEQ ID NO:1013), T23657_T16 (SEQ ID NO:1014), T23657_T17 (SEQ ID NO:1015), T23657_T19 (SEQ ID NO:1016), T23657_T20 (SEQ ID NO:1017), T23657_T21 (SEQ ID NO:1018), T23657_T22 (SEQ ID NO:1019), T23657_T23 (SEQ ID NO:1020), T23657_T24 (SEQ ID NO:1021) and T23657_T28 (SEQ ID NO:1022). Table 88 below describes the starting and ending position of this segment on each transcript.

TABLE 88
Segment location on transcripts

| | Segment | Segment |
|---|---|---|
| Transcript name | starting position | ending position |
| T23657_T0 (SEQ ID NO: 998) | 1221 | 1332 |
| T23657_T1 (SEQ ID NO: 999) | 1221 | 1332 |
| T23657_T2 (SEQ ID NO: 1000) | 1221 | 1332 |
| T23657_T3 (SEQ ID NO: 1001) | 1221 | 1332 |
| T23657_T4 (SEQ ID NO: 1002) | 1221 | 1332 |
| T23657_T5 (SEQ ID NO: 1003) | 1221 | 1332 |
| T23657_T6 (SEQ ID NO: 1004) | 1221 | 1332 |
| T23657_T7 (SEQ ID NO: 1005) | 1221 | 1332 |
| T23657_T8 (SEQ ID NO: 1006) | 1221 | 1332 |
| T23657_T9 (SEQ ID NO: 1007) | 1221 | 1332 |
| T23657_T10 (SEQ ID NO: 1008) | 1221 | 1332 |
| T23657_T11 (SEQ ID NO: 1009) | 1221 | 1332 |
| T23657_T12 (SEQ ID NO: 1010) | 1221 | 1332 |
| T23657_T13 (SEQ ID NO: 1011) | 1221 | 1332 |
| T23657_T14 (SEQ ID NO: 1012) | 1130 | 1241 |
| T23657_T15 (SEQ ID NO: 1013) | 1221 | 1332 |
| T23657_T16 (SEQ ID NO: 1014) | 1221 | 1332 |
| T23657_T17 (SEQ ID NO: 1015) | 1221 | 1332 |
| T23657_T19 (SEQ ID NO: 1016) | 1221 | 1332 |
| T23657_T20 (SEQ ID NO: 1017) | 1221 | 1332 |
| T23657_T21 (SEQ ID NO: 1018) | 1221 | 1332 |
| T23657_T22 (SEQ ID NO: 1019) | 1221 | 1332 |
| T23657_T23 (SEQ ID NO: 1020) | 1221 | 1332 |
| T23657_T24 (SEQ ID NO: 1021) | 1221 | 1332 |
| T23657_T28 (SEQ ID NO: 1022) | 1221 | 1332 |

[3396] Segment cluster T23657_node_{—}20 (SEQ ID NO:1050) according to the present invention is supported by 2 libraries. The number of libraries was determined as previously described. This segment can be found in the following transcript(s): T23657_T32 (SEQ ID NO:1025) and T23657_T37 (SEQ ID NO:1027). Table 89 below describes the starting and ending position of this segment on each transcript.

TABLE 89
Segment location on transcripts

| | Segment | Segment |
|---|---|---|
| Transcript name | starting position | ending position |
| T23657_T32 (SEQ ID NO: 1025) | 1 | 73 |
| T23657_T37 (SEQ ID NO: 1027) | 1 | 73 |

[3397] Segment cluster T23657_node_{—}22 (SEQ ID NO:1051) according to the present invention is supported by 3 libraries. The number of libraries was determined as previously described. This segment can be found in the following transcript(s): T23657_T30 (SEQ ID NO:1023), T23657_T35 (SEQ ID NO:1026) and T23657_T38 (SEQ ID NO:1028). Table 90 below describes the starting and ending position of this segment on each transcript.

TABLE 90
Segment location on transcripts

| | Segment | Segment |
|---|---|---|
| Transcript name | starting position | ending position |
| T23657_T30 (SEQ ID NO: 1023) | 1 | 117 |
| T23657_T35 (SEQ ID NO: 1026) | 1 | 117 |
| T23657_T38 (SEQ ID NO: 1028) | 1 | 117 |

[3398] Segment cluster T23657_node_{—}25 (SEQ ID NO:1052) according to the present invention is supported by 36 libraries. The number of libraries was determined as previously described. This segment can be found in the following transcript(s): T23657_T0 (SEQ ID NO:998), T23657_T1 (SEQ ID NO:999), T23657_T2 (SEQ ID NO:1000), T23657_T3 (SEQ ID NO:1001), T23657_T4 (SEQ ID NO:1002), T23657_T5 (SEQ ID NO:1003), T23657_T6 (SEQ ID NO:1004), T23657_T7 (SEQ ID NO:1005), T23657_T8 (SEQ ID NO:1006), T23657_T9 (SEQ ID NO:1007), T23657_T10 (SEQ ID NO:1008), T23657_T11 (SEQ ID NO:1009), T23657_T12 (SEQ ID NO:1010), T23657_T13 (SEQ ID NO:1011), T23657_T14 (SEQ ID NO:1012), T23657_T15 (SEQ ID NO:1013), T23657_T16 (SEQ ID NO:1014), T23657_T17 (SEQ ID NO:1015), T23657_T19 (SEQ ID NO:1016), T23657_T20 (SEQ ID NO:1017), T23657_T21 (SEQ ID NO:1018), T23657_T22 (SEQ ID NO:1019), T23657_T23 (SEQ ID NO:1020), T23657_T24 (SEQ ID NO:1021), T23657_T28 (SEQ ID NO:1022), T23657_T30 (SEQ ID NO:1023), T23657_T31 (SEQ ID NO:1024), T23657_T32 (SEQ ID NO:1025), T23657_T35 (SEQ ID NO:1026), T23657_T37 (SEQ ID NO:1027) and T23657_T38 (SEQ ID NO:1028). Table 91 below describes the starting and ending position of this segment on each transcript.

TABLE 91
Segment location on transcripts

| | Segment | Segment |
|---|---|---|
| Transcript name | starting position | ending position |
| T23657_T0 (SEQ ID NO: 998) | 1809 | 1849 |
| T23657_T1 (SEQ ID NO: 999) | 1809 | 1849 |
| T23657_T2 (SEQ ID NO: 1000) | 1809 | 1849 |
| T23657_T3 (SEQ ID NO: 1001) | 1809 | 1849 |
| T23657_T4 (SEQ ID NO: 1002) | 1809 | 1849 |
| T23657_T5 (SEQ ID NO: 1003) | 1809 | 1849 |
| T23657_T6 (SEQ ID NO: 1004) | 1809 | 1849 |
| T23657_T7 (SEQ ID NO: 1005) | 1809 | 1849 |
| T23657_T8 (SEQ ID NO: 1006) | 1809 | 1849 |
| T23657_T9 (SEQ ID NO: 1007) | 1809 | 1849 |
| T23657_T10 (SEQ ID NO: 1008) | 1809 | 1849 |
| T23657_T11 (SEQ ID NO: 1009) | 1809 | 1849 |
| T23657_T12 (SEQ ID NO: 1010) | 1809 | 1849 |
| T23657_T13 (SEQ ID NO: 1011) | 1809 | 1849 |
| T23657_T14 (SEQ ID NO: 1012) | 1718 | 1758 |
| T23657_T15 (SEQ ID NO: 1013) | 1809 | 1849 |
| T23657_T16 (SEQ ID NO: 1014) | 1809 | 1849 |
| T23657_T17 (SEQ ID NO: 1015) | 1809 | 1849 |
| T23657_T19 (SEQ ID NO: 1016) | 1809 | 1849 |
| T23657_T20 (SEQ ID NO: 1017) | 1809 | 1849 |
| T23657_T21 (SEQ ID NO: 1018) | 1809 | 1849 |
| T23657_T22 (SEQ ID NO: 1019) | 1809 | 1849 |
| T23657_T23 (SEQ ID NO: 1020) | 1613 | 1653 |
| T23657_T24 (SEQ ID NO: 1021) | 1809 | 1849 |
| T23657_T28 (SEQ ID NO: 1022) | 1809 | 1849 |
| T23657_T30 (SEQ ID NO: 1023) | 401 | 441 |
| T23657_T31 (SEQ ID NO: 1024) | 241 | 281 |
| T23657_T32 (SEQ ID NO: 1025) | 199 | 239 |
| T23657_T35 (SEQ ID NO: 1026) | 401 | 441 |
| T23657_T37 (SEQ ID NO: 1027) | 199 | 239 |
| T23657_T38 (SEQ ID NO: 1028) | 118 | 158 |

[3399] Segment cluster T23657_node_{—}26 (SEQ ID NO:1053) according to the present invention is supported by 8 libraries. The number of libraries was determined as previously described. This segment can be found in the following transcript(s): T23657_T10 (SEQ ID NO:1008), T23657_T11 (SEQ ID NO:1009) and T23657_T35 (SEQ ID NO:1026). Table 92 below describes the starting and ending position of this segment on each transcript.

TABLE 92
Segment location on transcripts

| | Segment | Segment |
|---|---|---|
| Transcript name | starting position | ending position |
| T23657_T10 (SEQ ID NO: 1008) | 1850 | 1950 |
| T23657_T11 (SEQ ID NO: 1009) | 1850 | 1950 |
| T23657_T35 (SEQ ID NO: 1026) | 442 | 542 |

[3400] Segment cluster T23657_node_{—}28 (SEQ ID NO:1054) according to the present invention is supported by 34 libraries. The number of libraries was determined as previously described. This segment can be found in the following transcript(s): T23657_T0 (SEQ ID NO:998), T23657_T1 (SEQ ID NO:999), T23657_T2 (SEQ ID NO:1000), T23657_T3 (SEQ ID NO:1001), T23657_T4 (SEQ ID NO:1002), T23657_T5 (SEQ ID NO:1003), T23657_T6 (SEQ ID NO:1004), T23657_T7 (SEQ ID NO:1005), T23657_T8 (SEQ ID NO:1006), T23657_T9 (SEQ ID NO:1007), T23657_T10 (SEQ ID NO:1008), T23657_T11 (SEQ ID NO:1009), T23657_T13 (SEQ ID NO:1011), T23657_T14 (SEQ ID NO:1012), T23657_T15 (SEQ ID NO:1013), T23657_T16 (SEQ ID NO:1014), T23657_T19 (SEQ ID NO:1016), T23657_T20 (SEQ ID NO:1017), T23657_T21 (SEQ ID NO:1018), T23657_T24 (SEQ ID NO:1021), T23657_T28 (SEQ ID NO:1022), T23657_T30 (SEQ ID NO:1023), T23657_T31 (SEQ ID NO:1024), T23657_T32 (SEQ ID NO:1025), T23657_T35 (SEQ ID NO:1026) and T23657_T38 (SEQ ID NO:1028). Table 93 below describes the starting and ending position of this segment on each transcript.

TABLE 93
Segment location on transcripts

| | Segment | Segment |
|---|---|---|
| Transcript name | starting position | ending position |
| T23657_T0 (SEQ ID NO: 998) | 1993 | 2022 |
| T23657_T1 (SEQ ID NO: 999) | 1993 | 2022 |
| T23657_T2 (SEQ ID NO: 1000) | 1993 | 2022 |
| T23657_T3 (SEQ ID NO: 1001) | 1993 | 2022 |
| T23657_T4 (SEQ ID NO: 1002) | 1993 | 2022 |
| T23657_T5 (SEQ ID NO: 1003) | 1993 | 2022 |
| T23657_T6 (SEQ ID NO: 1004) | 1993 | 2022 |
| T23657_T7 (SEQ ID NO: 1005) | 1993 | 2022 |
| T23657_T8 (SEQ ID NO: 1006) | 1993 | 2022 |
| T23657_T9 (SEQ ID NO: 1007) | 1993 | 2022 |
| T23657_T10 (SEQ ID NO: 1008) | 2094 | 2123 |
| T23657_T11 (SEQ ID NO: 1009) | 2094 | 2123 |
| T23657_T13 (SEQ ID NO: 1011) | 1850 | 1879 |
| T23657_T14 (SEQ ID NO: 1012) | 1902 | 1931 |
| T23657_T15 (SEQ ID NO: 1013) | 1993 | 2022 |
| T23657_T16 (SEQ ID NO: 1014) | 1993 | 2022 |
| T23657_T19 (SEQ ID NO: 1016) | 1850 | 1879 |
| T23657_T20 (SEQ ID NO: 1017) | 1993 | 2022 |
| T23657_T21 (SEQ ID NO: 1018) | 1993 | 2022 |
| T23657_T24 (SEQ ID NO: 1021) | 1993 | 2022 |
| T23657_T28 (SEQ ID NO: 1022) | 1850 | 1879 |
| T23657_T30 (SEQ ID NO: 1023) | 585 | 614 |
| T23657_T31 (SEQ ID NO: 1024) | 425 | 454 |
| T23657_T32 (SEQ ID NO: 1025) | 383 | 412 |
| T23657_T35 (SEQ ID NO: 1026) | 686 | 715 |
| T23657_T38 (SEQ ID NO: 1028) | 159 | 188 |

[3401] Segment cluster T23657_node_{—}30 (SEQ ID NO:1055) according to the present invention is supported by 7 libraries. The number of libraries was determined as previously described. This segment can be found in the following transcript(s): T23657_T5 (SEQ ID NO:1003), T23657_T6 (SEQ ID NO:1004), T23657_T10 (SEQ ID NO:1008), T23657_T11 (SEQ ID NO:1009) and T23657_T35 (SEQ ID NO:1026). Table 94 below describes the starting and ending position of this segment on each transcript.

TABLE 94
Segment location on transcripts

| | Segment | Segment |
|---|---|---|
| Transcript name | starting position | ending position |
| T23657_T5 (SEQ ID NO: 1003) | 2279 | 2314 |
| T23657_T6 (SEQ ID NO: 1004) | 2279 | 2314 |
| T23657_T10 (SEQ ID NO: 1008) | 2380 | 2415 |
| T23657_T11 (SEQ ID NO: 1009) | 2380 | 2415 |
| T23657_T35 (SEQ ID NO: 1026) | 972 | 1007 |

[3402] Segment cluster T23657_node_{—}31 (SEQ ID NO:1056) according to the present invention is supported by 46 libraries. The number of libraries was determined as previously described. This segment can be found in the following transcript(s): T23657_T0 (SEQ ID NO:998), T23657_T1 (SEQ ID NO:999), T23657_T2 (SEQ ID NO:1000), T23657_T3 (SEQ ID NO:1001), T23657_T4 (SEQ ID NO:1002), T23657_T5 (SEQ ID NO:1003), T23657_T6 (SEQ ID NO:1004), T23657_T7 (SEQ ID NO:1005), T23657_T8 (SEQ ID NO:1006), T23657_T9 (SEQ ID NO:1007), T23657_T10 (SEQ ID NO:1008), T23657_T11 (SEQ ID NO:1009), T23657_T12 (SEQ ID NO:1010), T23657_T13 (SEQ ID NO:1011), T23657_T14 (SEQ ID NO:1012), T23657_T15 (SEQ ID NO:1013), T23657_T16 (SEQ ID NO:1014), T23657_T17 (SEQ ID NO:1015), T23657_T19 (SEQ ID NO:1016), T23657_T20 (SEQ ID NO:1017), T23657_T21 (SEQ ID NO:1018), T23657_T22 (SEQ ID NO:1019), T23657_T23 (SEQ ID NO:1020), T23657_T24 (SEQ ID NO:1021), T23657_T28 (SEQ ID NO:1022), T23657_T30 (SEQ ID NO:1023), T23657_T31 (SEQ ID NO:1024), T23657_T32 (SEQ ID NO:1025), T23657_T35 (SEQ ID NO:1026), T23657_T37 (SEQ ID NO:1027) and T23657_T38 (SEQ ID NO:1028). Table 95 below describes the starting and ending position of this segment on each transcript.

TABLE 95
Segment location on transcripts

| | Segment | Segment |
|---|---|---|
| Transcript name | starting position | ending position |
| T23657_T0 (SEQ ID NO: 998) | 2023 | 2087 |
| T23657_T1 (SEQ ID NO: 999) | 2023 | 2087 |
| T23657_T2 (SEQ ID NO: 1000) | 2023 | 2087 |
| T23657_T3 (SEQ ID NO: 1001) | 2023 | 2087 |
| T23657_T4 (SEQ ID NO: 1002) | 2023 | 2087 |
| T23657_T5 (SEQ ID NO: 1003) | 2315 | 2379 |
| T23657_T6 (SEQ ID NO: 1004) | 2315 | 2379 |
| T23657_T7 (SEQ ID NO: 1005) | 2023 | 2087 |
| T23657_T8 (SEQ ID NO: 1006) | 2023 | 2087 |
| T23657_T9 (SEQ ID NO: 1007) | 2023 | 2087 |
| T23657_T10 (SEQ ID NO: 1008) | 2416 | 2480 |
| T23657_T11 (SEQ ID NO: 1009) | 2416 | 2480 |
| T23657_T12 (SEQ ID NO: 1010) | 1850 | 1914 |
| T23657_T13 (SEQ ID NO: 1011) | 1880 | 1944 |
| T23657_T14 (SEQ ID NO: 1012) | 1932 | 1996 |
| T23657_T15 (SEQ ID NO: 1013) | 2023 | 2087 |
| T23657_T16 (SEQ ID NO: 1014) | 2023 | 2087 |
| T23657_T17 (SEQ ID NO: 1015) | 1850 | 1914 |
| T23657_T19 (SEQ ID NO: 1016) | 1880 | 1944 |
| T23657_T20 (SEQ ID NO: 1017) | 2023 | 2087 |
| T23657_T21 (SEQ ID NO: 1018) | 2023 | 2087 |
| T23657_T22 (SEQ ID NO: 1019) | 1850 | 1914 |
| T23657_T23 (SEQ ID NO: 1020) | 1654 | 1718 |
| T23657_T24 (SEQ ID NO: 1021) | 2023 | 2087 |
| T23657_T28 (SEQ ID NO: 1022) | 1880 | 1944 |
| T23657_T30 (SEQ ID NO: 1023) | 615 | 679 |
| T23657_T31 (SEQ ID NO: 1024) | 455 | 519 |
| T23657_T32 (SEQ ID NO: 1025) | 413 | 477 |
| T23657_T35 (SEQ ID NO: 1026) | 1008 | 1072 |
| T23657_T37 (SEQ ID NO: 1027) | 240 | 304 |
| T23657_T38 (SEQ ID NO: 1028) | 189 | 253 |

[3403] Segment cluster T23657_node_{—}32 (SEQ ID NO:1057) according to the present invention is supported by 5 libraries. The number of libraries was determined as previously described. This segment can be found in the following transcript(s): T23657_T4 (SEQ ID NO:1002), T23657_T6 (SEQ ID NO:1004) and T23657_T15 (SEQ ID NO:1013). Table 96 below describes the starting and ending position of this segment on each transcript.

TABLE 96
Segment location on transcripts

| | Segment | Segment |
|---|---|---|
| Transcript name | starting position | ending position |
| T23657_T4 (SEQ ID NO: 1002) | 2088 | 2150 |
| T23657_T6 (SEQ ID NO: 1004) | 2380 | 2442 |
| T23657_T15 (SEQ ID NO: 1013) | 2088 | 2150 |

[3404] Segment cluster T23657_node_{—}41 (SEQ ID NO:1058) according to the present invention is supported by 26 libraries. The number of libraries was determined as previously described. This segment can be found in the following transcript(s): T23657_T2 (SEQ ID NO:1000), T23657_T3 (SEQ ID NO:1001), T23657_T4 (SEQ ID NO:1002), T23657_T5 (SEQ ID NO:1003), T23657_T6 (SEQ ID NO:1004), T23657_T7 (SEQ ID NO:1005), T23657_T9 (SEQ ID NO:1007), T23657_T10 (SEQ ID NO:1008), T23657_T12 (SEQ ID NO:1010), T23657_T13 (SEQ ID NO:1011), T23657_T16 (SEQ ID NO:1014) and T23657_T35 (SEQ ID NO:1026). Table 97 below describes the starting and ending position of this segment on each transcript.

TABLE 97
Segment location on transcripts

| | Segment | Segment |
|---|---|---|
| Transcript name | starting position | ending position |
| T23657_T2 (SEQ ID NO: 1000) | 3974 | 4033 |
| T23657_T3 (SEQ ID NO: 1001) | 4272 | 4331 |
| T23657_T4 (SEQ ID NO: 1002) | 4335 | 4394 |
| T23657_T5 (SEQ ID NO: 1003) | 4266 | 4325 |
| T23657_T6 (SEQ ID NO: 1004) | 4627 | 4686 |
| T23657_T7 (SEQ ID NO: 1005) | 3974 | 4033 |
| T23657_T9 (SEQ ID NO: 1007) | 4272 | 4331 |
| T23657_T10 (SEQ ID NO: 1008) | 4367 | 4426 |
| T23657_T12 (SEQ ID NO: 1010) | 3801 | 3860 |
| T23657_T13 (SEQ ID NO: 1011) | 4129 | 4188 |
| T23657_T16 (SEQ ID NO: 1014) | 3974 | 4033 |
| T23657_T35 (SEQ ID NO: 1026) | 2959 | 3018 |

[3405] Segment cluster T23657_node_{—}42 (SEQ ID NO:1059) according to the present invention is supported by 71 libraries. The number of libraries was determined as previously described. This segment can be found in the following transcript(s): T23657_T0 (SEQ ID NO:998), T23657_T1 (SEQ ID NO:999), T23657_T2 (SEQ ID NO:1000), T23657_T3 (SEQ ID NO:1001), T23657_T4 (SEQ ID NO:1002), T23657_T5 (SEQ ID NO:1003), T23657_T6 (SEQ ID NO:1004), T23657_T7 (SEQ ID NO:1005), T23657_T8 (SEQ ID NO:1006), T23657_T9 (SEQ ID NO:1007), T23657_T10 (SEQ ID NO:1008), T23657_T11 (SEQ ID NO:1009), T23657_T12 (SEQ ID NO:1010), T23657_T13 (SEQ ID NO:1011), T23657_T14 (SEQ ID NO:1012), T23657_T15 (SEQ ID NO:1013), T23657_T17 (SEQ ID NO:1015), T23657_T19 (SEQ ID NO:1016), T23657_T20 (SEQ ID NO:1017), T23657_T21 (SEQ ID NO:1018), T23657_T22 (SEQ ID NO:1019), T23657_T23 (SEQ ID NO:1020), T23657_T30 (SEQ ID NO:1023), T23657_T31 (SEQ ID NO:1024), T23657_T32 (SEQ ID NO:1025), T23657_T35 (SEQ ID NO:1026) and T23657_T37 (SEQ ID NO:1027). Table 98 below describes the starting and ending position of this segment on each transcript.

TABLE 98
Segment location on transcripts

| | Segment | Segment |
|---|---|---|
| Transcript name | starting position | ending position |
| T23657_T0 (SEQ ID NO: 998) | 2237 | 2268 |
| T23657_T1 (SEQ ID NO: 999) | 2237 | 2268 |
| T23657_T2 (SEQ ID NO: 1000) | 4034 | 4065 |
| T23657_T3 (SEQ ID NO: 1001) | 4332 | 4363 |
| T23657_T4 (SEQ ID NO: 1002) | 4395 | 4426 |
| T23657_T5 (SEQ ID NO: 1003) | 4326 | 4357 |
| T23657_T6 (SEQ ID NO: 1004) | 4687 | 4718 |
| T23657_T7 (SEQ ID NO: 1005) | 4034 | 4065 |
| T23657_T8 (SEQ ID NO: 1006) | 2237 | 2268 |
| T23657_T9 (SEQ ID NO: 1007) | 4332 | 4363 |
| T23657_T10 (SEQ ID NO: 1008) | 4427 | 4458 |
| T23657_T11 (SEQ ID NO: 1009) | 2630 | 2661 |
| T23657_T12 (SEQ ID NO: 1010) | 3861 | 3892 |
| T23657_T13 (SEQ ID NO: 1011) | 4189 | 4220 |
| T23657_T14 (SEQ ID NO: 1012) | 2146 | 2177 |
| T23657_T15 (SEQ ID NO: 1013) | 2300 | 2331 |
| T23657_T17 (SEQ ID NO: 1015) | 2064 | 2095 |
| T23657_T19 (SEQ ID NO: 1016) | 2094 | 2125 |
| T23657_T20 (SEQ ID NO: 1017) | 2407 | 2438 |
| T23657_T21 (SEQ ID NO: 1018) | 2377 | 2408 |
| T23657_T22 (SEQ ID NO: 1019) | 2234 | 2265 |
| T23657_T23 (SEQ ID NO: 1020) | 1868 | 1899 |
| T23657_T30 (SEQ ID NO: 1023) | 829 | 860 |
| T23657_T31 (SEQ ID NO: 1024) | 669 | 700 |
| T23657_T32 (SEQ ID NO: 1025) | 627 | 658 |
| T23657_T35 (SEQ ID NO: 1026) | 3019 | 3050 |
| T23657_T37 (SEQ ID NO: 1027) | 454 | 485 |

[3406] Segment cluster T23657_node_{—}43 (SEQ ID NO:1060) according to the present invention is supported by 80 libraries. The number of libraries was determined as previously described. This segment can be found in the following transcript(s): T23657_T0 (SEQ ID NO:998), T23657_T1 (SEQ ID NO:999), T23657_T2 (SEQ ID NO:1000), T23657_T3 (SEQ ID NO:1001), T23657_T4 (SEQ ID NO:1002), T23657_T5 (SEQ ID NO:1003), T23657_T6 (SEQ ID NO:1004), T23657_T7 (SEQ ID NO:1005), T23657_T8 (SEQ ID NO:1006), T23657_T9 (SEQ ID NO:1007), T23657_T10 (SEQ ID NO:1008), T23657_T11 (SEQ ID NO:1009), T23657_T12 (SEQ ID NO:1010), T23657_T13 (SEQ ID NO:1011), T23657_T14 (SEQ ID NO:1012), T23657_T15 (SEQ ID NO:1013), T23657_T17 (SEQ ID NO:1015), T23657_T19 (SEQ ID NO:1016), T23657_T20 (SEQ ID NO:1017), T23657_T21 (SEQ ID NO:1018), T23657_T22 (SEQ ID NO:1019), T23657_T23 (SEQ ID NO:1020), T23657_T30 (SEQ ID NO:1023), T23657_T31 (SEQ ID NO:1024), T23657_T32 (SEQ ID NO:1025), T23657_T35 (SEQ ID NO:1026) and T23657_T37 (SEQ ID NO:1027). Table 99 below describes the starting and ending position of this segment on each transcript.

TABLE 99
Segment location on transcripts

| | Segment | Segment |
|---|---|---|
| Transcript name | starting position | ending position |
| T23657_T0 (SEQ ID NO: 998) | 2269 | 2329 |
| T23657_T1 (SEQ ID NO: 999) | 2269 | 2329 |
| T23657_T2 (SEQ ID NO: 1000) | 4066 | 4126 |
| T23657_T3 (SEQ ID NO: 1001) | 4364 | 4424 |
| T23657_T4 (SEQ ID NO: 1002) | 4427 | 4487 |
| T23657_T5 (SEQ ID NO: 1003) | 4358 | 4418 |
| T23657_T6 (SEQ ID NO: 1004) | 4719 | 4779 |
| T23657_T7 (SEQ ID NO: 1005) | 4066 | 4126 |
| T23657_T8 (SEQ ID NO: 1006) | 2269 | 2329 |
| T23657_T9 (SEQ ID NO: 1007) | 4364 | 4424 |
| T23657_T10 (SEQ ID NO: 1008) | 4459 | 4519 |
| T23657_T11 (SEQ ID NO: 1009) | 2662 | 2722 |
| T23657_T12 (SEQ ID NO: 1010) | 3893 | 3953 |
| T23657_T13 (SEQ ID NO: 1011) | 4221 | 4281 |
| T23657_T14 (SEQ ID NO: 1012) | 2178 | 2238 |
| T23657_T15 (SEQ ID NO: 1013) | 2332 | 2392 |
| T23657_T17 (SEQ ID NO: 1015) | 2096 | 2156 |
| T23657_T19 (SEQ ID NO: 1016) | 2126 | 2186 |
| T23657_T20 (SEQ ID NO: 1017) | 2439 | 2499 |
| T23657_T21 (SEQ ID NO: 1018) | 2409 | 2469 |
| T23657_T22 (SEQ ID NO: 1019) | 2266 | 2326 |
| T23657_T23 (SEQ ID NO: 1020) | 1900 | 1960 |
| T23657_T30 (SEQ ID NO: 1023) | 861 | 921 |
| T23657_T31 (SEQ ID NO: 1024) | 701 | 761 |
| T23657_T32 (SEQ ID NO: 1025) | 659 | 719 |
| T23657_T35 (SEQ ID NO: 1026) | 3051 | 3111 |
| T23657_T37 (SEQ ID NO: 1027) | 486 | 546 |

[3407] Segment cluster T23657_node_{—}44 (SEQ ID NO:1061) according to the present invention is supported by 79 libraries. The number of libraries was determined as previously described. This segment can be found in the following transcript(s): T23657_T0 (SEQ ID NO:998), T23657_T1 (SEQ ID NO:999), T23657_T2 (SEQ ID NO:1000), T23657_T3 (SEQ ID NO:1001), T23657_T4 (SEQ ID NO:1002), T23657_T5 (SEQ ID NO:1003), T23657_T6 (SEQ ID NO:1004), T23657_T7 (SEQ ID NO:1005), T23657_T8 (SEQ ID NO:1006), T23657_T9 (SEQ ID NO:1007), T23657_T10 (SEQ ID NO:1008), T23657_T11 (SEQ ID NO:1009), T23657_T12 (SEQ ID NO:1010), T23657_T13 (SEQ ID NO:1011), T23657_T14 (SEQ ID NO:1012), T23657_T15 (SEQ ID NO:1013), T23657_T16 (SEQ ID NO:1014), T23657_T17 (SEQ ID NO:1015), T23657_T19 (SEQ ID NO:1016), T23657_T20 (SEQ ID NO:1017), T23657_T21 (SEQ ID NO:1018), T23657_T22 (SEQ ID NO:1019), T23657_T23 (SEQ ID NO:1020), T23657_T30 (SEQ ID NO:1023), T23657_T31 (SEQ ID NO:1024), T23657_T32 (SEQ ID NO:1025), T23657_T35 (SEQ ID NO:1026) and T23657_T37 (SEQ ID NO:1027). Table 100 below describes the starting and ending position of this segment on each transcript.

TABLE 100
Segment location on transcripts

| | Segment | Segment |
|---|---|---|
| Transcript name | starting position | ending position |
| T23657_T0 (SEQ ID NO: 998) | 2330 | 2362 |
| T23657_T1 (SEQ ID NO: 999) | 2330 | 2362 |
| T23657_T2 (SEQ ID NO: 1000) | 4127 | 4159 |
| T23657_T3 (SEQ ID NO: 1001) | 4425 | 4457 |
| T23657_T4 (SEQ ID NO: 1002) | 4488 | 4520 |
| T23657_T5 (SEQ ID NO: 1003) | 4419 | 4451 |
| T23657_T6 (SEQ ID NO: 1004) | 4780 | 4812 |
| T23657_T7 (SEQ ID NO: 1005) | 4127 | 4159 |
| T23657_T8 (SEQ ID NO: 1006) | 2330 | 2362 |
| T23657_T9 (SEQ ID NO: 1007) | 4425 | 4457 |
| T23657_T10 (SEQ ID NO: 1008) | 4520 | 4552 |
| T23657_T11 (SEQ ID NO: 1009) | 2723 | 2755 |
| T23657_T12 (SEQ ID NO: 1010) | 3954 | 3986 |
| T23657_T13 (SEQ ID NO: 1011) | 4282 | 4314 |
| T23657_T14 (SEQ ID NO: 1012) | 2239 | 2271 |
| T23657_T15 (SEQ ID NO: 1013) | 2393 | 2425 |
| T23657_T16 (SEQ ID NO: 1014) | 4034 | 4066 |
| T23657_T17 (SEQ ID NO: 1015) | 2157 | 2189 |
| T23657_T19 (SEQ ID NO: 1016) | 2187 | 2219 |
| T23657_T20 (SEQ ID NO: 1017) | 2500 | 2532 |
| T23657_T21 (SEQ ID NO: 1018) | 2470 | 2502 |
| T23657_T22 (SEQ ID NO: 1019) | 2327 | 2359 |
| T23657_T23 (SEQ ID NO: 1020) | 1961 | 1993 |
| T23657_T30 (SEQ ID NO: 1023) | 922 | 954 |
| T23657_T31 (SEQ ID NO: 1024) | 762 | 794 |
| T23657_T32 (SEQ ID NO: 1025) | 720 | 752 |
| T23657_T35 (SEQ ID NO: 1026) | 3112 | 3144 |
| T23657_T37 (SEQ ID NO: 1027) | 547 | 579 |

### Variant Protein Alignment to the Previously Known Protein:

Sequence name: S21C_HUMAN (SEQ ID NO:1062)
Sequence documentation:
Alignment of: T23657_P2 (SEQ ID NO:1064) × S21C_HUMAN (SEQ ID NO:1062) ..
Alignment segment 1/1:

| | | | |
|---|---|---|---|
| Quality: | 6620.00 | Escore: | 0 |
| Matching length: | 675 | Total length: | 675 |
| Matching Percent Similarity: | 100.00 | Matching Percent Identity: | 100.00 |
| Total Percent Similarity: | 100.00 | Total Percent Identity: | 100.00 |
| Gaps: | 0 | | |
| Alignment: | | | |

[chemical structure]

[chemical structure]

[chemical structure]

[chemical structure]

[chemical structure]

[chemical structure]

[chemical structure]

[chemical structure]

[chemical structure]

[chemical structure]

[chemical structure]

[chemical structure]

[chemical structure]

[chemical structure]

Sequence name: S21C_HUMAN (SEQ ID NO:1062)
Sequence documentation:
Alignment of: T23657_P3 (SEQ ID NO:1065) × S21C_HUMAN (SEQ ID NO:1062) ..
Alignment segment 1/1:

| | | | |
|---|---|---|---|
| Quality: | 6621.00 | Escore: | 0 |
| Matching length: | 677 | Total length: | 677 |
| Matching Percent Similarity: | 99.85 | Matching Percent Identity: | 99.70 |
| Total Percent Similarity: | 99.85 | Total Percent Identity: | 99.70 |
| Gaps: | 0 | | |
| Alignment: | | | |

[chemical structure]

[chemical structure]

[chemical structure]

[chemical structure]

[chemical structure]

[chemical structure]

[chemical structure]

[chemical structure]

[chemical structure]

[chemical structure]

[chemical structure]

[chemical structure]

[chemical structure]

[chemical structure]

Sequence name: S21C_HUMAN (SEQ ID NO:1062)
Sequence documentation:
Alignment of: T23657_P4 (SEQ ID NO:1066) × S21C_HUMAN (SEQ ID NO:1062) ..
Alignment segment 1/1:

| | | | |
|---|---|---|---|
| Quality: | 6521.00 | Escore: | 0 |
| Matching length: | 677 | Total length: | 698 |
| Matching Percent Similarity: | 99.85 | Matching Percent Identity: | 99.70 |
| Total Percent Similarity: | 96.85 | Total Percent Identity: | 96.70 |
| Gaps: | 1 | | |
| Alignment: | | | |

[chemical structure]

[chemical structure]

[chemical structure]

[chemical structure]

[chemical structure]

[chemical structure]

[chemical structure]

[chemical structure]

[chemical structure]

[chemical structure]

[chemical structure]

[chemical structure]

[chemical structure]

[chemical structure]

Sequence name: S21C_HUMAN (SEQ ID NO:1062)
Sequence documentation:
Alignment of: T23657_P5 (SEQ ID NO:1067) × S21C_HUMAN (SEQ ID NO:1062) ..
Alignment segment 1/1:

| | | | |
|---|---|---|---|
| Quality: | 5909.00 | Escore: | 0 |
| Matching length: | 604 | Total length: | 604 |
| Matching Percent Similarity: | 100.00 | Matching Percent Identity: | 100.00 |
| Total Percent Similarity: | 100.00 | Total Percent Identity: | 100.00 |
| Gaps: | 0 | | |
| Alignment: | | | |

[chemical structure]

[chemical structure]

[chemical structure]

[chemical structure]

[chemical structure]

[chemical structure]

[chemical structure]

[chemical structure]

[chemical structure]

[chemical structure]

[chemical structure]

[chemical structure]

[chemical structure]

Sequence name: S21C_HUMAN (SEQ ID NO:1062)
Sequence documentation:
Alignment of: T23657_P6 (SEQ ID NO:1068) × S21C_HUMAN (SEQ ID NO:1062) ..
Alignment segment 1/1:

| | | | |
|---|---|---|---|
| Quality: | 5354.00 | Escore: | 0 |
| Matching length: | 547 | Total length: | 547 |
| Matching Percent Similarity: | 100.00 | Matching Percent Identity: | 100.00 |
| Total Percent Similarity: | 100.00 | Total Percent Identity: | 100.00 |
| Gaps: | 0 | | |
| Alignment: | | | |

[chemical structure]

[chemical structure]

[chemical structure]

[chemical structure]

[chemical structure]

[chemical structure]

[chemical structure]

[chemical structure]

[chemical structure]

[chemical structure]

[chemical structure]

Sequence name: S21C_HUMAN (SEQ ID NO:1062)
Sequence documentation:
Alignment of: T23657_P7 (SEQ ID NO:1069) × S21C_HUMAN (SEQ ID NO:1062) ..
Alignment segment 1/1:

| | | | |
|---|---|---|---|
| Quality: | 5346.00 | Escore: | 0 |
| Matching length: | 546 | Total length: | 546 |
| Matching Percent Similarity: | 100.00 | Matching Percent Identity: | 100.00 |
| Total Percent Similarity: | 100.00 | Total Percent Identity: | 100.00 |
| Gaps: | 0 | | |
| Alignment: | | | |

[chemical structure]

[chemical structure]

[chemical structure]

[chemical structure]

[chemical structure]

[chemical structure]

[chemical structure]

[chemical structure]

[chemical structure]

[chemical structure]

[chemical structure]

Sequence name: S21C_HUMAN (SEQ ID NO:1062)
Sequence documentation:
Alignment of: T23657_P8 (SEQ ID NO:1070) × S21C_HUMAN (SEQ ID NO:1062) ..
Alignment segment 1/1:

| | | | |
|---|---|---|---|
| Quality: | 5346.00 | Escore: | 0 |
| Matching length: | 546 | Total length: | 546 |
| Matching Percent Similarity: | 100.00 | Matching Percent Identity: | 100.00 |
| Total Percent Similarity: | 100.00 | Total Percent Identity: | 100.00 |
| Gaps: | 0 | | |
| Alignment: | | | |

[chemical structure]

[chemical structure]

[chemical structure]

[chemical structure]

[chemical structure]

[chemical structure]

[chemical structure]

[chemical structure]

[chemical structure]

[chemical structure]

[chemical structure]

Sequence name: S21C_HUMAN (SEQ ID NO:1062)
Sequence documentation:
Alignment of: T23657_P10 (SEQ ID NO:1072) × S21C_HUMAN (SEQ ID NO:1062)
Alignment segment 1/1:

| | | | |
|---|---|---|---|
| Quality: | 6968.00 | Escore: | 0 |
| Matching length: | 722 | Total length: | 743 |
| Matching Percent Similarity: | 100.00 | Matching Percent Identity: | 100.00 |
| Total Percent Similarity: | 97.17 | Total Percent Identity: | 97.17 |
| Gaps: | 1 | | |
| Alignment: | | | |

[chemical structure]

[chemical structure]

[chemical structure]

[chemical structure]

[chemical structure]

[chemical structure]

[chemical structure]

[chemical structure]

[chemical structure]

[chemical structure]

[chemical structure]

[chemical structure]

[chemical structure]

[chemical structure]

[chemical structure]

Sequence name: S21C_HUMAN (SEQ ID NO:1062)
Sequence documentation:
Alignment of: T23657_P11 (SEQ ID NO:1073) × S21C_HUMAN (SEQ ID NO:1062)
Alignment segment 1/1:

| | | | |
|---|---|---|---|
| Quality: | 4156.00 | Escore: | 0 |
| Matching length: | 425 | Total length: | 425 |
| Matching Percent Similarity: | 100.00 | Matching Percent Identity: | 100.00 |
| Total Percent Similarity: | 100.00 | Total Percent Identity: | 100.00 |
| Gaps: | 0 | | |
| Alignment: | | | |

[chemical structure]

[chemical structure]

[chemical structure]

[chemical structure]

[chemical structure]

[chemical structure]

[chemical structure]

[chemical structure]

[chemical structure]

Sequence name: S21C_HUMAN (SEQ ID NO:1062)
Sequence documentation:
Alignment of: T23657_P12 (SEQ ID NO:1074) × S21C_HUMAN (SEQ ID NO:1062)
Alignment segment 1/1:

| | | | |
|---|---|---|---|
| Quality: | 6620.00 | Escore: | 0 |
| Matching length: | 675 | Total length: | 675 |
| Matching Percent Similarity: | 100.00 | Matching Percent Identity: | 100.00 |
| Total Percent Similarity: | 100.00 | Total Percent Identity: | 100.00 |
| Gaps: | 0 | | |
| Alignment: | | | |

[chemical structure]

[chemical structure]

[chemical structure]

[chemical structure]

[chemical structure]

[chemical structure]

[chemical structure]

[chemical structure]

[chemical structure]

[chemical structure]

[chemical structure]

[chemical structure]

[chemical structure]

[chemical structure]

Sequence name: S2lC_HUMAN (SEQ ID NO:1062)
Sequence documentation:
Alignment of: T23657_P16 (SEQ ID NO:1075) × S21C_HUMAN (SEQ ID NO:1062)
Alignment segment 1/1:

| | | | |
|---|---|---|---|
| Quality: | 2296.00 | Escore: | 0 |
| Matching length: | 232 | Total length: | 232 |
| Matching Percent Similarity: | 100.00 | Matching Percent Identity: | 100.00 |
| Total Percent Similarity: | 100.00 | Total Percent Identity: | 100.00 |
| Gaps: | 0 | | |
| Alignment: | | | |

[chemical structure]

[chemical structure]

[chemical structure]

[chemical structure]

[chemical structure]

Sequence name: S21C_HUMAN (SEQ ID NO:1062)
Sequence documentation:
Alignment of: T23657_P17 (SEQ ID NO:1076) × S21C_HUMAN (SEQ ID NO:1062)
Alignment segment 1/1:

| | | | |
|---|---|---|---|
| Quality: | 1947.00 | Escore: | 0 |
| Matching length: | 198 | Total length: | 198 |
| Matching Percent Similarity: | 100.00 | Matching Percent Identity: | 100.00 |
| Total Percent Similarity: | 100.00 | Total Percent Identity: | 100.00 |
| Gaps: | 0 | | |
| Alignment: | | | |

[chemical structure]

[chemical structure]

[chemical structure]

[chemical structure]

Sequence name: S21C_HUMAN (SEQ ID NO:1062)
Sequence documentation:
Alignment of: T23657_P21 (SEQ ID NO:1078) × S21C_HUMAN (SEQ ID NO:1062)
Alignment segment 1/1:

| | | | |
|---|---|---|---|
| Quality: | 1169.00 | Escore: | 0 |
| Matching length: | 119 | Total length: | 119 |
| Matching Percent Similarity: | 100.00 | Matching Percent Identity: | 100.00 |
| Total Percent Similarity: | 100.00 | Total Percent Identity: | 100.00 |
| Gaps: | 0 | | |
| Alignment: | | | |

[chemical structure]

[chemical structure]

[chemical structure]

Sequence name: S21C_HUMAN (SEQ ID NO:1062)
Sequence documentation:
Alignment of: T23657_P23 (SEQ ID NO:1080) × S21C_HUMAN (SEQ ID NO:1062)
Alignment segment 1/1:

| | | | |
|---|---|---|---|
| Quality: | 5354.00 | Escore: | 0 |
| Matching length: | 547 | Total length: | 547 |
| Matching Percent Similarity: | 100.00 | Matching Percent Identity: | 100.00 |
| Total Percent Similarity: | 100.00 | Total Percent Identity: | 100.00 |
| Gaps: | 0 | | |
| Alignment: | | | |

[chemical structure]

[chemical structure]

[chemical structure]

[chemical structure]

[chemical structure]

[chemical structure]

[chemical structure]

[chemical structure]

[chemical structure]

[chemical structure]

[chemical structure]

### Expression of Solute Carrier Organic Anion Transporter Family, Member 4A1 (SLCO4A1) T23657 Transcripts, which are Detectable by Amplicon as Depicted in Sequence Name T23657 Seg17-18 (SEQ ID NO: 1357), in Normal and Cancerous Colon Tissues

[3409] Expression of solute carrier organic anion transporter family, member 4A1 (SLCO4A1) transcripts detectable by or according to seg17-18, T23657 amplicon (SEQ ID NO: 1357) and T23657 Seg17-18F (SEQ ID NO: 1355) T23657 Seg17-18 R (SEQ ID NO: 1356) primers was measured by real time PCR. In parallel the expression of four housekeeping genes —PBGD (GenBank Accession No. BC019323 (SEQ ID NO:1576); amplicon —PBGD-amplicon, SEQ ID NO:531), HPRT1 (GenBank Accession No. NM_{—}000194 (SEQ ID NO:1577); amplicon—HPRT1-amplicon, SEQ ID NO:612), G6PD (GenBank Accession No. NM_{—}000402 (SEQ ID NO:1578); G6PD amplicon, SEQ ID NO:615), RPS27A (GenBank Accession No. NM_{—}002954 (SEQ ID NO:1579); RPS27A amplicon, SEQ ID NO:1261), was measured similarly. For each RT sample, the expression of the above amplicon was normalized to the geometric mean of the quantities of the housekeeping genes. The normalized quantity of each RT sample was then divided by the median of the quantities of the normal post-mortem (PM) samples (Sample Nos. 41, 52, 62-67, 69-71, Table 1, above, “Tissue samples in testing panel”), to obtain a value of fold up-regulation for each sample relative to median of the normal PM samples.

[3410] FIG. 59 is a histogram showing over expression of the above-indicated solute carrier organic anion transporter family, member 4A1 (SLCO4A1) transcripts in cancerous colon samples relative to the normal samples. (Values represent the average of duplicate experiments. Error bars indicate the minimal and maximal values obtained). The number and percentage of samples that exhibit at least 4 fold over-expression, out of the total number of samples tested is indicated in the bottom.

[3411] As is evident from FIG. 59, the expression of solute carrier organic anion transporter family, member 4A1 (SLCO4A1) transcripts detectable by the above amplicon in cancer samples was significantly higher than in the non-cancerous samples (Sample Nos. 41, 52, 62-67, 69-71, Table 1, “Tissue samples in testing panel”). Notably an over-expression of at least 4 fold was found in 28 out of 37 adenocarcinoma samples,

[3412] Statistical analysis was applied to verify the significance of these results, as described below.

[3413] The P value for the difference in the expression levels of solute carrier organic anion transporter family, member 4A1 (SLCO4A1) transcripts detectable by the above amplicon in colon cancer samples versus the normal tissue samples was determined by T test as 7.22E-04.

[3414] Threshold of 4 fold overexpression was found to differentiate between cancer and normal samples with P value of 7.43E-06 as checked by exact fisher test. The above values demonstrate statistical significance of the results.

[3415] Primer pairs are also optionally and preferably encompassed within the present invention; for example, for the above experiment, the following primer pair was used as a non-limiting illustrative example only of a suitable primer pair: T23657seg17-18F forward primer (SEQ ID NO: 1355); and T23657seg17-18R reverse primer (SEQ ID NO: 1356).

[3416] The present invention also preferably encompasses any amplicon obtained through the use of any suitable primer pair; for example, for the above experiment, the following amplicon was obtained as a non-limiting illustrative example only of a suitable amplicon: T23657seg17-18 (SEQ ID NO: 1357).

Forward primer (SEQ ID NO: 1355):
CTGCTGGGCATCCTCGTCT
Reverse primer (SEQ ID NO: 1356):
CGTACCCAGGTGCCATCTG
Amplicon (SEQ ID NO: 1357):
CTGGGCATCCTCGTCTTCTCACTGCACTGCCCCAGTGTGCCCATGGCGGG
CGTCACAGCCAGCTACGGCGGGAGGTGAGGGCCAGATGGCACCTGGGTAC
G

### Expression of Solute Carrier Organic Anion Transporter Family, Member 4A1 (SLC04A1) T23657 Transcripts which are Detectable by Amplicon as Depicted in Sequence Name T23657 Seg22 (SEQ ID NO: 1360) in Normal and Cancerous Colon Tissues

[3417] Expression of solute carrier organic anion transporter family, member 4A1 (SLCO4A1) transcripts detectable by or according to seg22, T23657 amplicon (SEQ ID NO: 1360) and T23657 seg22F (SEQ ID NO: 1358) T23657 seg22 R (SEQ ID NO: 1359) primers was measured by real time PCR. In parallel the expression of four housekeeping genes —PBGD (GenBank Accession No. BC019323 (SEQ ID NO:1576); amplicon—PBGD-amplicon, SEQ ID NO:531), HPRT1 (GenBank Accession No. NM_{—}000194 (SEQ ID NO:1577); amplicon —HPRT1-amplicon, SEQ ID NO:612), G6PD (GenBank Accession No. NM_{—}000402 (SEQ ID NO:1578); G6PD amplicon, SEQ ID NO:615), RPS27A (GenBank Accession No. NM_{—}002954 (SEQ ID NO:1579); RPS27A amplicon, SEQ ID NO:1261), was measured similarly. For each RT sample, the expression of the above amplicon was normalized to the geometric mean of the quantities of the housekeeping genes. The normalized quantity of each RT sample was then divided by the median of the quantities of the normal post-mortem (PM) samples (Sample Nos. 41, 52, 62-67, 69-71, Table 1, above, “Tissue samples in testing panel”), to obtain a value of fold up-regulation for each sample relative to median of the normal PM samples.

[3418] FIG. 60 is a histogram showing over expression of the above-indicated solute carrier organic anion transporter family, member 4A1 (SLCO4A1) transcripts in cancerous colon samples relative to the normal samples (values represent the average of duplicate experiments. Error bars indicate the minimal and maximal values obtained). The number and percentage of samples that exhibit at least 4 fold over-expression, out of the total number of samples tested is indicated in the bottom.

[3419] As is evident from FIG. 60, the expression of solute carrier organic anion transporter family, member 4A1 (SLCO4A1) transcripts detectable by the above amplicon in cancer samples was significantly higher than in the non-cancerous samples (Sample Nos. 41, 52, 62-67, 69-71, Table 1, “Tissue samples in testing panel”). Notably an over-expression of at least 4 fold was found in 20 out of 37 adenocarcinoma samples,

[3420] Statistical analysis was applied to verify the significance of these results, as described below.

[3421] The P value for the difference in the expression levels of solute carrier organic anion transporter family, member 4A1 (SLCO4A1) transcripts detectable by the above amplicon in colon cancer samples versus the normal tissue samples was determined by T test as 3.62E-03.

[3422] Threshold of 4 fold overexpression was found to differentiate between cancer and normal samples with P value of 9.50E-04 as checked by exact fisher test. The above values demonstrate statistical significance of the results.

[3423] Primer pairs are also optionally and preferably encompassed within the present invention; for example, for the above experiment, the following primer pair was used as a non-limiting illustrative example only of a suitable primer pair: T23657seg22F forward primer (SEQ ID NO: 1358); and T23657seg22R reverse primer (SEQ ID NO: 1359).

[3424] The present invention also preferably encompasses any amplicon obtained through the use of any suitable primer pair; for example, for the above experiment, the following amplicon was obtained as a non-limiting illustrative example only of a suitable amplicon: T23657seg22 (SEQ ID NO: 1360).

Forward primer (SEQ ID NO: 1358):
TGGCAAGTTTGTAGACCCGAA
Reverse primer (SEQ ID NO: 1359):
GGTAGGGTCCAGGCCAGAG
Amplicon (SEQ ID NO: 1360):
TGGCAAGTTTGTAGACCCGAAATGCAGGCTGCATGGGGACGAGCCCCATG
GCTGACCCTGTGCCTGCTGGGCGCCAGCATGGCTCTGGCCTGGACCCTAC
C

### Expression of Solute Carrier Organic Anion Transporter Family, Member 4A1 (SLC04A1) T23657 Transcripts which are Detectable by Amplicon as Depicted in Sequence Name T23657 Seg29-32 (SEQ ID NO: 1363) in Normal and Cancerous Colon Tissues

[3425] Expression of solute carrier organic anion transporter family, member 4A1 (SLCO4A1) transcripts detectable by or according to seg29-32, T23657 amplicon (SEQ ID NO: 1363) and T23657 seg29-32F (SEQ ID NO: 1361) T23657 seg29-32 R (SEQ ID NO: 1362) primers was measured by real time PCR. In parallel the expression of four housekeeping genes —PBGD (GenBank Accession No. BC019323 (SEQ ID NO:1576); amplicon —PBGD-amplicon, SEQ ID NO:531), HPRT1 (GenBank Accession No. NM_{—}000194 (SEQ ID NO:1577); amplicon—HPRT1-amplicon, SEQ ID NO:612), G6PD (GenBank Accession No. NM_{—}000402 (SEQ ID NO:1578); G6PD amplicon, SEQ ID NO:615), RPS27A (GenBank Accession No. NM_{—}002954 (SEQ ID NO:1579); RPS27A amplicon, SEQ ID NO:1261), was measured similarly. For each RT sample, the expression of the above amplicon was normalized to the geometric mean of the quantities of the housekeeping genes. The normalized quantity of each RT sample was then divided by the median of the quantities of the normal post-mortem (PM) samples (Sample Nos. 41, 52, 62-67, 69-71, Table 1, above, “Tissue samples in testing panel”), to obtain a value of fold up-regulation for each sample relative to median of the normal PM samples.

[3426] FIG. 61 is a histogram showing over expression of the above-indicated solute carrier organic anion transporter family, member 4A1 (SLCO4A1) transcripts in cancerous colon samples relative to the normal samples. The number and percentage of samples that exhibit at least 3 fold over-expression, out of the total number of samples tested is indicated in the bottom.

[3427] As is evident from FIG. 61, the expression of solute carrier organic anion transporter family, member 4A1 (SLCO4A1) transcripts detectable by the above amplicon in cancer samples was significantly higher than in the non-cancerous samples (Sample Nos. 41, 52, 62-67, 69-71, Table 1, “Tissue samples in testing panel”). Notably an over-expression of at least 3 fold was found in 23 out of 37 adenocarcinoma samples,

[3428] Statistical analysis was applied to verify the significance of these results, as described below.

[3429] The P value for the difference in the expression levels of solute carrier organic anion transporter family, member 4A1 (SLCO4A1) transcripts detectable by the above amplicon in colon cancer samples versus the normal tissue samples was determined by T test as 1.39E-07.

[3430] Threshold of 3 fold overexpression was found to differentiate between cancer and normal samples with P value of 1.97E-04 as checked by exact fisher test. The above values demonstrate statistical significance of the results.

[3431] Primer pairs are also optionally and preferably encompassed within the present invention; for example, for the above experiment, the following primer pair was used as a non-limiting illustrative example only of a suitable primer pair: T23657seg29-32F forward primer (SEQ ID NO: 1361); and T23657seg29-32R reverse primer (SEQ ID NO: 1362).

[3432] The present invention also preferably encompasses any amplicon obtained through the use of any suitable primer pair; for example, for the above experiment, the following amplicon was obtained as a non-limiting illustrative example only of a suitable amplicon: T23657seg29-32 (SEQ ID NO: 1363).

Forward primer (SEQ ID NO: 1361):
CCTTTGCCCTGGGAATCC
Reverse primer (SEQ ID NO: 1362):
GCCCTGCTGGCCACAC
Amplicon (SEQ ID NO: 1363):
CCTTTGCCCTGGGAATCCAGTGGATTGTAGTTAGAATACTAGGGGGCATC
CCGGGGCCCATCGCCTTCGGCTGGGTGATCGACAAGGCCTGTCTGCTGTG
GCAGGACCAGTGTGGCCAGCAGGGC

### Expression of Solute Carrier Organic Anion Transporter Family, Member 4A1 (SLC04A1) T23657 Transcripts which are Detectable by Amplicon as Depicted in Sequence Name T23657 Seg41 (SEQ ID NO: 1366) in Normal and Cancerous Colon Tissues

[3433] Expression of solute carrier organic anion transporter family, member 4A1 (SLCO4A1) transcripts detectable by or according to seg41, T23657 amplicon (SEQ ID NO: 1366) and T23657 Seg41F (SEQ ID NO: 1364) T23657 Seg41 R (SEQ ID NO: 1365) primers was measured by real time PCR. In parallel the expression of four housekeeping genes —PBGD (GenBank Accession No. BC019323 (SEQ ID NO:1576); amplicon—PBGD-amplicon, SEQ ID NO:531), HPRT1 (GenBank Accession No. NM_{—}000194 (SEQ ID NO:1577); amplicon—HPRT1-amplicon, SEQ ID NO:612), G6PD (GenBank Accession No. NM_{—}000402 (SEQ ID NO:1578); G6PD amplicon, SEQ ID NO:615), RPS27A (GenBank Accession No. NM_{—}002954 (SEQ ID NO:1579); RPS27A amplicon, SEQ ID NO:1261), was measured similarly. For each RT sample, the expression of the above amplicon was normalized to the geometric mean of the quantities of the housekeeping genes. The normalized quantity of each RT sample was then divided by the median of the quantities of the normal post-mortem (PM) samples (Sample Nos. 41, 52, 62-67, 69-71, Table 1, above, “Tissue samples in testing panel”), to obtain a value of fold up-regulation for each sample relative to median of the normal PM samples.

[3434] FIG. 62 is a histogram showing over expression of the above-indicated solute carrier organic anion transporter family, member 4A1 (SLCO4A1) transcripts in cancerous colon samples relative to the normal samples. The number and percentage of samples that exhibit at least 4 fold over-expression, out of the total number of samples tested is indicated in the bottom.

[3435] As is evident from FIG. 62, the expression of solute carrier organic anion transporter family, member 4A1 (SLCO4A1) transcripts detectable by the above amplicon in cancer samples was significantly higher than in the non-cancerous samples (Sample Nos. 41, 52, 62-67, 69-71, Table 1, “Tissue samples in testing panel”). Notably an over-expression of at least 4 fold was found in 6 out of 37 adenocarcinoma samples,

[3436] Statistical analysis was applied to verify the significance of these results, as described below.

[3437] The P value for the difference in the expression levels of solute carrier organic anion transporter family, member 4A1 (SLCO4A1) transcripts detectable by the above amplicon in colon cancer samples versus the normal tissue samples was determined by T test as 3.02E-03.

[3438] Threshold of 4 fold overexpression was found to differentiate between cancer and normal samples with P value of 1.89E-01 as checked by exact fisher test. The above values demonstrate statistical significance of the results.

[3439] Primer pairs are also optionally and preferably encompassed within the present invention; for example, for the above experiment, the following primer pair was used as a non-limiting illustrative example only of a suitable primer pair: T23657seg41F forward primer (SEQ ID NO: 1364); and T23657seg41R reverse primer (SEQ ID NO: 1365).

[3440] The present invention also preferably encompasses any amplicon obtained through the use of any suitable primer pair; for example, for the above experiment, the following amplicon was obtained as a non-limiting illustrative example only of a suitable amplicon: T23657seg41 (SEQ ID NO: 1366).

Forward primer (SEQ ID NO: 1364):
CCGTGATGGATGTGGAGTCTC
Reverse primer (SEQ ID NO: 1365):
GCATCGGAAGCAAATGCATT
Amplicon (SEQ ID NO: 1366):
CCGTGATGGATGTGGAGTCTCGGCTTTCTGACAACGTCTTCCAGAGCAGG
CTTTCTCTAGAGGGTGGACTGCCTGTGTTCTCCTGGGAGAGAATGCATTT
GCTTCCGATGC

### Description for Cluster T51958

[3441] Cluster T51958 features 12 transcript(s) and 48 segment(s) of interest, the names for which are given in Tables 1 and 2, respectively, the sequences themselves are given at the end of the application. The selected protein variants are given in table 3.

TABLE 1
Transcripts of interest

| Transcript Name | SEQ ID NO: |
|---|---|
| T51958_PEA_1_T4 | 1081 |
| T51958_PEA_1_T5 | 1082 |
| T51958_PEA_1_T6 | 1083 |
| T51958_PEA_1_T8 | 1084 |
| T51958_PEA_1_T12 | 1085 |
| T51958_PEA_1_T16 | 1086 |
| T51958_PEA_1_T33 | 1087 |
| T51958_PEA_1_T35 | 1088 |
| T51958_PEA_1_T37 | 1089 |
| T51958_PEA_1_T39 | 1090 |
| T51958_PEA_1_T40 | 1091 |
| T51958_PEA_1_T41 | 1092 |

TABLE 2
Segments of interest

| Segment Name | SEQ ID NO: |
|---|---|
| T51958_PEA_1_node_0 | 1093 |
| T51958_PEA_1_node_7 | 1094 |
| T51958_PEA_1_node_8 | 1095 |
| T51958_PEA_1_node_9 | 1096 |
| T51958_PEA_1_node_14 | 1097 |
| T51958_PEA_1_node_16 | 1098 |
| T51958_PEA_1_node_18 | 1099 |
| T51958_PEA_1_node_21 | 1100 |
| T51958_PEA_1_node_22 | 1101 |
| T51958_PEA_1_node_24 | 1102 |
| T51958_PEA_1_node_27 | 1103 |
| T51958_PEA_1_node_29 | 1104 |
| T51958_PEA_1_node_33 | 1105 |
| T51958_PEA_1_node_40 | 1106 |
| T51958_PEA_1_node_41 | 1107 |
| T51958_PEA_1_node_46 | 1108 |
| T51958_PEA_1_node_51 | 1109 |
| T51958_PEA_1_node_55 | 1110 |
| T51958_PEA_1_node_67 | 1111 |
| T51958_PEA_1_node_70 | 1112 |
| T51958_PEA_1_node_74 | 1113 |
| T51958_PEA_1_node_78 | 1114 |
| T51958_PEA_1_node_11 | 1115 |
| T51958_PEA_1_node_15 | 1116 |
| T51958_PEA_1_node_20 | 1117 |
| T51958_PEA_1_node_26 | 1118 |
| T51958_PEA_1_node_35 | 1119 |
| T51958_PEA_1_node_36 | 1120 |
| T51958_PEA_1_node_38 | 1121 |
| T51958_PEA_1_node_39 | 1122 |
| T51958_PEA_1_node_42 | 1123 |
| T51958_PEA_1_node_43 | 1124 |
| T51958_PEA_1_node_44 | 1125 |
| T51958_PEA_1_node_45 | 1126 |
| T51958_PEA_1_node_47 | 1127 |
| T51958_PEA_1_node_48 | 1128 |
| T51958_PEA_1_node_49 | 1129 |
| T51958_PEA_1_node_50 | 1130 |
| T51958_PEA_1_node_54 | 1131 |
| T51958_PEA_1_node_61 | 1132 |
| T51958_PEA_1_node_71 | 1133 |
| T51958_PEA_1_node_72 | 1134 |
| T51958_PEA_1_node_75 | 1135 |
| T51958_PEA_1_node_76 | 1136 |
| T51958_PEA_1_node_77 | 1137 |
| T51958_PEA_1_node_80 | 1138 |
| T51958_PEA_1_node_82 | 1139 |
| T51958_PEA_1_node_84 | 1140 |

TABLE 3
Proteins of interest

| | SEQ | |
|---|---|---|
| | ID | |
| Protein Name | NO: | Corresponding Transcript(s) |
| T51958_PEA_1_P5 | 1151 | T51958_PEA_1_T4 (SEQ ID NO: |
| | | 1081); T51958_PEA_1_T12 (SEQ |
| | | ID NO: 1085); T51958_PEA_1_T16 |
| | | (SEQ ID NO: 1086); |
| | | T51958_PEA_1_T33 (SEQ ID NO: |
| | | 1087); T51958_PEA_1_T35 (SEQ |
| | | ID NO: 1088) |
| T51958_PEA_1_P6 | 1152 | T51958_PEA_1_T5 (SEQ ID NO: 1082) |
| T51958_PEA_1_P28 | 1153 | T51958_PEA_1_T37 (SEQ ID NO: |
| | | 1089); T51958_PEA_1_T39 (SEQ |
| | | ID NO: 1090) |
| T51958_PEA_1_P30 | 1154 | T51958_PEA_1_T40 (SEQ ID NO: |
| | | 1091) |
| T51958_PEA_1_P34 | 1155 | T51958_PEA_1_T8 (SEQ ID NO: 1084) |
| T51958_PEA_1_P35 | 1156 | T51958_PEA_1_T6 (SEQ ID NO: |
| | | 1083); T51958_PEA_1_T41 (SEQ |
| | | ID NO: 1092) |

[3442] These sequences are variants of the known protein Tyrosine-protein kinase-like 7 precursor (SwissProt accession identifier PTK7_HUMAN; known also according to the synonyms Colon carcinoma kinase-4; CCK4), SEQ ID NO:1141, referred to herein as the previously known protein.

[3443] Protein Tyrosine-protein kinase-like 7 precursor (SEQ ID NO:1141) is known or believed to have the following function(s): MAY FUNCTION AS A CELL ADHESION MOLECULE. LACKS PROBABLY THE CATALYTIC ACTIVITY OF TYROSINE KINASE. MAY BE CONNECTED TO THE PATHOPHYSIOLOGY OF COLON CARCINOMAS AND/OR MAY REPRESENT A TUMOR PROGRESSION MARKER. The sequence for protein Tyrosine-protein kinase-like 7 precursor is given at the end of the application, as “Tyrosine-protein kinase-like 7 precursor amino acid sequence”. Known polymorphisms for this sequence are as shown in Table 4.

TABLE 4
Amino acid mutations for Known Protein

| SNP position(s) on amino | |
|---|---|
| acid sequence | Comment |
| 92 | P -> R |
| 147 | K -> T |
| 207 | S -> G |
| 495-496 | VL -> RV |
| 515 | G -> E |
| 881 | E -> G |
| 969 | A -> P |
| 992 | S -> F |

[3444] Protein Tyrosine-protein kinase-like 7 precursor (SEQ ID NO:1141) localization is believed to be Type I membrane protein.

[3445] The following GO Annotation(s) apply to the previously known protein. The following annotation(s) were found: protein amino acid phosphorylation; cell adhesion; signal transduction, which are annotation(s) related to Biological Process; protein tyrosine kinase; transmembrane receptor protein tyrosine kinase; receptor; protein binding; ATP binding; transferase, which are annotation(s) related to Molecular Function; and integral plasma membrane protein, which are annotation(s) related to Cellular Component.

[3446] The GO assignment relies on information from one or more of the SwissProt/TremB1 Protein knowledgebase, available from <http://www.expasy.ch/sprot/>; or Locuslink, available from <http://www.ncbi.nlm.nih.gov/projects/LocusLink/>.

[3447] Cluster T51958 can be used as a diagnostic marker according to overexpression of transcripts of this cluster in cancer. Expression of such transcripts in normal tissues is also given according to the previously described methods. The term “number” in the left hand column of the table and the numbers on the y-axis of the figure below refer to weighted expression of ESTs in each category, as “parts per million” (ratio of the expression of ESTs for a particular cluster to the expression of all ESTs in that category, according to parts per million).

[3448] Overall, the following results were obtained as shown with regard to the histograms in FIG. 63 and Table 5. This cluster is overexpressed (at least at a minimum level) in the following pathological conditions: epithelial malignant tumors and a mixture of malignant tumors from different tissues.

TABLE 5
Normal tissue distribution

| Name of Tissue | Number |
|---|---|
| bladder | 41 |
| bone | 97 |
| brain | 12 |
| colon | 0 |
| epithelial | 40 |
| general | 24 |
| head and neck | 101 |
| kidney | 67 |
| liver | 0 |
| lung | 23 |
| lymph nodes | 18 |
| breast | 13 |
| muscle | 7 |
| ovary | 72 |
| pancreas | 0 |
| prostate | 8 |
| skin | 134 |
| stomach | 36 |
| uterus | 72 |

TABLE 6
P values and ratios for expression in cancerous tissue

| Name of Tissue | P1 | P2 | SP1 | R3 | SP2 | R4 |
|---|---|---|---|---|---|---|
| bladder | 5.4e−01 | 6.3e−01 | 6.0e−01 | 1.3 | 7.6e−01 | 1.0 |
| bone | 6.6e−01 | 5.5e−01 | 8.7e−01 | 0.6 | 8.1e−01 | 0.7 |
| brain | 3.1e−02 | 1.1e−02 | 2.8e−02 | 3.8 | 1.7e−02 | 3.4 |
| colon | 3.0e−02 | 2.5e−02 | 2.4e−01 | 3.1 | 1.6e−01 | 3.0 |
| epithelial | 6.2e−03 | 2.0e−02 | 1.8e−02 | 1.5 | 1.9e−01 | 1.1 |
| general | 7.2e−07 | 2.3e−06 | 4.4e−07 | 2.3 | 1.5e−05 | 1.9 |
| head and neck | 3.4e−01 | 3.3e−01 | 7.1e−01 | 1.3 | 8.4e−01 | 0.9 |
| kidney | 7.3e−01 | 5.8e−01 | 9.7e−01 | 0.4 | 9.3e−01 | 0.6 |
| liver | 1 | 6.8e−01 | 1 | 1.0 | 6.9e−01 | 1.4 |
| lung | 5.9e−01 | 8.4e−01 | 5.4e−01 | 1.5 | 8.4e−01 | 0.8 |
| lymph nodes | 5.1e−01 | 6.0e−01 | 1 | 1.3 | 1 | 0.8 |
| breast | 4.0e−01 | 3.0e−01 | 1.5e−01 | 2.5 | 3.1e−01 | 1.8 |
| muscle | 9.2e−01 | 4.8e−01 | 1 | 0.7 | 9.1e−03 | 2.9 |
| ovary | 3.7e−01 | 2.5e−01 | 7.1e−01 | 1.0 | 4.4e−01 | 1.2 |
| pancreas | 1.2e−01 | 2.1e−01 | 7.6e−02 | 5.1 | 1.5e−01 | 3.7 |
| prostate | 6.5e−01 | 5.4e−01 | 1.4e−01 | 2.5 | 1.0e−01 | 2.7 |
| skin | 7.7e−01 | 8.1e−01 | 1 | 0.1 | 1 | 0.2 |
| stomach | 5.8e−01 | 7.5e−01 | 1 | 0.5 | 9.6e−01 | 0.6 |
| uterus | 2.2e−01 | 5.6e−01 | 4.2e−02 | 1.8 | 3.7e−01 | 1.0 |

[3449] As noted above, cluster T51958 features 12 transcript(s), which were listed in Table 1 above. These transcript(s) encode for protein(s) which are variant(s) of protein Tyrosine-protein kinase-like 7 precursor (SEQ ID NO:1141). A description of each variant protein according to the present invention is now provided.

[3450] Variant protein T51958_PEA_{—}1_P5 (SEQ ID NO:1151) according to the present invention has an amino acid sequence as given at the end of the application; it is encoded by transcript(s) T51958_PEA_{—}1_T4 (SEQ ID NO:1081). An alignment is given to the known protein (Tyrosine-protein kinase-like 7 precursor (SEQ ID NO:1141)) at the end of the application. One or more alignments to one or more previously published protein sequences are given at the end of the application. A brief description of the relationship of the variant protein according to the present invention to each such aligned protein is as follows:

[3451] Comparison Report Between T51958_PEA_{—}1_P5 (SEQ ID NO:1151) and PTK7_HUMAN_V4 (SEQ ID NO:1143):

[3452] 1. An isolated chimeric polypeptide encoding for T51958_PEA_{—}1_P5 (SEQ ID NO:1151), comprising a first amino acid sequence being at least 90% homologous to MGAARGSPARPRRLPLLSVLLLPLLGGTQTAIVFIKQPSSQDALQGRRALLRCEVEAPGPVHVYWLLDGAP VQDTERRFAQGSSLSFAAVDRLQDSGTFQCVARDDVTGEEARSANASFNIKWIEAGPVVLKHPASEAEIQP QTQVTLRCHIDGHPRPTYQWFRDGTPLSDGQSNHTVSSKERNLTLRPAGPEHSGLYSCCAHSAFGQACSS QNFTLSIADESFARVVLAPQDVVVARYEEAMFHCQFSAQPPPSLQWLFEDETPITNRSRPPHLRRATVFAN GSLLLTQVRPRNAGIYRCIGQGQRGPPIILEATLHLAEIEDMPLFEPRVFTAGSEERVTCLPPKGLPEPSVWW EHAGVRLPTHGRVYQKGHELVLANIAESDAGVYTCHAANLAGQRRQDVNITVATVPSWLKKPQDSQLEE GKPGYLDCLTQATPKPTVVWYRNQMLISEDSRFEVFKNGTLRINSVEVYDGTWYRCMSSTPAGSIEAQAR VQVLEKLKFTPPPQPQQCMEFDKEATVPCSATGREKPTIKWERADGSSLPEWVTDNAGTLHFARVTRDDA GNYTCIASNGPQGQIRAHVQLTVAVFITFKVEPERTTVYQGHTALLQCEAQGDPKPLIQWKGKDRILDPTK LGPRMHIFQNGSLVIHDVAPEDSGRYTCIAGNSCNIKHTEAPLYVV corresponding to amino acids 1-682 of PTK7_HUMAN_V4 (SEQ ID NO:1143), which also corresponds to amino acids 1-682 of T51958_PEA_{—}1_P5 (SEQ ID NO:1151), and a second amino acid sequence being at least 70%, optionally at least 80%, preferably at least 85%, more preferably at least 90% and most preferably at least 95% homologous to a polypeptide having the sequence GMGWGGLCCTGSGGPRRLSPCTQPLCTEHGTEAIFVAAVGIRPSHHAAAQS (SEQ ID NO:1451) corresponding to amino acids 683-733 of T51958_PEA_{—}1_P5 (SEQ ID NO:1151), wherein said first amino acid sequence and second amino acid sequence are contiguous and in a sequential order.

[3453] 2. An isolated polypeptide encoding for a tail of T51958_PEA_{—}1_P5 (SEQ ID NO:1151), comprising a polypeptide being at least 70%, optionally at least about 80%, preferably at least about 85%, more preferably at least about 90% and most preferably at least about 95% homologous to the sequence GMGWGGLCCTGSGGPRRLSPCTQPLCTEHGTEAIFVAAVGIRPSHHAAAQS (SEQ ID NO:1451) in T51958_PEA_{—}1_P5 (SEQ ID NO:1151).

[3454] It should be noted that the known protein sequence (PTK7_HUMAN (SEQ ID NO:1141)) has one or more changes than the sequence given at the end of the application and named as being the amino acid sequence for PTK7_HUMAN_V4 (SEQ ID NO:1143). These changes were previously known to occur and are listed in the table below.

TABLE 7
Changes to PTK7_HUMAN_V4 (SEQ ID NO: 1143)

| SNP position(s) on amino | |
|---|---|
| acid sequence | Type of change |
| 93 | conflict |
| 148 | conflict |
| 208 | conflict |
| 496 | conflict |
| 516 | conflict |

[3455] The location of the variant protein was determined according to results from a number of different software programs and analyses, including analyses from SignalP and other specialized programs. The variant protein is believed to be located as follows with regard to the cell: secreted. The protein localization is believed to be secreted because both signal-peptide prediction programs predict that this protein has a signal peptide, and neither trans-membrane region prediction program predicts that this protein has a trans-membrane region.

[3456] Variant protein T51958_PEA_{—}1_P5 (SEQ ID NO:1151) is encoded by the following transcript(s): T51958_PEA_{—}1_T4 (SEQ ID NO:1081), for which the sequence(s) is/are given at the end of the application. The coding portion of transcript T51958_PEA_{—}1_T4 (SEQ ID NO:1081) is shown in bold; this coding portion starts at position 209 and ends at position 2407. The transcript also has the following SNPs as listed in Table 8 (given according to their position on the nucleotide sequence, with the alternative nucleic acid listed; the last column indicates whether the SNP is known or not; the presence of known SNPs in variant protein T51958_PEA_{—}1_P5 (SEQ ID NO:1151) sequence provides support for the deduced sequence of this variant protein according to the present invention).

TABLE 8
Nucleic acid SNPs

| SNP position on | Alternative | Previously |
|---|---|---|
| nucleotide sequence | nucleic acid | known SNP? |
| 2059 | G -> A | No |
| 3778 | T -> A | No |
| 3799 | C -> | No |
| 4638 | C -> | No |
| 4771 | T -> C | No |
| 4979 | G -> C | No |

[3457] Variant protein T51958_PEA_{—}1_P6 (SEQ ID NO:1152) according to the present invention has an amino acid sequence as given at the end of the application; it is encoded by transcript(s) T51958_PEA_{—}1_T5 (SEQ ID NO:1082). An alignment is given to the known protein (Tyrosine-protein kinase-like 7 precursor (SEQ ID NO:1141)) at the end of the application. One or more alignments to one or more previously published protein sequences are given at the end of the application. A brief description of the relationship of the variant protein according to the present invention to each such aligned protein is as follows:

[3458] Comparison Report Between T51958_PEA_{—}1_P6 (SEQ ID NO:1152) and PTK7_HUMAN_V4 (SEQ ID NO:1143):

[3459] 1. An isolated chimeric polypeptide encoding for T51958_PEA_{—}1_P6 (SEQ ID NO:1152), comprising a first amino acid sequence being at least 90% homologous to MGAARGSPARPRRLPLLSVLLLPLLGGTQTAIVFIKQPSSQDALQGRRALLRCEVEAPGPVHVYWLLDGAP VQDTERRFAQGSSLSFAAVDRLQDSGTFQCVARDDVTGEEARSANASFNIKWIEAGPVVLKHPASEAEIQP QTQVTLRCHIDGHPRPTYQWFRDGTPLSDGQSNHTVSSKERNLTLRPAGPEHSGLYSCCAHSAFGQACSS QNFTLSIADESFARVVLAPQDVVVARYEEAMFHCQFSAQPPPSLQWLFEDETPITNRSRPPHLRRATVFAN GSLLLTQVRPRNAGIYRCIGQGQRGPPIILEATLHLAEIEDMPLFEPRVFTAGSEERVTCLPPKGLPEPSVWW EHAGVRLPTHGRVYQKGHELVLANIAESDAGVYTCHAANLAGQRRQDVNITVATVPSWLKKPQDSQLEE GKPGYLDCLTQATPKPTVVWYRNQMLISEDSRFEVFKNGTLRINSVEVYDGTWYRCMSSTPAGSIEAQAR VQVLEKLKFTPPPQPQQCMEFDKEATVPCSATGREKPTIKWERADGSSLPEWVTDNAGTLHFARVTRDDA GNYTCIASNGPQGQIRAHVQLTVAVFITFKVEPERTTVYQGHTALLQCEAQGDPKPLIQWKGKDRILDPTK LGPRM corresponding to amino acids 1-641 of PTK7_HUMAN_V4 (SEQ ID NO:1143), which also corresponds to amino acids 1-641 of T51958_PEA_{—}1_P6 (SEQ ID NO:1152), and a second amino acid sequence being at least 70%, optionally at least 80%, preferably at least 85%, more preferably at least 90% and most preferably at least 95% homologous to a polypeptide having the sequence APW corresponding to amino acids 642-644 of T51958_PEA_{—}1_P6 (SEQ ID NO:1152), wherein said first amino acid sequence and second amino acid sequence are contiguous and in a sequential order.

[3460] It should be noted that the known protein sequence (PTK7_HUMAN (SEQ ID NO:1141)) has one or more changes than the sequence given at the end of the application and named as being the amino acid sequence for PTK7_HUMAN_V4 (SEQ ID NO:1143). These changes were previously known to occur and are listed in the table below.

TABLE 9
Changes to PTK7_HUMAN_V4 (SEQ ID NO: 1143)

| SNP position(s) on amino | |
|---|---|
| acid sequence | Type of change |
| 93 | conflict |
| 148 | conflict |
| 208 | conflict |
| 496 | conflict |
| 516 | conflict |

[3461] The location of the variant protein was determined according to results from a number of different software programs and analyses, including analyses from SignalP and other specialized programs. The variant protein is believed to be located as follows with regard to the cell: secreted. The protein localization is believed to be secreted because both signal-peptide prediction programs predict that this protein has a signal peptide, and neither trans-membrane region prediction program predicts that this protein has a trans-membrane region.

[3462] Variant protein T51958_PEA_{—}1_P6 (SEQ ID NO:1152) is encoded by the following transcript(s): T51958_PEA_{—}1_T5 (SEQ ID NO:1082), for which the sequence(s) is/are given at the end of the application. The coding portion of transcript T51958_PEA_{—}1_T5 (SEQ ID NO:1082) is shown in bold; this coding portion starts at position 209 and ends at position 2140. The transcript also has the following SNPs as listed in Table 10 (given according to their position on the nucleotide sequence, with the alternative nucleic acid listed; the last column indicates whether the SNP is known or not; the presence of known SNPs in variant protein T51958_PEA_{—}1_P6 (SEQ ID NO:1152) sequence provides support for the deduced sequence of this variant protein according to the present invention).

TABLE 10
Nucleic acid SNPs

| SNP position on | Alternative | Previously |
|---|---|---|
| nucleotide sequence | nucleic acid | known SNP? |
| 2059 | G -> A | No |
| 3762 | T -> A | No |
| 3783 | C -> | No |
| 4622 | C -> | No |
| 4755 | T -> C | No |
| 4963 | G -> C | No |

[3463] Variant protein T51958_PEA_{—}1_P28 (SEQ ID NO:1153) according to the present invention has an amino acid sequence as given at the end of the application; it is encoded by transcript(s) T51958_PEA_{—}1_T37 (SEQ ID NO:1089). An alignment is given to the known protein (Tyrosine-protein kinase-like 7 precursor (SEQ ID NO:1141)) at the end of the application. One or more alignments to one or more previously published protein sequences are given at the end of the application. A brief description of the relationship of the variant protein according to the present invention to each such aligned protein is as follows:

[3464] Comparison Report Between T51958_PEA_{—}1_P28 (SEQ ID NO:1153) and PTK7_HUMAN_V11 (SEQ ID NO:1144):

[3465] 1. An isolated chimeric polypeptide encoding for T51958_PEA_{—}1_P28 (SEQ ID NO:1153), comprising a first amino acid sequence being at least 90% homologous to MGAARGSPARPRRLPLLSVLLLPLLGGTQTAIVFIKQPSSQDALQGRRALLRCEVEAPGPVHVYWLLDGAP VQDTERRFAQGSSLSFAAVDRLQDSGTFQCVARDDVTGEEARSANASFNIKWIEAGPVVLKHPASEAEIQP QTQVTLRCHIDGHPRPTYQWFRDGTPLSDGQSNHTVSSKERNLTLRPAGPEHSGLYSCCAHSAFGQACSS QNFTLSIADESFARVVLAPQDVVVARYEEAMFHCQFSAQPPPSLQWLFEDETPITNRSRPPHLRRATVFAN GSLLLTQVRPRNAGIYRCIGQGQRGPPIILEATLHLAEIEDMPLFEPRVFTAGSEERVTCLPPKGLPEPSVWW EHAGVRLPTHGRVYQKGHELVLANIAESDAGVYTCHAANLAGQRRQDVNITVA corresponding to amino acids 1-409 of PTK7_HUMAN_V11 (SEQ ID NO:1144), which also corresponds to amino acids 1-409 of T51958_PEA_{—}1_P28 (SEQ ID NO:1153), and a second amino acid sequence being at least 70%, optionally at least 80%, preferably at least 85%, more preferably at least 90% and most preferably at least 95% homologous to a polypeptide having the sequence SEHLCPEGQGEVEGNTGLGVMDRGFPGTHLRSSQFWALQAWESVHYWESV corresponding to amino acids 410-459 of T51958_PEA_{—}1_P28 (SEQ ID NO:1153), wherein said first amino acid sequence and second amino acid sequence are contiguous and in a sequential order.

[3466] 2. An isolated polypeptide encoding for a tail of T51958_PEA_{—}1_P28 (SEQ ID NO:1153), comprising a polypeptide being at least 70%, optionally at least about 80%, preferably at least about 85%, more preferably at least about 90% and most preferably at least about 95% homologous to the sequence SEHLCPEGQGEVEGNTGLGVMDRGFPGTHLRSSQFWALQAWESVHYWESV in T51958_PEA_{—}1_P28 (SEQ ID NO:1153).

[3467] It should be noted that the known protein sequence (PTK7_HUMAN (SEQ ID NO:1141)) has one or more changes than the sequence given at the end of the application and named as being the amino acid sequence for PTK7_HUMAN_V11 (SEQ ID NO:1144). These changes were previously known to occur and are listed in the table below.

TABLE 11
Changes to PTK7_HUMAN_V11 (SEQ ID NO: 1144)

| SNP position(s) on amino | |
|---|---|
| acid sequence | Type of change |
| 93 | conflict |
| 148 | conflict |
| 208 | conflict |

### Comparison Report Between T51958_PEA_{—}1_P28 (SEQ ID NO:1153) and Q8NFA5 (SEQ ID NO:1147):

[3468] 1. An isolated chimeric polypeptide encoding for T51958_PEA_{—}1_P28 (SEQ ID NO:1153), comprising a first amino acid sequence being at least 90% homologous to MGAARGSPARPRRLPLLSVLLLPLLGGTQTAIVFIKQPSSQDALQGRRALLRCEVEAPGPVHVYWLLDGAP VQDTERRFAQGSSLSFAAVDRLQDSGTFQCVARDDVTGEEARSANASFNIKWIEAGPVVLKHPASEAEIQP QTQVTLRCHIDGHPRPTYQWFRDGTPLSDGQSNHTVSSKERNLTLRPAGPEHSGLYSCCAHSAFGQACSS QNFTLSIADESFARVVLAPQDVVVARYEEAMFHCQFSAQPPPSLQWLFEDETPITNRSRPPHLRRATVFAN GSLLLTQVRPRNAGIYRCIGQGQRGPPIILEATLHLAEIEDMPLFEPRVFTAGSEERVTCLPPKGLPEPSVWW EHAGVRLPTHGRVYQKGHELVLANIAESDAGVYTCHAANLAGQRRQDVNITVA corresponding to amino acids 1-409 of Q8NFA5 (SEQ ID NO:1147), which also corresponds to amino acids 1-409 of T51958_PEA_{—}1_P28 (SEQ ID NO:1153), and a second amino acid sequence being at least 70%, optionally at least 80%, preferably at least 85%, more preferably at least 90% and most preferably at least 95% homologous to a polypeptide having the sequence SEHLCPEGQGEVEGNTGLGVMDRGFPGTHLRSSQFWALQAWESVHYWESV corresponding to amino acids 410-459 of T51958_PEA_{—}1_P28 (SEQ ID NO:1153), wherein said first amino acid sequence and second amino acid sequence are contiguous and in a sequential order.

[3469] 2. An isolated polypeptide encoding for a tail of T51958_PEA_{—}1_P28 (SEQ ID NO:1153), comprising a polypeptide being at least 70%, optionally at least about 80%, preferably at least about 85%, more preferably at least about 90% and most preferably at least about 95% homologous to the sequence SEHLCPEGQGEVEGNTGLGVMDRGFPGTHLRSSQFWALQAWESVHYWESV in T51958_PEA_{—}1_P28 (SEQ ID NO:1153).

### Comparison Report Between T51958_PEA_{—}1_P28 (SEQ ID NO:1153) and Q8NFA6 (SEQ ID NO:1149):

[3470] 1. An isolated chimeric polypeptide encoding for T51958_PEA_{—}1_P28 (SEQ ID NO:1153), comprising a first amino acid sequence being at least 90% homologous to MGAARGSPARPRRLPLLSVLLLPLLGGTQTAIVFIKQPSSQDALQGRRALLRCEVEAPGPVHVYWLLDGAP VQDTERRFAQGSSLSFAAVDRLQDSGTFQCVARDDVTGEEARSANASFNIKWIEAGPVVLKHPASEAEIQP QTQVTLRCHIDGHPRPTYQWFRDGTPLSDGQSNHTVSSKERNLTLRPAGPEHSGLYSCCAHSAFGQACSS QNFTLSIADESFARVVLAPQDVVVARYEEAMFHCQFSAQPPPSLQWLFEDETPITNRSRPPHLRRATVFAN GSLLLTQVRPRNAGIYRCIGQGQRGPPIILEATLHLAEIEDMPLFEPRVFTAGSEERVTCLPPKGLPEPSVWW EHAGVRLPTHGRVYQKGHELVLANIAESDAGVYTCHAANLAGQRRQDVNITVA corresponding to amino acids 1-409 of Q8NFA6 (SEQ ID NO:1149), which also corresponds to amino acids 1-409 of T51958_PEA_{—}1_P28 (SEQ ID NO:1153), and a second amino acid sequence being at least 70%, optionally at least 80%, preferably at least 85%, more preferably at least 90% and most preferably at least 95% homologous to a polypeptide having the sequence SEHLCPEGQGEVEGNTGLGVMDRGFPGTHLRSSQFWALQAWESVHYWESV corresponding to amino acids 410-459 of T51958_PEA_{—}1_P28 (SEQ ID NO:1153), wherein said first amino acid sequence and second amino acid sequence are contiguous and in a sequential order.

[3471] 2. An isolated polypeptide encoding for a tail of T51958_PEA_{—}1_P28 (SEQ ID NO:1153), comprising a polypeptide being at least 70%, optionally at least about 80%, preferably at least about 85%, more preferably at least about 90% and most preferably at least about 95% homologous to the sequence SEHLCPEGQGEVEGNTGLGVMDRGFPGTHLRSSQFWALQAWESVHYWESV in T51958_PEA_{—}1_P28 (SEQ ID NO:1153).

[3472] Comparison Report Between T51958_PEA_{—}1_P28 (SEQ ID NO:1153) and Q8NFA7 (SEQ ID NO:1148):

[3473] 1. An isolated chimeric polypeptide encoding for T51958_PEA_{—}1_P28 (SEQ ID NO:1153), comprising a first amino acid sequence being at least 90% homologous to MGAARGSPARPRRLPLLSVLLLPLLGGTQTAIVFIKQPSSQDALQGRRALLRCEVEAPGPVHVYWLLDGAP VQDTERRFAQGSSLSFAAVDRLQDSGTFQCVARDDVTGEEARSANASFNIKWIEAGPVVLKHPASEAEIQP QTQVTLRCHIDGHPRPTYQWFRDGTPLSDGQSNHTVSSKERNLTLRPAGPEHSGLYSCCAHSAFGQACSS QNFTLSIADESFARVVLAPQDVVVARYEEAMFHCQFSAQPPPSLQWLFEDETPITNRSRPPHLRRATVFAN GSLLLTQVRPRNAGIYRCIGQGQRGPPIILEATLHLAEIEDMPLFEPRVFTAGSEERVTCLPPKGLPEPSVWW EHAGVRLPTHGRVYQKGHELVLANIAESDAGVYTCHAANLAGQRRQDVNITVA corresponding to amino acids 1-409 of Q8NFA7 (SEQ ID NO:1148), which also corresponds to amino acids 1-409 of T51958_PEA_{—}1_P28 (SEQ ID NO:1153), and a second amino acid sequence being at least 70%, optionally at least 80%, preferably at least 85%, more preferably at least 90% and most preferably at least 95% homologous to a polypeptide having the sequence SEHLCPEGQGEVEGNTGLGVMDRGFPGTHLRSSQFWALQAWESVHYWESV corresponding to amino acids 410-459 of T51958_PEA_{—}1_P28 (SEQ ID NO:1153), wherein said first amino acid sequence and second amino acid sequence are contiguous and in a sequential order.

[3474] 2. An isolated polypeptide encoding for a tail of T51958_PEA_{—}1_P28 (SEQ ID NO:1153), comprising a polypeptide being at least 70%, optionally at least about 80%, preferably at least about 85%, more preferably at least about 90% and most preferably at least about 95% homologous to the sequence SEHLCPEGQGEVEGNTGLGVMDRGFPGTHLRSSQFWALQAWESVHYWESV in T51958_PEA_{—}1_P28 (SEQ ID NO:1153).

[3475] Comparison Report Between T51958_PEA_{—}1_P28 (SEQ ID NO:1153) and Q8NFA8 (SEQ ID NO:1146):

[3476] 1. An isolated chimeric polypeptide encoding for T51958_PEA_{—}1_P28 (SEQ ID NO:1153), comprising a first amino acid sequence being at least 90% homologous to MGAARGSPARPRRLPLLSVLLLPLLGGTQTAIVFIKQPSSQDALQGRRALLRCEVEAPGPVHVYWLLDGAP VQDTERRFAQGSSLSFAAVDRLQDSGTFQCVARDDVTGEEARSANASFNIKWIEAGPVVLKHPASEAEIQP QTQVTLRCHIDGHPRPTYQWFRDGTPLSDGQSNHTVSSKERNLTLRPAGPEHSGLYSCCAHSAFGQACSS QNFTLSIADESFARVVLAPQDVVVARYEEAMFHCQFSAQPPPSLQWLFEDETPITNRSRPPHLRRATVFAN GSLLLTQVRPRNAGIYRCIGQGQRGPPIILEATLHLAEIEDMPLFEPRVFTAGSEERVTCLPPKGLPEPSVWW EHAGVRLPTHGRVYQKGHELVLANIAESDAGVYTCHAANLAGQRRQDVNITVA corresponding to amino acids 1-409 of Q8NFA8 (SEQ ID NO:1146), which also corresponds to amino acids 1-409 of T51958_PEA_{—}1_P28 (SEQ ID NO:1153), and a second amino acid sequence being at least 70%, optionally at least 80%, preferably at least 85%, more preferably at least 90% and most preferably at least 95% homologous to a polypeptide having the sequence SEHLCPEGQGEVEGNTGLGVMDRGFPGTHLRSSQFWALQAWESVHYWESV corresponding to amino acids 410-459 of T51958_PEA_{—}1_P28 (SEQ ID NO:1153), wherein said first amino acid sequence and second amino acid sequence are contiguous and in a sequential order.

[3477] 2. An isolated polypeptide encoding for a tail of T51958_PEA_{—}1_P28 (SEQ ID NO:1153), comprising a polypeptide being at least 70%, optionally at least about 80%, preferably at least about 85%, more preferably at least about 90% and most preferably at least about 95% homologous to the sequence SEHLCPEGQGEVEGNTGLGVMDRGFPGTHLRSSQFWALQAWESVHYWESV in T51958_PEA_{—}1_P28 (SEQ ID NO:1153).

[3478] Comparison Report Between T51958_PEA_{—}1_P28 (SEQ ID NO:1153) and AAN04862 (SEQ ID NO:1150) (SEQ ID NO:1150):

[3479] 1. An isolated chimeric polypeptide encoding for T51958_PEA_{—}1_P28 (SEQ ID NO:1153), comprising a first amino acid sequence being at least 90% homologous to MGAARGSPARPRRLPLLSVLLLPLLGGTQTAIVFIKQPSSQDALQGRRALLRCEVEAPGPVHVYWLLDGAP VQDTERRFAQGSSLSFAAVDRLQDSGTFQCVARDDVTGEEARSANASFNIKWIEAGPVVLKHPASEAEIQP QTQVTLRCHIDGHPRPTYQWFRDGTPLSDGQSNHTVSSKERNLTLRPAGPEHSGLYSCCAHSAFGQACSS QNFTLSIADESFARVVLAPQDVVVARYEEAMFHCQFSAQPPPSLQWLFEDETPITNRSRPPHLRRATVFAN GSLLLTQVRPRNAGIYRCIGQGQRGPPIILEATLHLAEIEDMPLFEPRVFTAGSEERVTCLPPKGLPEPSVWW EHAGVRLPTHGRVYQKGHELVLANIAESDAGVYTCHAANLAGQRRQDVNITVA corresponding to amino acids 1-409 of AAN04862 (SEQ ID NO:1150), which also corresponds to amino acids 1-409 of T51958_PEA_{—}1_P28 (SEQ ID NO:1153), and a second amino acid sequence being at least 70%, optionally at least 80%, preferably at least 85%, more preferably at least 90% and most preferably at least 95% homologous to a polypeptide having the sequence SEHLCPEGQGEVEGNTGLGVMDRGFPGTHLRSSQFWALQAWESVHYWESV corresponding to amino acids 410-459 of T51958_PEA_{—}1_P28 (SEQ ID NO:1153), wherein said first amino acid sequence and second amino acid sequence are contiguous and in a sequential order.

[3480] 2. An isolated polypeptide encoding for a tail of T51958_PEA_{—}1_P28 (SEQ ID NO:1153), comprising a polypeptide being at least 70%, optionally at least about 80%, preferably at least about 85%, more preferably at least about 90% and most preferably at least about 95% homologous to the sequence SEHLCPEGQGEVEGNTGLGVMDRGFPGTHLRSSQFWALQAWESVHYWESV in T51958_PEA_{—}1_P28 (SEQ ID NO:1153).

[3481] The location of the variant protein was determined according to results from a number of different software programs and analyses, including analyses from SignalP and other specialized programs. The variant protein is believed to be located as follows with regard to the cell: secreted. The protein localization is believed to be secreted because both signal-peptide prediction programs predict that this protein has a signal peptide, and neither trans-membrane region prediction program predicts that this protein has a trans-membrane region.

[3482] Variant protein T51958_PEA_{—}1_P28 (SEQ ID NO:1153) is encoded by the following transcript(s): T51958_PEA_{—}1_T37 (SEQ ID NO:1089), for which the sequence(s) is/are given at the end of the application. The coding portion of transcript T51958_PEA_{—}1_T37 (SEQ ID NO:1089) is shown in bold; this coding portion starts at position 209 and ends at position 1585.

[3483] Variant protein T51958_PEA_{—}1_P30 (SEQ ID NO:1154) according to the present invention has an amino acid sequence as given at the end of the application; it is encoded by transcript(s) T51958_PEA_{—}1_T40 (SEQ ID NO:1091). An alignment is given to the known protein (Tyrosine-protein kinase-like 7 precursor (SEQ ID NO:1141)) at the end of the application. One or more alignments to one or more previously published protein sequences are given at the end of the application. A brief description of the relationship of the variant protein according to the present invention to each such aligned protein is as follows:

[3484] Comparison Report Between T51958_PEA_{—}1_P30 (SEQ ID NO:1154) and PTK7_HUMAN_V13 (SEQ ID NO:1145) (SEQ ID NO:1145):

[3485] 1. An isolated chimeric polypeptide encoding for T51958_PEA_{—}1_P30 (SEQ ID NO:1154), comprising a first amino acid sequence being at least 90% homologous to MGAARGSPARPRRLPLLSVLLLPLLGGTQTAIVFIKQPSSQDALQGRRALLRCEVEAPGPVHVYWLLDGAP VQDTERRFAQGSSLSFAAVDRLQDSGTFQCVARDDVTGEEARSANASFNIK corresponding to amino acids 1-122 of PTK7_HUMAN_V13 (SEQ ID NO:1145), which also corresponds to amino acids 1-122 of T51958_PEA_{—}1_P30 (SEQ ID NO:1154), and a second amino acid sequence being at least 70%, optionally at least 80%, preferably at least 85%, more preferably at least 90% and most preferably at least 95% homologous to a polypeptide having the sequence CESQGGCAQSPCQTLND (SEQ ID NO:1453) corresponding to amino acids 123-139 of T51958_PEA_{—}1_P30 (SEQ ID NO:1154), wherein said first amino acid sequence and second amino acid sequence are contiguous and in a sequential order.

[3486] 2. An isolated polypeptide encoding for a tail of T51958_PEA_{—}1_P30 (SEQ ID NO:1154), comprising a polypeptide being at least 70%, optionally at least about 80%, preferably at least about 85%, more preferably at least about 90% and most preferably at least about 95% homologous to the sequence CESQGGCAQSPCQTLND (SEQ ID NO:1453) in T51958_PEA_{—}1_P30 (SEQ ID NO:1154).

[3487] It should be noted that the known protein sequence (PTK7_HUMAN (SEQ ID NO:1141)) has one or more changes than the sequence given at the end of the application and named as being the amino acid sequence for PTK7_HUMAN_V13 (SEQ ID NO:1145). These changes were previously known to occur and are listed in the table below.

TABLE 12
Changes to PTK7_HUMAN_V13 (SEQ ID NO: 1145)

| SNP position(s) on amino | |
|---|---|
| acid sequence | Type of change |
| 93 | conflict |

[3488] The location of the variant protein was determined according to results from a number of different software programs and analyses, including analyses from SignalP and other specialized programs. The variant protein is believed to be located as follows with regard to the cell: secreted. The protein localization is believed to be secreted because both signal-peptide prediction programs predict that this protein has a signal peptide, and neither trans-membrane region prediction program predicts that this protein has a trans-membrane region.

[3489] Variant protein T51958_PEA_{—}1_P30 (SEQ ID NO:1154) is encoded by the following transcript(s): T51958_PEA_{—}1_T40 (SEQ ID NO:1091), for which the sequence(s) is/are given at the end of the application. The coding portion of transcript T51958_PEA_{—}1_T40 (SEQ ID NO:1091) is shown in bold; this coding portion starts at position 209 and ends at position 625.

[3490] Variant protein T51958_PEA_{—}1_P34 (SEQ ID NO:1155) according to the present invention has an amino acid sequence as given at the end of the application; it is encoded by transcript(s) T51958_PEA_{—}1_T8 (SEQ ID NO:1084). An alignment is given to the known protein (Tyrosine-protein kinase-like 7 precursor (SEQ ID NO:1141)) at the end of the application. One or more alignments to one or more previously published protein sequences are given at the end of the application. A brief description of the relationship of the variant protein according to the present invention to each such aligned protein is as follows:

[3491] Comparison Report Between T51958_PEA_{—}1_P34 (SEQ ID NO:1155) and PTK7_HUMAN_V3 (SEQ ID NO:1142):

[3492] 1. An isolated chimeric polypeptide encoding for T51958_PEA_{—}1_P34 (SEQ ID NO:1155), comprising a first amino acid sequence being at least 90% homologous to MGAARGSPARPRRLPLLSVLLLPLLGGTQTAIVFIKQPSSQDALQGRRALLRCEVEAPGPVHVYWLLDGAP VQDTERRFAQGSSLSFAAVDRLQDSGTFQCVARDDVTGEEARSANASFNIKWIEAGPVVLKHPASEAEIQP QTQVTLRCHIDGHPR corresponding to amino acids 1-157 of PTK7_HUMAN_V3 (SEQ ID NO:1142), which also corresponds to amino acids 1-157 of T51958_PEA_{—}1_P34 (SEQ ID NO:1155).

[3493] It should be noted that the known protein sequence (PTK7_HUMAN (SEQ ID NO:1141)) has one or more changes than the sequence given at the end of the application and named as being the amino acid sequence for PTK7_HUMAN_V3 (SEQ ID NO:1142). These changes were previously known to occur and are listed in the table below.

TABLE 13
Changes to PTK7_HUMAN_V3 (SEQ ID NO: 1142)

| SNP position(s) on amino | |
|---|---|
| acid sequence | Type of change |
| 93 | conflict |
| 148 | conflict |

[3494] The location of the variant protein was determined according to results from a number of different software programs and analyses, including analyses from SignalP and other specialized programs. The variant protein is believed to be located as follows with regard to the cell: secreted. The protein localization is believed to be secreted because both signal-peptide prediction programs predict that this protein has a signal peptide, and neither trans-membrane region prediction program predicts that this protein has a trans-membrane region.

[3495] Variant protein T51958_PEA_{—}1_P34 (SEQ ID NO:1155) is encoded by the following transcript(s): T51958_PEA_{—}1_T8 (SEQ ID NO:1084), for which the sequence(s) is/are given at the end of the application. The coding portion of transcript T51958_PEA_{—}1_T8 (SEQ ID NO:1084) is shown in bold; this coding portion starts at position 209 and ends at position 679. The transcript also has the following SNPs as listed in Table 14 (given according to their position on the nucleotide sequence, with the alternative nucleic acid listed; the last column indicates whether the SNP is known or not; the presence of known SNPs in variant protein T51958_PEA_{—}1_P34 (SEQ ID NO:1155) sequence provides support for the deduced sequence of this variant protein according to the present invention).

TABLE 14
Nucleic acid SNPs

| SNP position on | Alternative | Previously |
|---|---|---|
| nucleotide sequence | nucleic acid | known SNP? |
| 1868 | G -> A | No |
| 2465 | T -> A | No |
| 2486 | C -> | No |
| 3325 | C -> | No |
| 3458 | T -> C | No |
| 3666 | G -> C | No |

[3496] Variant protein T51958_PEA_{—}1_P35 (SEQ ID NO:1156) according to the present invention has an amino acid sequence as given at the end of the application; it is encoded by transcript(s) T51958_PEA_{—}1_T6 (SEQ ID NO:1083). An alignment is given to the known protein (Tyrosine-protein kinase-like 7 precursor (SEQ ID NO:1141)) at the end of the application. One or more alignments to one or more previously published protein sequences are given at the end of the application. A brief description of the relationship of the variant protein according to the present invention to each such aligned protein is as follows:

[3497] Comparison Report Between T51958_PEA_{—}1_P35 (SEQ ID NO:1156) and PTK7_HUMAN_V11 (SEQ ID NO:1144):

[3498] 1. An isolated chimeric polypeptide encoding for T51958_PEA_{—}1_P35 (SEQ ID NO:1156), comprising a first amino acid sequence being at least 90% homologous to MGAARGSPARPRRLPLLSVLLLPLLGGTQTAIVFIKQPSSQDALQGRRALLRCEVEAPGPVHVYWLLDGAP VQDTERRFAQGSSLSFAAVDRLQDSGTFQCVARDDVTGEEARSANASFNIKWIEAGPVVLKHPASEAEIQP QTQVTLRCHIDGHPRPTYQWFRDGTPLSDGQSNHTVSSKERNLTLRPAGPEHSGLYSCCAHSAFGQACSS QNFTLSIA corresponding to amino acids 1-220 of PTK7_HUMAN_V11 (SEQ ID NO:1144), which also corresponds to amino acids 1-220 of T51958_PEA_{—}1_P35 (SEQ ID NO:1156), and a second amino acid sequence being at least 70%, optionally at least 80%, preferably at least 85%, more preferably at least 90% and most preferably at least 95% homologous to a polypeptide having the sequence GEPGVGAEGMR (SEQ ID NO:1454) corresponding to amino acids 221-231 of T51958_PEA_{—}1_P35 (SEQ ID NO:1156), wherein said first amino acid sequence and second amino acid sequence are contiguous and in a sequential order.

[3499] 2. An isolated polypeptide encoding for a tail of T51958_PEA_{—}1_P35 (SEQ ID NO:1156), comprising a polypeptide being at least 70%, optionally at least about 80%, preferably at least about 85%, more preferably at least about 90% and most preferably at least about 95% homologous to the sequence GEPGVGAEGMR (SEQ ID NO:1454) in T51958_PEA_{—}1_P35 (SEQ ID NO:1156).

[3500] It should be noted that the known protein sequence (PTK7_HUMAN (SEQ ID NO:1141)) has one or more changes than the sequence given at the end of the application and named as being the amino acid sequence for PTK7_HUMAN_V11 (SEQ ID NO:1144). These changes were previously known to occur and are listed in the table below.

TABLE 15
Changes to PTK7_HUMAN_V11 (SEQ ID NO: 1144)

| SNP position(s) on amino | |
|---|---|
| acid sequence | Type of change |
| 93 | conflict |
| 148 | conflict |
| 208 | conflict |

[3501] The location of the variant protein was determined according to results from a number of different software programs and analyses, including analyses from SignalP and other specialized programs. The variant protein is believed to be located as follows with regard to the cell: secreted. The protein localization is believed to be secreted because both signal-peptide prediction programs predict that this protein has a signal peptide, and neither trans-membrane region prediction program predicts that this protein has a trans-membrane region.

[3502] Variant protein T51958_PEA_{—}1_P35 (SEQ ID NO:1156) is encoded by the following transcript(s): T51958_PEA_{—}1_T6 (SEQ ID NO:1083), for which the sequence(s) is/are given at the end of the application. The coding portion of transcript T51958_PEA_{—}1_T6 (SEQ ID NO:1083) is shown in bold; this coding portion starts at position 209 and ends at position 901. The transcript also has the following SNPs as listed in Table 16 (given according to their position on the nucleotide sequence, with the alternative nucleic acid listed; the last column indicates whether the SNP is known or not; the presence of known SNPs in variant protein T51958_PEA_{—}1_P35 (SEQ ID NO:1156) sequence provides support for the deduced sequence of this variant protein according to the present invention).

TABLE 16
Nucleic acid SNPs

| SNP position on | Alternative | Previously |
|---|---|---|
| nucleotide sequence | nucleic acid | known SNP? |
| 2149 | G -> A | No |
| 2751 | T -> A | No |
| 2772 | C -> | No |
| 3611 | C -> | No |
| 3744 | T -> C | No |
| 3952 | G -> C | No |

[3503] As noted above, cluster T51958 features 48 segment(s), which were listed in Table 2 above and for which the sequence(s) are given at the end of the application. These segment(s) are portions of nucleic acid sequence(s) which are described herein separately because they are of particular interest. A description of each segment according to the present invention is now provided.

[3504] Segment cluster T51958_PEA_{—}1_node_{—}0 (SEQ ID NO:1093) according to the present invention is supported by 21 libraries. The number of libraries was determined as previously described. This segment can be found in the following transcript(s): T51958_PEA_{—}1_T4 (SEQ ID NO:1081), T51958_PEA_{—}1_T5 (SEQ ID NO:1082), T51958_PEA_{—}1_T6 (SEQ ID NO:1083), T51958_PEA_{—}1_T8 (SEQ ID NO:1084), T51958_PEA_{—}1_T12 (SEQ ID NO:1085), T51958_PEA_{—}1_T16 (SEQ ID NO:1086), T51958_PEA_{—}1_T33 (SEQ ID NO:1087), T51958_PEA_{—}1_T35 (SEQ ID NO:1088), T51958_PEA_{—}1_T37 (SEQ ID NO:1089), T51958_PEA_{—}1_T39 (SEQ ID NO:1090), T51958_PEA_{—}1_T40 (SEQ ID NO:1091) and T51958_PEA_{—}1_T41 (SEQ ID NO:1092). Table 17 below describes the starting and ending position of this segment on each transcript.

TABLE 17
Segment location on transcripts

| | Segment | Segment |
|---|---|---|
| | starting | ending |
| Transcript name | position | position |
| T51958_PEA_1_T4 (SEQ ID NO: 1081) | 1 | 287 |
| T51958_PEA_1_T5 (SEQ ID NO: 1082) | 1 | 287 |
| T51958_PEA_1_T6 (SEQ ID NO: 1083) | 1 | 287 |
| T51958_PEA_1_T8 (SEQ ID NO: 1084) | 1 | 287 |
| T51958_PEA_1_T12 (SEQ ID NO: 1085) | 1 | 287 |
| T51958_PEA_1_T16 (SEQ ID NO: 1086) | 1 | 287 |
| T51958_PEA_1_T33 (SEQ ID NO: 1087) | 1 | 287 |
| T51958_PEA_1_T35 (SEQ ID NO: 1088) | 1 | 287 |
| T51958_PEA_1_T37 (SEQ ID NO: 1089) | 1 | 287 |
| T51958_PEA_1_T39 (SEQ ID NO: 1090) | 1 | 287 |
| T51958_PEA_1_T40 (SEQ ID NO: 1091) | 1 | 287 |
| T51958_PEA_1_T41 (SEQ ID NO: 1092) | 1 | 287 |

[3505] Segment cluster T51958_PEA_{—}1_node_{—}7 (SEQ ID NO:1094) according to the present invention is supported by 29 libraries. The number of libraries was determined as previously described. This segment can be found in the following transcript(s): T51958_PEA_{—}1_T4 (SEQ ID NO:1081), T51958_PEA_{—}1_T5 (SEQ ID NO:1082), T51958_PEA_{—}1_T6 (SEQ ID NO:1083), T51958_PEA_{—}1_T8 (SEQ ID NO:1084), T51958_PEA_{—}1_T12 (SEQ ID NO:1085), T51958_PEA_{—}1_T16 (SEQ ID NO:1086), T51958_PEA_{—}1_T33 (SEQ ID NO:1087), T51958_PEA_{—}1_T35 (SEQ ID NO:1088), T51958_PEA_{—}1_T37 (SEQ ID NO:1089), T51958_PEA_{—}1_T39 (SEQ ID NO:1090), T51958_PEA_{—}1_T40 (SEQ ID NO:1091) and T51958_PEA_{—}1_T41 (SEQ ID NO:1092). Table 18 below describes the starting and ending position of this segment on each transcript.

TABLE 18
Segment location on transcripts

| | Segment | |
|---|---|---|
| | starting | Segment |
| Transcript name | position | ending position |
| T51958_PEA_1_T4 (SEQ ID NO: 1081) | 288 | 451 |
| T51958_PEA_1_T5 (SEQ ID NO: 1082) | 288 | 451 |
| T51958_PEA_1_T6 (SEQ ID NO: 1083) | 288 | 451 |
| T51958_PEA_1_T8 (SEQ ID NO: 1084) | 288 | 451 |
| T51958_PEA_1_T12 (SEQ ID NO: 1085) | 288 | 451 |
| T51958_PEA_1_T16 (SEQ ID NO: 1086) | 288 | 451 |
| T51958_PEA_1_T33 (SEQ ID NO: 1087) | 288 | 451 |
| T51958_PEA_1_T35 (SEQ ID NO: 1088) | 288 | 451 |
| T51958_PEA_1_T37 (SEQ ID NO: 1089) | 288 | 451 |
| T51958_PEA_1_T39 (SEQ ID NO: 1090) | 288 | 451 |
| T51958_PEA_1_T40 (SEQ ID NO: 1091) | 288 | 451 |
| T51958_PEA_1_T41 (SEQ ID NO: 1092) | 288 | 451 |

[3506] Segment cluster T51958_PEA_{—}1_node_{—}8 (SEQ ID NO:1095) according to the present invention is supported by 28 libraries. The number of libraries was determined as previously described. This segment can be found in the following transcript(s): T51958_PEA_{—}1_T4 (SEQ ID NO:1081), T51958_PEA_{—}1_T5 (SEQ ID NO:1082), T51958_PEA_{—}1_T6 (SEQ ID NO:1083), T51958_PEA_{—}1_T8 (SEQ ID NO:1084), T51958_PEA_{—}1_T12 (SEQ ID NO:1085), T51958_PEA_{—}1_T16 (SEQ ID NO:1086), T51958_PEA_{—}1_T33 (SEQ ID NO:1087), T51958_PEA_{—}1_T35 (SEQ ID NO:1088), T51958_PEA_{—}1_T37 (SEQ ID NO:1089), T51958_PEA_{—}1_T39 (SEQ ID NO:1090), T51958_PEA_{—}1_T40 (SEQ ID NO:1091) and T51958_PEA_{—}1_T41 (SEQ ID NO:1092). Table 19 below describes the starting and ending position of this segment on each transcript.

TABLE 19
Segment location on transcripts

| | Segment | |
|---|---|---|
| | starting | Segment |
| Transcript name | position | ending position |
| T51958_PEA_1_T4 (SEQ ID NO: 1081) | 452 | 575 |
| T51958_PEA_1_T5 (SEQ ID NO: 1082) | 452 | 575 |
| T51958_PEA_1_T6 (SEQ ID NO: 1083) | 452 | 575 |
| T51958_PEA_1_T8 (SEQ ID NO: 1084) | 452 | 575 |
| T51958_PEA_1_T12 (SEQ ID NO: 1085) | 452 | 575 |
| T51958_PEA_1_T16 (SEQ ID NO: 1086) | 452 | 575 |
| T51958_PEA_1_T33 (SEQ ID NO: 1087) | 452 | 575 |
| T51958_PEA_1_T35 (SEQ ID NO: 1088) | 452 | 575 |
| T51958_PEA_1_T37 (SEQ ID NO: 1089) | 452 | 575 |
| T51958_PEA_1_T39 (SEQ ID NO: 1090) | 452 | 575 |
| T51958_PEA_1_T40 (SEQ ID NO: 1091) | 452 | 575 |
| T51958_PEA_1_T41 (SEQ ID NO: 1092) | 452 | 575 |

[3507] Segment cluster T51958_PEA_{—}1_node_{—}9 (SEQ ID NO:1096) according to the present invention is supported by 4 libraries. The number of libraries was determined as previously described. This segment can be found in the following transcript(s): T51958_PEA_{—}1_T40 (SEQ ID NO:1091). Table 20 below describes the starting and ending position of this segment on each transcript.

TABLE 20
Segment location on transcripts

| | Segment | |
|---|---|---|
| | starting | Segment |
| Transcript name | position | ending position |
| T51958_PEA_1_T40 (SEQ ID NO: 1091) | 576 | 972 |

[3508] Segment cluster T51958_PEA_{—}1_node_{—}14 (SEQ ID NO:1097) according to the present invention is supported by 27 libraries. The number of libraries was determined as previously described. This segment can be found in the following transcript(s): T51958_PEA_{—}1_T4 (SEQ ID NO:1081), T51958_PEA_{—}1_T5 (SEQ ID NO:1082), T51958_PEA_{—}1_T6 (SEQ ID NO:1083), T51958_PEA_{—}1_T12 (SEQ ID NO:1085), T51958_PEA_{—}1_T16 (SEQ ID NO:1086), T51958_PEA_{—}1_T33 (SEQ ID NO:1087), T51958_PEA_{—}1_T35 (SEQ ID NO:1088), T51958_PEA_{—}1_T37 (SEQ ID NO:1089), T51958_PEA_{—}1_T39 (SEQ ID NO:1090) and T51958_PEA_{—}1_T41 (SEQ ID NO:1092). Table 21 below describes the starting and ending position of this segment on each transcript.

TABLE 21
Segment location on transcripts

| | Segment | |
|---|---|---|
| | starting | Segment |
| Transcript name | position | ending position |
| T51958_PEA_1_T4 (SEQ ID NO: 1081) | 679 | 869 |
| T51958_PEA_1_T5 (SEQ ID NO: 1082) | 679 | 869 |
| T51958_PEA_1_T6 (SEQ ID NO: 1083) | 679 | 869 |
| T51958_PEA_1_T12 (SEQ ID NO: 1085) | 679 | 869 |
| T51958_PEA_1_T16 (SEQ ID NO: 1086) | 679 | 869 |
| T51958_PEA_1_T33 (SEQ ID NO: 1087) | 679 | 869 |
| T51958_PEA_1_T35 (SEQ ID NO: 1088) | 679 | 869 |
| T51958_PEA_1_T37 (SEQ ID NO: 1089) | 679 | 869 |
| T51958_PEA_1_T39 (SEQ ID NO: 1090) | 679 | 869 |
| T51958_PEA_1_T41 (SEQ ID NO: 1092) | 679 | 869 |

[3509] Segment cluster T51958_PEA_{—}1_node_{—}16 (SEQ ID NO:1098) according to the present invention is supported by 25 libraries. The number of libraries was determined as previously described. This segment can be found in the following transcript(s): T51958_PEA_{—}1_T4 (SEQ ID NO:1081), T51958_PEA_{—}1_T5 (SEQ ID NO:1082), T51958_PEA_{—}1_T6 (SEQ ID NO:1083), T51958_PEA_{—}1_T8 (SEQ ID NO:1084), T51958_PEA_{—}1_T12 (SEQ ID NO:1085), T51958_PEA_{—}1_T16 (SEQ ID NO:1086), T51958_PEA_{—}1_T33 (SEQ ID NO:1087), T51958_PEA_{—}1_T35 (SEQ ID NO:1088), T51958_PEA_{—}1_T37 (SEQ ID NO:1089), T51958_PEA_{—}1_T39 (SEQ ID NO:1090) and T51958_PEA_{—}1_T41 (SEQ ID NO:1092). Table 22 below describes the starting and ending position of this segment on each transcript.

TABLE 22
Segment location on transcripts

| | Segment | |
|---|---|---|
| | starting | Segment |
| Transcript name | position | ending position |
| T51958_PEA_1_T4 (SEQ ID NO: 1081) | 870 | 1020 |
| T51958_PEA_1_T5 (SEQ ID NO: 1082) | 870 | 1020 |
| T51958_PEA_1_T6 (SEQ ID NO: 1083) | 960 | 1110 |
| T51958_PEA_1_T8 (SEQ ID NO: 1084) | 679 | 829 |
| T51958_PEA_1_T12 (SEQ ID NO: 1085) | 870 | 1020 |
| T51958_PEA_1_T16 (SEQ ID NO: 1086) | 870 | 1020 |
| T51958_PEA_1_T33 (SEQ ID NO: 1087) | 870 | 1020 |
| T51958_PEA_1_T35 (SEQ ID NO: 1088) | 870 | 1020 |
| T51958_PEA_1_T37 (SEQ ID NO: 1089) | 870 | 1020 |
| T51958_PEA_1_T39 (SEQ ID NO: 1090) | 870 | 1020 |
| T51958_PEA_1_T41 (SEQ ID NO: 1092) | 960 | 1110 |

[3510] Segment cluster T51958_PEA_{—}1_node_{—}18 (SEQ ID NO:1099) according to the present invention is supported by 26 libraries. The number of libraries was determined as previously described. This segment can be found in the following transcript(s): T51958_PEA_{—}1_T4 (SEQ ID NO:1081), T51958_PEA_{—}1_T5 (SEQ ID NO:1082), T51958_PEA_{—}1_T6 (SEQ ID NO:1083), T51958_PEA_{—}1_T8 (SEQ ID NO:1084), T51958_PEA_{—}1_T12 (SEQ ID NO:1085), T51958_PEA_{—}1_T16 (SEQ ID NO:1086), T51958_PEA_{—}1_T33 (SEQ ID NO:1087), T51958_PEA_{—}1_T35 (SEQ ID NO:1088), T51958_PEA_{—}1_T37 (SEQ ID NO:1089), T51958_PEA_{—}1_T39 (SEQ ID NO:1090) and T51958_PEA_{—}1_T41 (SEQ ID NO:1092). Table 23 below describes the starting and ending position of this segment on each transcript.

TABLE 23
Segment location on transcripts

| | Segment | |
|---|---|---|
| | starting | Segment |
| Transcript name | position | ending position |
| T51958_PEA_1_T4 (SEQ ID NO: 1081) | 1021 | 1169 |
| T51958_PEA_1_T5 (SEQ ID NO: 1082) | 1021 | 1169 |
| T51958_PEA_1_T6 (SEQ ID NO: 1083) | 1111 | 1259 |
| T51958_PEA_1_T8 (SEQ ID NO: 1084) | 830 | 978 |
| T51958_PEA_1_T12 (SEQ ID NO: 1085) | 1021 | 1169 |
| T51958_PEA_1_T16 (SEQ ID NO: 1086) | 1021 | 1169 |
| T51958_PEA_1_T33 (SEQ ID NO: 1087) | 1021 | 1169 |
| T51958_PEA_1_T35 (SEQ ID NO: 1088) | 1021 | 1169 |
| T51958_PEA_1_T37 (SEQ ID NO: 1089) | 1021 | 1169 |
| T51958_PEA_1_T39 (SEQ ID NO: 1090) | 1021 | 1169 |
| T51958_PEA_1_T41 (SEQ ID NO: 1092) | 1111 | 1259 |

[3511] Segment cluster T51958_PEA_{—}1_node_{—}21 (SEQ ID NO:1100) according to the present invention is supported by 29 libraries. The number of libraries was determined as previously described. This segment can be found in the following transcript(s): T51958_PEA_{—}1_T4 (SEQ ID NO:1081), T51958_PEA_{—}1_T5 (SEQ ID NO:1082), T51958_PEA_{—}1_T6 (SEQ ID NO:1083), T51958_PEA_{—}1_T8 (SEQ ID NO:1084), T51958_PEA_{—}1_T12 (SEQ ID NO:1085), T51958_PEA_{—}1_T16 (SEQ ID NO:1086), T51958_PEA_{—}1_T33 (SEQ ID NO:1087), T51958_PEA_{—}1_T35 (SEQ ID NO:1088), T51958_PEA_{—}1_T37 (SEQ ID NO:1089), T51958_PEA_{—}1_T39 (SEQ ID NO:1090) and T51958_PEA_{—}1_T41 (SEQ ID NO:1092). Table 24 below describes the starting and ending position of this segment on each transcript.

TABLE 24
Segment location on transcripts

| | Segment | |
|---|---|---|
| | starting | Segment |
| Transcript name | position | ending position |
| T51958_PEA_1_T4 (SEQ ID NO: 1081) | 1238 | 1436 |
| T51958_PEA_1_T5 (SEQ ID NO: 1082) | 1238 | 1436 |
| T51958_PEA_1_T6 (SEQ ID NO: 1083) | 1328 | 1526 |
| T51958_PEA_1_T8 (SEQ ID NO: 1084) | 1047 | 1245 |
| T51958_PEA_1_T12 (SEQ ID NO: 1085) | 1238 | 1436 |
| T51958_PEA_1_T16 (SEQ ID NO: 1086) | 1238 | 1436 |
| T51958_PEA_1_T33 (SEQ ID NO: 1087) | 1238 | 1436 |
| T51958_PEA_1_T35 (SEQ ID NO: 1088) | 1238 | 1436 |
| T51958_PEA_1_T37 (SEQ ID NO: 1089) | 1238 | 1436 |
| T51958_PEA_1_T39 (SEQ ID NO: 1090) | 1238 | 1436 |
| T51958_PEA_1_T41 (SEQ ID NO: 1092) | 1328 | 1526 |

[3512] Segment cluster T51958_PEA_{—}1_node_{—}22 (SEQ ID NO:1101) according to the present invention is supported by 5 libraries. The number of libraries was determined as previously described. This segment can be found in the following transcript(s): T51958_PEA_{—}1_T37 (SEQ ID NO:1089) and T51958_PEA_{—}1_T39 (SEQ ID NO:1090). Table 25 below describes the starting and ending position of this segment on each transcript.

TABLE 25
Segment location on transcripts

| | Segment | |
|---|---|---|
| | starting | Segment |
| Transcript name | position | ending position |
| T51958_PEA_1_T37 (SEQ ID NO: 1089) | 1437 | 2469 |
| T51958_PEA_1_T39 (SEQ ID NO: 1090) | 1437 | 2799 |

[3513] Segment cluster T51958_PEA_{—}1_node_{—}24 (SEQ ID NO:1102) according to the present invention is supported by 34 libraries. The number of libraries was determined as previously described. This segment can be found in the following transcript(s): T51958_PEA_{—}1_T4 (SEQ ID NO:1081), T51958_PEA_{—}1_T5 (SEQ ID NO:1082), T51958_PEA_{—}1_T6 (SEQ ID NO:1083), T51958_PEA_{—}1_T8 (SEQ ID NO:1084), T51958_PEA_{—}1_T12 (SEQ ID NO:1085), T51958_PEA_{—}1_T16 (SEQ ID NO:1086), T51958_PEA_{—}1_T33 (SEQ ID NO:1087), T51958_PEA_{—}1_T35 (SEQ ID NO:1088) and T51958_PEA_{—}1_T41 (SEQ ID NO:1092). Table 26 below describes the starting and ending position of this segment on each transcript.

TABLE 26
Segment location on transcripts

| | Segment | |
|---|---|---|
| | starting | Segment |
| Transcript name | position | ending position |
| T51958_PEA_1_T4 (SEQ ID NO: 1081) | 1437 | 1570 |
| T51958_PEA_1_T5 (SEQ ID NO: 1082) | 1437 | 1570 |
| T51958_PEA_1_T6 (SEQ ID NO: 1083) | 1527 | 1660 |
| T51958_PEA_1_T8 (SEQ ID NO: 1084) | 1246 | 1379 |
| T51958_PEA_1_T12 (SEQ ID NO: 1085) | 1437 | 1570 |
| T51958_PEA_1_T16 (SEQ ID NO: 1086) | 1437 | 1570 |
| T51958_PEA_1_T33 (SEQ ID NO: 1087) | 1437 | 1570 |
| T51958_PEA_1_T35 (SEQ ID NO: 1088) | 1437 | 1570 |
| T51958_PEA_1_T41 (SEQ ID NO: 1092) | 1527 | 1660 |

[3514] Segment cluster T51958_PEA_{—}1_node_{—}27 (SEQ ID NO:1103) according to the present invention is supported by 33 libraries. The number of libraries was determined as previously described. This segment can be found in the following transcript(s): T51958_PEA_{—}1_T4 (SEQ ID NO:1081), T51958_PEA_{—}1_T5 (SEQ ID NO:1082), T51958_PEA_{—}1_T6 (SEQ ID NO:1083), T51958_PEA_{—}1_T8 (SEQ ID NO:1084), T51958_PEA_{—}1_T12 (SEQ ID NO:1085), T51958_PEA_{—}1_T16 (SEQ ID NO:1086), T51958_PEA_{—}1_T33 (SEQ ID NO:1087), T51958_PEA_{—}1_T35 (SEQ ID NO:1088) and T51958_PEA_{—}1_T41 (SEQ ID NO:1092). Table 27 below describes the starting and ending position of this segment on each transcript.

TABLE 27
Segment location on transcripts

| | Segment | |
|---|---|---|
| | starting | Segment |
| Transcript name | position | ending position |
| T51958_PEA_1_T4 (SEQ ID NO: 1081) | 1586 | 1706 |
| T51958_PEA_1_T5 (SEQ ID NO: 1082) | 1586 | 1706 |
| T51958_PEA_1_T6 (SEQ ID NO: 1083) | 1676 | 1796 |
| T51958_PEA_1_T8 (SEQ ID NO: 1084) | 1395 | 1515 |
| T51958_PEA_1_T12 (SEQ ID NO: 1085) | 1586 | 1706 |
| T51958_PEA_1_T16 (SEQ ID NO: 1086) | 1586 | 1706 |
| T51958_PEA_1_T33 (SEQ ID NO: 1087) | 1586 | 1706 |
| T51958_PEA_1_T35 (SEQ ID NO: 1088) | 1586 | 1706 |
| T51958_PEA_1_T41 (SEQ ID NO: 1092) | 1676 | 1796 |

[3515] Segment cluster T51958_PEA_{—}1_node_{—}29 (SEQ ID NO:1104) according to the present invention is supported by 37 libraries. The number of libraries was determined as previously described. This segment can be found in the following transcript(s): T51958_PEA_{—}1_T4 (SEQ ID NO:1081), T51958_PEA_{—}1_T5 (SEQ ID NO:1082), T51958_PEA_{—}1_T6 (SEQ ID NO:1083), T51958_PEA_{—}1_T8 (SEQ ID NO:1084), T51958_PEA_{—}1_T12 (SEQ ID NO:1085), T51958_PEA_{—}1_T16 (SEQ ID NO:1086), T51958_PEA_{—}1_T33 (SEQ ID NO:1087) and T51958_PEA_{—}1_T35 (SEQ ID NO:1088). Table 28 below describes the starting and ending position of this segment on each transcript.

TABLE 28
Segment location on transcripts

| | Segment | |
|---|---|---|
| | starting | Segment |
| Transcript name | position | ending position |
| T51958_PEA_1_T4 (SEQ ID NO: 1081) | 1707 | 1826 |
| T51958_PEA_1_T5 (SEQ ID NO: 1082) | 1707 | 1826 |
| T51958_PEA_1_T6 (SEQ ID NO: 1083) | 1797 | 1916 |
| T51958_PEA_1_T8 (SEQ ID NO: 1084) | 1516 | 1635 |
| T51958_PEA_1_T12 (SEQ ID NO: 1085) | 1707 | 1826 |
| T51958_PEA_1_T16 (SEQ ID NO: 1086) | 1707 | 1826 |
| T51958_PEA_1_T33 (SEQ ID NO: 1087) | 1707 | 1826 |
| T51958_PEA_1_T35 (SEQ ID NO: 1088) | 1707 | 1826 |

[3516] Segment cluster T51958_PEA_{—}1_node_{—}33 (SEQ ID NO:1105) according to the present invention is supported by 37 libraries. The number of libraries was determined as previously described. This segment can be found in the following transcript(s): T51958_PEA_{—}1_T4 (SEQ ID NO:1081), T51958_PEA_{—}1_T5 (SEQ ID NO:1082), T51958_PEA_{—}1_T6 (SEQ ID NO:1083), T51958_PEA_{—}1_T8 (SEQ ID NO:1084), T51958_PEA_{—}1_T12 (SEQ ID NO:1085), T51958_PEA_{—}1_T16 (SEQ ID NO:1086), T51958_PEA_{—}1_T33 (SEQ ID NO:1087), T51958_PEA_{—}1_T35 (SEQ ID NO:1088) and T51958_PEA_{—}1_T41 (SEQ ID NO:1092). Table 29 below describes the starting and ending position of this segment on each transcript.

TABLE 29
Segment location on transcripts

| | Segment | |
|---|---|---|
| | starting | Segment |
| Transcript name | position | ending position |
| T51958_PEA_1_T4 (SEQ ID NO: 1081) | 1827 | 1976 |
| T51958_PEA_1_T5 (SEQ ID NO: 1082) | 1827 | 1976 |
| T51958_PEA_1_T6 (SEQ ID NO: 1083) | 1917 | 2066 |
| T51958_PEA_1_T8 (SEQ ID NO: 1084) | 1636 | 1785 |
| T51958_PEA_1_T12 (SEQ ID NO: 1085) | 1827 | 1976 |
| T51958_PEA_1_T16 (SEQ ID NO: 1086) | 1827 | 1976 |
| T51958_PEA_1_T33 (SEQ ID NO: 1087) | 1827 | 1976 |
| T51958_PEA_1_T35 (SEQ ID NO: 1088) | 1827 | 1976 |
| T51958_PEA_1_T41 (SEQ ID NO: 1092) | 1797 | 1946 |

[3517] Segment cluster T51958_PEA_{—}1_node_{—}40 (SEQ ID NO:1106) according to the present invention is supported by 13 libraries. The number of libraries was determined as previously described. This segment can be found in the following transcript(s): T51958_PEA_{—}1_T4 (SEQ ID NO:1081), T51958_PEA_{—}1_T5 (SEQ ID NO:1082), T51958_PEA_{—}1_T12 (SEQ ID NO:1085), T51958_PEA_{—}1_T16 (SEQ ID NO:1086), T51958_PEA_{—}1_T33 (SEQ ID NO:1087) and T51958_PEA_{—}1_T35 (SEQ ID NO:1088). Table 30 below describes the starting and ending position of this segment on each transcript.

TABLE 30
Segment location on transcripts

| | Segment | |
|---|---|---|
| | starting | Segment |
| Transcript name | position | ending position |
| T51958_PEA_1_T4 (SEQ ID NO: 1081) | 2256 | 2733 |
| T51958_PEA_1_T5 (SEQ ID NO: 1082) | 2240 | 2717 |
| T51958_PEA_1_T12 (SEQ ID NO: 1085) | 2256 | 2733 |
| T51958_PEA_1_T16 (SEQ ID NO: 1086) | 2256 | 2733 |
| T51958_PEA_1_T33 (SEQ ID NO: 1087) | 2256 | 2733 |
| T51958_PEA_1_T35 (SEQ ID NO: 1088) | 2256 | 2733 |

[3518] Segment cluster T51958_PEA_{—}1_node_{—}41 (SEQ ID NO:1107) according to the present invention is supported by 12 libraries. The number of libraries was determined as previously described. This segment can be found in the following transcript(s): T51958_PEA_{—}1_T4 (SEQ ID NO:1081), T51958_PEA_{—}1_T5 (SEQ ID NO:1082), T51958_PEA_{—}1_T12 (SEQ ID NO:1085), T51958_PEA_{—}1_T16 (SEQ ID NO:1086) and T51958_PEA_{—}1_T33 (SEQ ID NO:1087). Table 31 below describes the starting and ending position of this segment on each transcript.

TABLE 31
Segment location on transcripts

| | Segment | |
|---|---|---|
| | starting | Segment |
| Transcript name | position | ending position |
| T51958_PEA_1_T4 (SEQ ID NO: 1081) | 2734 | 3372 |
| T51958_PEA_1_T5 (SEQ ID NO: 1082) | 2718 | 3356 |
| T51958_PEA_1_T12 (SEQ ID NO: 1085) | 2734 | 3372 |
| T51958_PEA_1_T16 (SEQ ID NO: 1086) | 2734 | 3372 |
| T51958_PEA_1_T33 (SEQ ID NO: 1087) | 2734 | 3372 |

[3519] Segment cluster T51958_PEA_{—}1_node_{—}46 (SEQ ID NO:1108) according to the present invention is supported by 15 libraries. The number of libraries was determined as previously described. This segment can be found in the following transcript(s): T51958_PEA_{—}1_T12 (SEQ ID NO:1085), T51958_PEA_{—}1_T16 (SEQ ID NO:1086) and T51958_PEA_{—}1_T33 (SEQ ID NO:1087). Table 32 below describes the starting and ending position of this segment on each transcript.

TABLE 32
Segment location on transcripts

| | Segment | |
|---|---|---|
| | starting | Segment |
| Transcript name | position | ending position |
| T51958_PEA_1_T12 (SEQ ID NO: 1085) | 3577 | 4406 |
| T51958_PEA_1_T16 (SEQ ID NO: 1086) | 3577 | 4406 |
| T51958_PEA_1_T33 (SEQ ID NO: 1087) | 3577 | 4406 |

[3520] Segment cluster T51958_PEA_{—}1_node_{—}51 (SEQ ID NO:1109) according to the present invention is supported by 2 libraries. The number of libraries was determined as previously described. This segment can be found in the following transcript(s): T51958_PEA_{—}1_T33 (SEQ ID NO:1087). Table 33 below describes the starting and ending position of this segment on each transcript.

TABLE 33
Segment location on transcripts

| | Segment | Segment |
|---|---|---|
| | starting | ending |
| Transcript name | position | position |
| T51958_PEA_1_T33 (SEQ ID NO: 1087) | 4563 | 4811 |

[3521] Segment cluster T51958_PEA_{—}1_node_{—}55 (SEQ ID NO:1110) according to the present invention is supported by 82 libraries. The number of libraries was determined as previously described. This segment can be found in the following transcript(s): T51958_PEA_{—}1_T4 (SEQ ID NO:1081), T51958_PEA_{—}1_T5 (SEQ ID NO:1082), T51958_PEA_{—}1_T6 (SEQ ID NO:1083), T51958_PEA_{—}1_T8 (SEQ ID NO:1084), T51958_PEA_{—}1_T12 (SEQ ID NO:1085) and T51958_PEA_{—}1_T41 (SEQ ID NO:1092). Table 34 below describes the starting and ending position of this segment on each transcript.

TABLE 34
Segment location on transcripts

| | Segment | Segment |
|---|---|---|
| | starting | ending |
| Transcript name | position | position |
| T51958_PEA_1_T4 (SEQ ID NO: 1081) | 3753 | 3965 |
| T51958_PEA_1_T5 (SEQ ID NO: 1082) | 3737 | 3949 |
| T51958_PEA_1_T6 (SEQ ID NO: 1083) | 2726 | 2938 |
| T51958_PEA_1_T8 (SEQ ID NO: 1084) | 2440 | 2652 |
| T51958_PEA_1_T12 (SEQ ID NO: 1085) | 4583 | 4795 |
| T51958_PEA_1_T41 (SEQ ID NO: 1092) | 2606 | 2818 |

[3522] Segment cluster T51958_PEA_{—}1_node_{—}67 (SEQ ID NO:1111) according to the present invention is supported by 81 libraries. The number of libraries was determined as previously described. This segment can be found in the following transcript(s): T51958_PEA_{—}1_T4 (SEQ ID NO:1081), T51958_PEA_{—}1_T5 (SEQ ID NO:1082), T51958_PEA_{—}1_T6 (SEQ ID NO:1083), T51958_PEA_{—}1_T8 (SEQ ID NO:1084), T51958_PEA_{—}1_T12 (SEQ ID NO:1085), T51958_PEA_{—}1_T16 (SEQ ID NO:1086) and T51958_PEA_{—}1_T41 (SEQ ID NO:1092). Table 35 below describes the starting and ending position of this segment on each transcript.

TABLE 35
Segment location on transcripts

| | Segment | Segment |
|---|---|---|
| | starting | ending |
| Transcript name | position | position |
| T51958_PEA_1_T4 (SEQ ID NO: 1081) | 4047 | 4198 |
| T51958_PEA_1_T5 (SEQ ID NO: 1082) | 4031 | 4182 |
| T51958_PEA_1_T6 (SEQ ID NO: 1083) | 3020 | 3171 |
| T51958_PEA_1_T8 (SEQ ID NO: 1084) | 2734 | 2885 |
| T51958_PEA_1_T12 (SEQ ID NO: 1085) | 4877 | 5028 |
| T51958_PEA_1_T16 (SEQ ID NO: 1086) | 4644 | 4795 |
| T51958_PEA_1_T41 (SEQ ID NO: 1092) | 2900 | 3051 |

[3523] Segment cluster T51958_PEA_{—}1_node_{—}70 (SEQ ID NO:1112) according to the present invention is supported by 85 libraries. The number of libraries was determined as previously described. This segment can be found in the following transcript(s): T51958_PEA_{—}1_T4 (SEQ ID NO:1081), T51958_PEA_{—}1_T5 (SEQ ID NO:1082), T51958_PEA_{—}1_T6 (SEQ ID NO:1083), T51958_PEA_{—}1_T8 (SEQ ID NO:1084), T51958_PEA_{—}1_T12 (SEQ ID NO:1085), T51958_PEA_{—}1_T16 (SEQ ID NO:1086) and T51958_PEA_{—}1_T41 (SEQ ID NO:1092). Table 36 below describes the starting and ending position of this segment on each transcript.

TABLE 36
Segment location on transcripts

| | Segment | Segment |
|---|---|---|
| | starting | ending |
| Transcript name | position | position |
| T51958_PEA_1_T4 (SEQ ID NO: 1081) | 4199 | 4320 |
| T51958_PEA_1_T5 (SEQ ID NO: 1082) | 4183 | 4304 |
| T51958_PEA_1_T6 (SEQ ID NO: 1083) | 3172 | 3293 |
| T51958_PEA_1_T8 (SEQ ID NO: 1084) | 2886 | 3007 |
| T51958_PEA_1_T12 (SEQ ID NO: 1085) | 5029 | 5150 |
| T51958_PEA_1_T16 (SEQ ID NO: 1086) | 4796 | 4917 |
| T51958_PEA_1_T41 (SEQ ID NO: 1092) | 3052 | 3173 |

[3524] Segment cluster T51958_PEA_{—}1_node_{—}74 (SEQ ID NO:1113) according to the present invention is supported by 191 libraries. The number of libraries was determined as previously described. This segment can be found in the following transcript(s): T51958_PEA_{—}1_T4 (SEQ ID NO:1081), T51958_PEA_{—}1_T5 (SEQ ID NO:1082), T51958_PEA_{—}1_T6 (SEQ ID NO:1083), T51958_PEA_{—}1_T8 (SEQ ID NO:1084), T51958_PEA_{—}1_T12 (SEQ ID NO:1085), T51958_PEA_{—}1_T16 (SEQ ID NO:1086) and T51958_PEA_{—}1_T41 (SEQ ID NO:1092). Table 37 below describes the starting and ending position of this segment on each transcript.

TABLE 37
Segment location on transcripts

| | Segment | Segment |
|---|---|---|
| | starting | ending |
| Transcript name | position | position |
| T51958_PEA_1_T4 (SEQ ID NO: 1081) | 4378 | 5077 |
| T51958_PEA_1_T5 (SEQ ID NO: 1082) | 4362 | 5061 |
| T51958_PEA_1_T6 (SEQ ID NO: 1083) | 3351 | 4050 |
| T51958_PEA_1_T8 (SEQ ID NO: 1084) | 3065 | 3764 |
| T51958_PEA_1_T12 (SEQ ID NO: 1085) | 5208 | 5907 |
| T51958_PEA_1_T16 (SEQ ID NO: 1086) | 4975 | 5674 |
| T51958_PEA_1_T41 (SEQ ID NO: 1092) | 3231 | 3930 |

[3525] Segment cluster T51958_PEA_{—}1_node_{—}78 (SEQ ID NO:1114) according to the present invention is supported by 115 libraries. The number of libraries was determined as previously described. This segment can be found in the following transcript(s): T51958_PEA_{—}1_T4 (SEQ ID NO:1081), T51958_PEA_{—}1_T5 (SEQ ID NO:1082), T51958_PEA_{—}1_T6 (SEQ ID NO:1083), T51958_PEA_{—}1_T8 (SEQ ID NO:1084), T51958_PEA_{—}1_T12 (SEQ ID NO:1085), T51958_PEA_{—}1_T16 (SEQ ID NO:1086) and T51958_PEA_{—}1_T41 (SEQ ID NO:1092). Table 38 below describes the starting and ending position of this segment on each transcript.

TABLE 38
Segment location on transcripts

| | Segment | Segment |
|---|---|---|
| | starting | ending |
| Transcript name | position | position |
| T51958_PEA_1_T4 (SEQ ID NO: 1081) | 5124 | 5376 |
| T51958_PEA_1_T5 (SEQ ID NO: 1082) | 5108 | 5360 |
| T51958_PEA_1_T6 (SEQ ID NO: 1083) | 4097 | 4349 |
| T51958_PEA_1_T8 (SEQ ID NO: 1084) | 3811 | 4063 |
| T51958_PEA_1_T12 (SEQ ID NO: 1085) | 5954 | 6206 |
| T51958_PEA_1_T16 (SEQ ID NO: 1086) | 5721 | 5973 |
| T51958_PEA_1_T41 (SEQ ID NO: 1092) | 3977 | 4229 |

[3526] According to an optional embodiment of the present invention, short segments related to the above cluster are also provided. These segments are up to about 120 bp in length, and so are included in a separate description.

[3527] Segment cluster T51958_PEA_{—}1_node_{—}11 (SEQ ID NO:11115) according to the present invention is supported by 23 libraries. The number of libraries was determined as previously described. This segment can be found in the following transcript(s): T51958_PEA_{—}1_T4 (SEQ ID NO:1081), T51958_PEA_{—}1_T5 (SEQ ID NO:1082), T51958_PEA_{—}1_T6 (SEQ ID NO:1083), T51958_PEA_{—}1_T8 (SEQ ID NO:1084), T51958_PEA_{—}1_T12 (SEQ ID NO:1085), T51958_PEA_{—}1_T16 (SEQ ID NO:1086), T51958_PEA_{—}1_T33 (SEQ ID NO:1087), T51958_PEA_{—}1_T35 (SEQ ID NO:1088), T51958_PEA_{—}1_T37 (SEQ ID NO:1089), T51958_PEA_{—}1_T39 (SEQ ID NO:1090) and T51958_PEA_{—}1_T41 (SEQ ID NO:1092). Table 39 below describes the starting and ending position of this segment on each transcript.

TABLE 39
Segment location on transcripts

| | Segment | Segment |
|---|---|---|
| | starting | ending |
| Transcript name | position | position |
| T51958_PEA_1_T4 (SEQ ID NO: 1081) | 576 | 678 |
| T51958_PEA_1_T5 (SEQ ID NO: 1082) | 576 | 678 |
| T51958_PEA_1_T6 (SEQ ID NO: 1083) | 576 | 678 |
| T51958_PEA_1_T8 (SEQ ID NO: 1084) | 576 | 678 |
| T51958_PEA_1_T12 (SEQ ID NO: 1085) | 576 | 678 |
| T51958_PEA_1_T16 (SEQ ID NO: 1086) | 576 | 678 |
| T51958_PEA_1_T33 (SEQ ID NO: 1087) | 576 | 678 |
| T51958_PEA_1_T35 (SEQ ID NO: 1088) | 576 | 678 |
| T51958_PEA_1_T37 (SEQ ID NO: 1089) | 576 | 678 |
| T51958_PEA_1_T39 (SEQ ID NO: 1090) | 576 | 678 |
| T51958_PEA_1_T41 (SEQ ID NO: 1092) | 576 | 678 |

[3528] Segment cluster T51958_PEA_{—}1_node_{—}15 (SEQ ID NO:1116) according to the present invention is supported by 2 libraries. The number of libraries was determined as previously described. This segment can be found in the following transcript(s): T51958_PEA_{—}1_T6 (SEQ ID NO:1083) and T51958_PEA_{—}1_T41 (SEQ ID NO:1092). Table 40 below describes the starting and ending position of this segment on each transcript.

TABLE 40
Segment location on transcripts

| | Segment | Segment |
|---|---|---|
| | starting | ending |
| Transcript name | position | position |
| T51958_PEA_1_T6 (SEQ ID NO: 1083) | 870 | 959 |
| T51958_PEA_1_T41 (SEQ ID NO: 1092) | 870 | 959 |

[3529] Segment cluster T51958_PEA_{—}1_node_{—}20 (SEQ ID NO:1117) according to the present invention is supported by 25 libraries. The number of libraries was determined as previously described. This segment can be found in the following transcript(s): T51958_PEA_{—}1_T4 (SEQ ID NO:1081), T51958_PEA_{—}1_T5 (SEQ ID NO:1082), T51958_PEA_{—}1_T6 (SEQ ID NO:1083), T51958_PEA_{—}1_T8 (SEQ ID NO:1084), T51958_PEA_{—}1_T12 (SEQ ID NO:1085), T51958_PEA_{—}1_T16 (SEQ ID NO:1086), T51958_PEA_{—}1_T33 (SEQ ID NO:1087), T51958_PEA_{—}1_T35 (SEQ ID NO:1088), T51958_PEA_{—}1_T37 (SEQ ID NO:1089), T51958_PEA_{—}1_T39 (SEQ ID NO:1090) and T51958_PEA_{—}1_T41 (SEQ ID NO:1092). Table 41 below describes the starting and ending position of this segment on each transcript.

TABLE 41
Segment location on transcripts

| | Segment | Segment |
|---|---|---|
| | starting | ending |
| Transcript name | position | position |
| T51958_PEA_1_T4 (SEQ ID NO: 1081) | 1170 | 1237 |
| T51958_PEA_1_T5 (SEQ ID NO: 1082) | 1170 | 1237 |
| T51958_PEA_1_T6 (SEQ ID NO: 1083) | 1260 | 1327 |
| T51958_PEA_1_T8 (SEQ ID NO: 1084) | 979 | 1046 |
| T51958_PEA_1_T12 (SEQ ID NO: 1085) | 1170 | 1237 |
| T51958_PEA_1_T16 (SEQ ID NO: 1086) | 1170 | 1237 |
| T51958_PEA_1_T33 (SEQ ID NO: 1087) | 1170 | 1237 |
| T51958_PEA_1_T35 (SEQ ID NO: 1088) | 1170 | 1237 |
| T51958_PEA_1_T37 (SEQ ID NO: 1089) | 1170 | 1237 |
| T51958_PEA_1_T39 (SEQ ID NO: 1090) | 1170 | 1237 |
| T51958_PEA_1_T41 (SEQ ID NO: 1092) | 1260 | 1327 |

[3530] Segment cluster T51958_PEA_{—}1_node_{—}26 (SEQ ID NO:1118) according to the present invention can be found in the following transcript(s): T51958_PEA_{—}1_T4 (SEQ ID NO:1081), T51958_PEA_{—}1_T5 (SEQ ID NO:1082), T51958_PEA_{—}1_T6 (SEQ ID NO:1083), T51958_PEA_{—}1_T8 (SEQ ID NO:1084), T51958_PEA_{—}1_T12 (SEQ ID NO:1085), T51958_PEA_{—}1_T16 (SEQ ID NO:1086), T51958_PEA_{—}1_T33 (SEQ ID NO:1087), T51958_PEA_{—}1_T35 (SEQ ID NO:1088) and T51958_PEA_{—}1_T41 (SEQ ID NO:1092). Table 42 below describes the starting and ending position of this segment on each transcript.

TABLE 42
Segment location on transcripts

| | Segment | Segment |
|---|---|---|
| | starting | ending |
| Transcript name | position | position |
| T51958_PEA_1_T4 (SEQ ID NO: 1081) | 1571 | 1585 |
| T51958_PEA_1_T5 (SEQ ID NO: 1082) | 1571 | 1585 |
| T51958_PEA_1_T6 (SEQ ID NO: 1083) | 1661 | 1675 |
| T51958_PEA_1_T8 (SEQ ID NO: 1084) | 1380 | 1394 |
| T51958_PEA_1_T12 (SEQ ID NO: 1085) | 1571 | 1585 |
| T51958_PEA_1_T16 (SEQ ID NO: 1086) | 1571 | 1585 |
| T51958_PEA_1_T33 (SEQ ID NO: 1087) | 1571 | 1585 |
| T51958_PEA_1_T35 (SEQ ID NO: 1088) | 1571 | 1585 |
| T51958_PEA_1_T41 (SEQ ID NO: 1092) | 1661 | 1675 |

[3531] Segment cluster T51958_PEA_{—}1_node_{—}35 (SEQ ID NO:1119) according to the present invention is supported by 41 libraries. The number of libraries was determined as previously described. This segment can be found in the following transcript(s): T51958_PEA_{—}1_T4 (SEQ ID NO:1081), T51958_PEA_{—}1_T5 (SEQ ID NO:1082), T51958_PEA_{—}1_T6 (SEQ ID NO:1083), T51958_PEA_{—}1_T8 (SEQ ID NO:1084), T51958_PEA_{—}1_T12 (SEQ ID NO:1085), T51958_PEA_{—}1_T16 (SEQ ID NO:1086), T51958_PEA_{—}1_T33 (SEQ ID NO:1087), T51958_PEA_{—}1_T35 (SEQ ID NO:1088) and T51958_PEA_{—}1_T41 (SEQ ID NO:1092). Table 43 below describes the starting and ending position of this segment on each transcript.

TABLE 43
Segment location on transcripts

| | Segment | Segment |
|---|---|---|
| | starting | ending |
| Transcript name | position | position |
| T51958_PEA_1_T4 (SEQ ID NO: 1081) | 1977 | 2087 |
| T51958_PEA_1_T5 (SEQ ID NO: 1082) | 1977 | 2087 |
| T51958_PEA_1_T6 (SEQ ID NO: 1083) | 2067 | 2177 |
| T51958_PEA_1_T8 (SEQ ID NO: 1084) | 1786 | 1896 |
| T51958_PEA_1_T12 (SEQ ID NO: 1085) | 1977 | 2087 |
| T51958_PEA_1_T16 (SEQ ID NO: 1086) | 1977 | 2087 |
| T51958_PEA_1_T33 (SEQ ID NO: 1087) | 1977 | 2087 |
| T51958_PEA_1_T35 (SEQ ID NO: 1088) | 1977 | 2087 |
| T51958_PEA_1_T41 (SEQ ID NO: 1092) | 1947 | 2057 |

[3532] Segment cluster T51958_PEA_{—}1_node_{—}36 (SEQ ID NO:1120) according to the present invention is supported by 35 libraries. The number of libraries was determined as previously described. This segment can be found in the following transcript(s): T51958_PEA_{—}1_T4 (SEQ ID NO:1081), T51958_PEA_{—}1_T5 (SEQ ID NO:1082), T51958_PEA_{—}1_T6 (SEQ ID NO:1083), T51958_PEA_{—}1_T8 (SEQ ID NO:1084), T51958_PEA_{—}1_T12 (SEQ ID NO:1085), T51958_PEA_{—}1_T16 (SEQ ID NO:1086), T51958_PEA_{—}1_T33 (SEQ ID NO:1087), T51958_PEA_{—}1_T35 (SEQ ID NO:1088) and T51958_PEA_{—}1_T41 (SEQ ID NO:1092). Table 44 below describes the starting and ending position of this segment on each transcript.

TABLE 44
Segment location on transcripts

| | Segment | Segment |
|---|---|---|
| | starting | ending |
| Transcript name | position | position |
| T51958_PEA_1_T4 (SEQ ID NO: 1081) | 2088 | 2127 |
| T51958_PEA_1_T5 (SEQ ID NO: 1082) | 2088 | 2127 |
| T51958_PEA_1_T6 (SEQ ID NO: 1083) | 2178 | 2217 |
| T51958_PEA_1_T8 (SEQ ID NO: 1084) | 1897 | 1936 |
| T51958_PEA_1_T12 (SEQ ID NO: 1085) | 2088 | 2127 |
| T51958_PEA_1_T16 (SEQ ID NO: 1086) | 2088 | 2127 |
| T51958_PEA_1_T33 (SEQ ID NO: 1087) | 2088 | 2127 |
| T51958_PEA_1_T35 (SEQ ID NO: 1088) | 2088 | 2127 |
| T51958_PEA_1_T41 (SEQ ID NO: 1092) | 2058 | 2097 |

[3533] Segment cluster T51958_PEA_{—}1_node_{—}38 (SEQ ID NO:1121) according to the present invention can be found in the following transcript(s): T51958_PEA_{—}1_T4 (SEQ ID NO:1081), T51958_PEA_{—}1_T6 (SEQ ID NO:1083), T51958_PEA_{—}1_T8 (SEQ ID NO:1084), T51958_PEA_{—}1_T12 (SEQ ID NO:1085), T51958_PEA_{—}1_T16 (SEQ ID NO:1086), T51958_PEA_{—}1_T33 (SEQ ID NO:1087), T51958_PEA_{—}1_T35 (SEQ ID NO:1088) and T51958_PEA_{—}1_T41 (SEQ ID NO:1092). Table 45 below describes the starting and ending position of this segment on each transcript.

TABLE 45
Segment location on transcripts

| | Segment | Segment |
|---|---|---|
| | starting | ending |
| Transcript name | position | position |
| T51958_PEA_1_T4 (SEQ ID NO: 1081) | 2128 | 2143 |
| T51958_PEA_1_T6 (SEQ ID NO: 1083) | 2218 | 2233 |
| T51958_PEA_1_T8 (SEQ ID NO: 1084) | 1937 | 1952 |
| T51958_PEA_1_T12 (SEQ ID NO: 1085) | 2128 | 2143 |
| T51958_PEA_1_T16 (SEQ ID NO: 1086) | 2128 | 2143 |
| T51958_PEA_1_T33 (SEQ ID NO: 1087) | 2128 | 2143 |
| T51958_PEA_1_T35 (SEQ ID NO: 1088) | 2128 | 2143 |
| T51958_PEA_1_T41 (SEQ ID NO: 1092) | 2098 | 2113 |

[3534] Segment cluster T51958_PEA_{—}1_node_{—}39 (SEQ ID NO:1122) according to the present invention is supported by 40 libraries. The number of libraries was determined as previously described. This segment can be found in the following transcript(s): T51958_PEA_{—}1_T4 (SEQ ID NO:1081), T51958_PEA_{—}1_T5 (SEQ ID NO:1082), T51958_PEA_{—}1_T6 (SEQ ID NO:1083), T51958_PEA_{—}1_T8 (SEQ ID NO:1084), T51958_PEA_{—}1_T12 (SEQ ID NO:1085), T51958_PEA_{—}1_T16 (SEQ ID NO:1086), T51958_PEA_{—}1_T33 (SEQ ID NO:1087), T51958_PEA_{—}1_T35 (SEQ ID NO:1088) and T51958_PEA_{—}1_T41 (SEQ ID NO:1092). Table 46 below describes the starting and ending position of this segment on each transcript.

TABLE 46
Segment location on transcripts

| | Segment | Segment |
|---|---|---|
| | starting | ending |
| Transcript name | position | position |
| T51958_PEA_1_T4 (SEQ ID NO: 1081) | 2144 | 2255 |
| T51958_PEA_1_T5 (SEQ ID NO: 1082) | 2128 | 2239 |
| T51958_PEA_1_T6 (SEQ ID NO: 1083) | 2234 | 2345 |
| T51958_PEA_1_T8 (SEQ ID NO: 1084) | 1953 | 2064 |
| T51958_PEA_1_T12 (SEQ ID NO: 1085) | 2144 | 2255 |
| T51958_PEA_1_T16 (SEQ ID NO: 1086) | 2144 | 2255 |
| T51958_PEA_1_T33 (SEQ ID NO: 1087) | 2144 | 2255 |
| T51958_PEA_1_T35 (SEQ ID NO: 1088) | 2144 | 2255 |
| T51958_PEA_1_T41 (SEQ ID NO: 1092) | 2114 | 2225 |

[3535] Segment cluster T51958_PEA_{—}1_node_{—}42 (SEQ ID NO:1123) according to the present invention can be found in the following transcript(s): T51958_PEA_{—}1_T4 (SEQ ID NO:1081), T51958_PEA_{—}1_T5 (SEQ ID NO:1082), T51958_PEA_{—}1_T6 (SEQ ID NO:1083), T51958_PEA_{—}1_T12 (SEQ ID NO:1085), T51958_PEA_{—}1_T16 (SEQ ID NO:1086), T51958_PEA_{—}1_T33 (SEQ ID NO:1087) and T51958_PEA_{—}1_T41 (SEQ ID NO:1092). Table 47 below describes the starting and ending position of this segment on each transcript.

TABLE 47
Segment location on transcripts

| | Segment | Segment |
|---|---|---|
| | starting | ending |
| Transcript name | position | position |
| T51958_PEA_1_T4 (SEQ ID NO: 1081) | 3373 | 3377 |
| T51958_PEA_1_T5 (SEQ ID NO: 1082) | 3357 | 3361 |
| T51958_PEA_1_T6 (SEQ ID NO: 1083) | 2346 | 2350 |
| T51958_PEA_1_T12 (SEQ ID NO: 1085) | 3373 | 3377 |
| T51958_PEA_1_T16 (SEQ ID NO: 1086) | 3373 | 3377 |
| T51958_PEA_1_T33 (SEQ ID NO: 1087) | 3373 | 3377 |
| T51958_PEA_1_T41 (SEQ ID NO: 1092) | 2226 | 2230 |

[3536] Segment cluster T51958_PEA_{—}1_node_{—}43 (SEQ ID NO:1124) according to the present invention is supported by 50 libraries. The number of libraries was determined as previously described. This segment can be found in the following transcript(s): T51958_PEA_{—}1_T4 (SEQ ID NO:1081), T51958_PEA_{—}1_T5 (SEQ ID NO:1082), T51958_PEA_{—}1_T6 (SEQ ID NO:1083), T51958_PEA_{—}1_T8 (SEQ ID NO:1084), T51958_PEA_{—}1_T12 (SEQ ID NO:1085), T51958_PEA_{—}1_T16 (SEQ ID NO:1086), T51958_PEA_{—}1_T33 (SEQ ID NO:1087) and T51958_PEA_{—}1_T41 (SEQ ID NO:1092). Table 48 below describes the starting and ending position of this segment on each transcript.

TABLE 48
Segment location on transcripts

| | Segment | Segment |
|---|---|---|
| | starting | ending |
| Transcript name | position | position |
| T51958_PEA_1_T4 (SEQ ID NO: 1081) | 3378 | 3496 |
| T51958_PEA_1_T5 (SEQ ID NO: 1082) | 3362 | 3480 |
| T51958_PEA_1_T6 (SEQ ID NO: 1083) | 2351 | 2469 |
| T51958_PEA_1_T8 (SEQ ID NO: 1084) | 2065 | 2183 |
| T51958_PEA_1_T12 (SEQ ID NO: 1085) | 3378 | 3496 |
| T51958_PEA_1_T16 (SEQ ID NO: 1086) | 3378 | 3496 |
| T51958_PEA_1_T33 (SEQ ID NO: 1087) | 3378 | 3496 |
| T51958_PEA_1_T41 (SEQ ID NO: 1092) | 2231 | 2349 |

[3537] Segment cluster T51958_PEA_{—}1_node_{—}44 (SEQ ID NO:1125) according to the present invention is supported by 57 libraries. The number of libraries was determined as previously described. This segment can be found in the following transcript(s): T51958_PEA_{—}1_T4 (SEQ ID NO:1081), T51958_PEA_{—}1_T5 (SEQ ID NO:1082), T51958_PEA_{—}1_T6 (SEQ ID NO:1083), T51958_PEA_{—}1_T8 (SEQ ID NO:1084), T51958_PEA_{—}1_T12 (SEQ ID NO:1085), T51958_PEA_{—}1_T16 (SEQ ID NO:1086), T51958_PEA_{—}1_T33 (SEQ ID NO:1087) and T51958_PEA_{—}1_T41 (SEQ ID NO:1092). Table 49 below describes the starting and ending position of this segment on each transcript.

TABLE 49
Segment location on transcripts

| | Segment | Segment |
|---|---|---|
| | starting | ending |
| Transcript name | position | position |
| T51958_PEA_1_T4 (SEQ ID NO: 1081) | 3497 | 3560 |
| T51958_PEA_1_T5 (SEQ ID NO: 1082) | 3481 | 3544 |
| T51958_PEA_1_T6 (SEQ ID NO: 1083) | 2470 | 2533 |
| T51958_PEA_1_T8 (SEQ ID NO: 1084) | 2184 | 2247 |
| T51958_PEA_1_T12 (SEQ ID NO: 1085) | 3497 | 3560 |
| T51958_PEA_1_T16 (SEQ ID NO: 1086) | 3497 | 3560 |
| T51958_PEA_1_T33 (SEQ ID NO: 1087) | 3497 | 3560 |
| T51958_PEA_1_T41 (SEQ ID NO: 1092) | 2350 | 2413 |

[3538] Segment cluster T51958_PEA_{—}1_node_{—}45 (SEQ ID NO:1126) according to the present invention can be found in the following transcript(s): T51958_PEA_{—}1_T4 (SEQ ID NO:1081), T51958_PEA_{—}1_T5 (SEQ ID NO:1082), T51958_PEA_{—}1_T6 (SEQ ID NO:1083), T51958_PEA_{—}1_T8 (SEQ ID NO:1084), T51958_PEA_{—}1_T12 (SEQ ID NO:1085), T51958_PEA_{—}1_T16 (SEQ ID NO:1086), T51958_PEA_{—}1_T33 (SEQ ID NO:1087) and T51958_PEA_{—}1_T41 (SEQ ID NO:1092). Table 50 below describes the starting and ending position of this segment on each transcript.

TABLE 50
Segment location on transcripts

| | Segment | Segment |
|---|---|---|
| | starting | ending |
| Transcript name | position | position |
| T51958_PEA_1_T4 (SEQ ID NO: 1081) | 3561 | 3576 |
| T51958_PEA_1_T5 (SEQ ID NO: 1082) | 3545 | 3560 |
| T51958_PEA_1_T6 (SEQ ID NO: 1083) | 2534 | 2549 |
| T51958_PEA_1_T8 (SEQ ID NO: 1084) | 2248 | 2263 |
| T51958_PEA_1_T12 (SEQ ID NO: 1085) | 3561 | 3576 |
| T51958_PEA_1_T16 (SEQ ID NO: 1086) | 3561 | 3576 |
| T51958_PEA_1_T33 (SEQ ID NO: 1087) | 3561 | 3576 |
| T51958_PEA_1_T41 (SEQ ID NO: 1092) | 2414 | 2429 |

[3539] Segment cluster T51958_PEA_{—}1_node_{—}47 (SEQ ID NO:1127) according to the present invention is supported by 65 libraries. The number of libraries was determined as previously described. This segment can be found in the following transcript(s): T51958_PEA_{—}1_T4 (SEQ ID NO:1081), T51958_PEA_{—}1_T5 (SEQ ID NO:1082), T51958_PEA_{—}1_T6 (SEQ ID NO:1083), T51958_PEA_{—}1_T8 (SEQ ID NO:1084), T51958_PEA_{—}1_T12 (SEQ ID NO:1085), T51958_PEA_{—}1_T16 (SEQ ID NO:1086), T51958_PEA_{—}1_T33 (SEQ ID NO:1087) and T51958_PEA_{—}1_T41 (SEQ ID NO:1092). Table 51 below describes the starting and ending position of this segment on each transcript.

TABLE 51
Segment location on transcripts

| | Segment | Segment |
|---|---|---|
| | starting | ending |
| Transcript name | position | position |
| T51958_PEA_1_T4 (SEQ ID NO: 1081) | 3577 | 3651 |
| T51958_PEA_1_T5 (SEQ ID NO: 1082) | 3561 | 3635 |
| T51958_PEA_1_T6 (SEQ ID NO: 1083) | 2550 | 2624 |
| T51958_PEA_1_T8 (SEQ ID NO: 1084) | 2264 | 2338 |
| T51958_PEA_1_T12 (SEQ ID NO: 1085) | 4407 | 4481 |
| T51958_PEA_1_T16 (SEQ ID NO: 1086) | 4407 | 4481 |
| T51958_PEA_1_T33 (SEQ ID NO: 1087) | 4407 | 4481 |
| T51958_PEA_1_T41 (SEQ ID NO: 1092) | 2430 | 2504 |

[3540] Segment cluster T51958_PEA_{—}1_node_{—}48 (SEQ ID NO:1128) according to the present invention is supported by 68 libraries. The number of libraries was determined as previously described. This segment can be found in the following transcript(s): T51958_PEA_{—}1_T4 (SEQ ID NO:1081), T51958_PEA_{—}1_T5 (SEQ ID NO:1082), T51958_PEA_{—}1_T6 (SEQ ID NO:1083), T51958_PEA_{—}1_T8 (SEQ ID NO:1084), T51958_PEA_{—}1_T12 (SEQ ID NO:1085), T51958_PEA_{—}1_T16 (SEQ ID NO:1086), T51958_PEA_{—}1_T33 (SEQ ID NO:1087) and T51958_PEA_{—}1_T41 (SEQ ID NO:1092). Table 52 below describes the starting and ending position of this segment on each transcript.

TABLE 52
Segment location on transcripts

| | Segment | Segment |
|---|---|---|
| | starting | ending |
| Transcript name | position | position |
| T51958_PEA_1_T4 (SEQ ID NO: 1081) | 3652 | 3681 |
| T51958_PEA_1_T5 (SEQ ID NO: 1082) | 3636 | 3665 |
| T51958_PEA_1_T6 (SEQ ID NO: 1083) | 2625 | 2654 |
| T51958_PEA_1_T8 (SEQ ID NO: 1084) | 2339 | 2368 |
| T51958_PEA_1_T12 (SEQ ID NO: 1085) | 4482 | 4511 |
| T51958_PEA_1_T16 (SEQ ID NO: 1086) | 4482 | 4511 |
| T51958_PEA_1_T33 (SEQ ID NO: 1087) | 4482 | 4511 |
| T51958_PEA_1_T41 (SEQ ID NO: 1092) | 2505 | 2534 |

[3541] Segment cluster T51958_PEA_{—}1_node_{—}49 (SEQ ID NO:1129) according to the present invention is supported by 70 libraries. The number of libraries was determined as previously described. This segment can be found in the following transcript(s): T51958_PEA_{—}1_T4 (SEQ ID NO:1081), T51958_PEA_{—}1_T5 (SEQ ID NO:1082), T51958_PEA_{—}1_T6 (SEQ ID NO:1083), T51958_PEA_{—}1_T8 (SEQ ID NO:1084), T51958_PEA_{—}1_T12 (SEQ ID NO:1085), T51958_PEA_{—}1_T16 (SEQ ID NO:1086), T51958_PEA_{—}1_T33 (SEQ ID NO:1087) and T51958_PEA_{—}1_T41 (SEQ ID NO:1092). Table 53 below describes the starting and ending position of this segment on each transcript.

TABLE 53
Segment location on transcripts

| | Segment | Segment |
|---|---|---|
| | starting | ending |
| Transcript name | position | position |
| T51958_PEA_1_T4 (SEQ ID NO: 1081) | 3682 | 3717 |
| T51958_PEA_1_T5 (SEQ ID NO: 1082) | 3666 | 3701 |
| T51958_PEA_1_T6 (SEQ ID NO: 1083) | 2655 | 2690 |
| T51958_PEA_1_T8 (SEQ ID NO: 1084) | 2369 | 2404 |
| T51958_PEA_1_T12 (SEQ ID NO: 1085) | 4512 | 4547 |
| T51958_PEA_1_T16 (SEQ ID NO: 1086) | 4512 | 4547 |
| T51958_PEA_1_T33 (SEQ ID NO: 1087) | 4512 | 4547 |
| T51958_PEA_1_T41 (SEQ ID NO: 1092) | 2535 | 2570 |

[3542] Segment cluster T51958_PEA_{—}1_node_{—}50 (SEQ ID NO:1130) according to the present invention can be found in the following transcript(s): T51958_PEA_{—}1_T4 (SEQ ID NO:1081), T51958_PEA_{—}1_T5 (SEQ ID NO:1082), T51958_PEA_{—}1_T6 (SEQ ID NO:1083), T51958_PEA_{—}1_T8 (SEQ ID NO:1084), T51958_PEA_{—}1_T12 (SEQ ID NO:1085), T51958_PEA_{—}1_T16 (SEQ ID NO:1086), T51958_PEA_{—}1_T33 (SEQ ID NO:1087) and T51958_PEA_{—}1_T41 (SEQ ID NO:1092). Table 54 below describes the starting and ending position of this segment on each transcript.

TABLE 54
Segment location on transcripts

| | Segment | Segment |
|---|---|---|
| | starting | ending |
| Transcript name | position | position |
| T51958_PEA_1_T4 (SEQ ID NO: 1081) | 3718 | 3732 |
| T51958_PEA_1_T5 (SEQ ID NO: 1082) | 3702 | 3716 |
| T51958_PEA_1_T6 (SEQ ID NO: 1083) | 2691 | 2705 |
| T51958_PEA_1_T8 (SEQ ID NO: 1084) | 2405 | 2419 |
| T51958_PEA_1_T12 (SEQ ID NO: 1085) | 4548 | 4562 |
| T51958_PEA_1_T16 (SEQ ID NO: 1086) | 4548 | 4562 |
| T51958_PEA_1_T33 (SEQ ID NO: 1087) | 4548 | 4562 |
| T51958_PEA_1_T41 (SEQ ID NO: 1092) | 2571 | 2585 |

[3543] Segment cluster T51958_PEA_{—}1_node_{—}54 (SEQ ID NO:1131) according to the present invention can be found in the following transcript(s): T51958_PEA_{—}1_T4 (SEQ ID NO:1081), T51958_PEA_{—}1_T5 (SEQ ID NO:1082), T51958_PEA_{—}1_T6 (SEQ ID NO:1083), T51958_PEA_{—}1_T8 (SEQ ID NO:1084), T51958_PEA_{—}1_T12 (SEQ ID NO:1085) and T51958_PEA_{—}1_T41 (SEQ ID NO:1092). Table 55 below describes the starting and ending position of this segment on each transcript.

TABLE 55
Segment location on transcripts

| | Segment | Segment |
|---|---|---|
| | starting | ending |
| Transcript name | position | position |
| T51958_PEA_1_T4 (SEQ ID NO: 1081) | 3733 | 3752 |
| T51958_PEA_1_T5 (SEQ ID NO: 1082) | 3717 | 3736 |
| T51958_PEA_1_T6 (SEQ ID NO: 1083) | 2706 | 2725 |
| T51958_PEA_1_T8 (SEQ ID NO: 1084) | 2420 | 2439 |
| T51958_PEA_1_T12 (SEQ ID NO: 1085) | 4563 | 4582 |
| T51958_PEA_1_T41 (SEQ ID NO: 1092) | 2586 | 2605 |

[3544] Segment cluster T51958_PEA_{—}1_node_{—}61 (SEQ ID NO:1132) according to the present invention is supported by 72 libraries. The number of libraries was determined as previously described. This segment can be found in the following transcript(s): T51958_PEA_{—}1_T4 (SEQ ID NO:1081), T51958_PEA_{—}1_T5 (SEQ ID NO:1082), T51958_PEA_{—}1_T6 (SEQ ID NO:1083), T51958_PEA_{—}1_T8 (SEQ ID NO:1084), T51958_PEA_{—}1_T12 (SEQ ID NO:1085), T51958_PEA_{—}1_T16 (SEQ ID NO:1086) and T51958_PEA_{—}1_T41 (SEQ ID NO:1092). Table 56 below describes the starting and ending position of this segment on each transcript.

TABLE 56
Segment location on transcripts

| | Segment | Segment |
|---|---|---|
| | starting | ending |
| Transcript name | position | position |
| T51958_PEA_1_T4 (SEQ ID NO: 1081) | 3966 | 4046 |
| T51958_PEA_1_T5 (SEQ ID NO: 1082) | 3950 | 4030 |
| T51958_PEA_1_T6 (SEQ ID NO: 1083) | 2939 | 3019 |
| T51958_PEA_1_T8 (SEQ ID NO: 1084) | 2653 | 2733 |
| T51958_PEA_1_T12 (SEQ ID NO: 1085) | 4796 | 4876 |
| T51958_PEA_1_T16 (SEQ ID NO: 1086) | 4563 | 4643 |
| T51958_PEA_1_T41 (SEQ ID NO: 1092) | 2819 | 2899 |

[3545] Segment cluster T51958_PEA_{—}1_node_{—}71 (SEQ ID NO:1133) according to the present invention is supported by 80 libraries. The number of libraries was determined as previously described. This segment can be found in the following transcript(s): T51958_PEA_{—}1_T4 (SEQ ID NO:1081), T51958_PEA_{—}1_T5 (SEQ ID NO:1082), T51958_PEA_{—}1_T6 (SEQ ID NO:1083), T51958_PEA_{—}1_T8 (SEQ ID NO:1084), T51958_PEA_{—}1_T12 (SEQ ID NO:1085), T51958_PEA_{—}1_T16 (SEQ ID NO:1086) and T51958_PEA_{—}1_T41 (SEQ ID NO:1092). Table 57 below describes the starting and ending position of this segment on each transcript.

TABLE 57
Segment location on transcripts

| | Segment | Segment |
|---|---|---|
| | starting | ending |
| Transcript name | position | position |
| T51958_PEA_1_T4 (SEQ ID NO: 1081) | 4321 | 4362 |
| T51958_PEA_1_T5 (SEQ ID NO: 1082) | 4305 | 4346 |
| T51958_PEA_1_T6 (SEQ ID NO: 1083) | 3294 | 3335 |
| T51958_PEA_1_T8 (SEQ ID NO: 1084) | 3008 | 3049 |
| T51958_PEA_1_T12 (SEQ ID NO: 1085) | 5151 | 5192 |
| T51958_PEA_1_T16 (SEQ ID NO: 1086) | 4918 | 4959 |
| T51958_PEA_1_T41 (SEQ ID NO: 1092) | 3174 | 3215 |

[3546] Segment cluster T51958_PEA_{—}1_node_{—}72 (SEQ ID NO:1134) according to the present invention can be found in the following transcript(s): T51958_PEA_{—}1_T4 (SEQ ID NO:1081), T51958_PEA_{—}1_T5 (SEQ ID NO:1082), T51958_PEA_{—}1_T6 (SEQ ID NO:1083), T51958_PEA_{—}1_T8 (SEQ ID NO:1084), T51958_PEA_{—}1_T12 (SEQ ID NO:1085), T51958_PEA_{—}1_T16 (SEQ ID NO:1086) and T51958_PEA_{—}1_T41 (SEQ ID NO:1092). Table 58 below describes the starting and ending position of this segment on each transcript.

TABLE 58
Segment location on transcripts

| | Segment | Segment |
|---|---|---|
| | starting | ending |
| Transcript name | position | position |
| T51958_PEA_1_T4 (SEQ ID NO: 1081) | 4363 | 4377 |
| T51958_PEA_1_T5 (SEQ ID NO: 1082) | 4347 | 4361 |
| T51958_PEA_1_T6 (SEQ ID NO: 1083) | 3336 | 3350 |
| T51958_PEA_1_T8 (SEQ ID NO: 1084) | 3050 | 3064 |
| T51958_PEA_1_T12 (SEQ ID NO: 1085) | 5193 | 5207 |
| T51958_PEA_1_T16 (SEQ ID NO: 1086) | 4960 | 4974 |
| T51958_PEA_1_T41 (SEQ ID NO: 1092) | 3216 | 3230 |

[3547] Segment cluster T51958_PEA_{—}1_node_{—}75 (SEQ ID NO:1135) according to the present invention can be found in the following transcript(s): T51958_PEA_{—}1_T4 (SEQ ID NO:1081), T51958_PEA_{—}1_T5 (SEQ ID NO:1082), T51958_PEA_{—}1_T6 (SEQ ID NO:1083), T51958_PEA_{—}1_T8 (SEQ ID NO:1084), T51958_PEA_{—}1_T12 (SEQ ID NO:1085), T51958_PEA_{—}1_T16 (SEQ ID NO:1086) and T51958_PEA_{—}1_T41 (SEQ ID NO:1092). Table 59 below describes the starting and ending position of this segment on each transcript.

TABLE 59
Segment location on transcripts

| | Segment | Segment |
|---|---|---|
| | starting | ending |
| Transcript name | position | position |
| T51958_PEA_1_T4 (SEQ ID NO: 1081) | 5078 | 5084 |
| T51958_PEA_1_T5 (SEQ ID NO: 1082) | 5062 | 5068 |
| T51958_PEA_1_T6 (SEQ ID NO: 1083) | 4051 | 4057 |
| T51958_PEA_1_T8 (SEQ ID NO: 1084) | 3765 | 3771 |
| T51958_PEA_1_T12 (SEQ ID NO: 1085) | 5908 | 5914 |
| T51958_PEA_1_T16 (SEQ ID NO: 1086) | 5675 | 5681 |
| T51958_PEA_1_T41 (SEQ ID NO: 1092) | 3931 | 3937 |

[3548] Segment cluster T51958_PEA_{—}1_node_{—}76 (SEQ ID NO:1136) according to the present invention can be found in the following transcript(s): T51958_PEA_{—}1_T4 (SEQ ID NO:1081), T51958_PEA_{—}1_T5 (SEQ ID NO:1082), T51958_PEA_{—}1_T6 (SEQ ID NO:1083), T51958_PEA_{—}1_T8 (SEQ ID NO:1084), T51958_PEA_{—}1_T12 (SEQ ID NO:1085), T51958_PEA_{—}1_T16 (SEQ ID NO:1086) and T51958_PEA_{—}1_T41 (SEQ ID NO:1092). Table 60 below describes the starting and ending position of this segment on each transcript.

TABLE 60
Segment location on transcripts

| | Segment | Segment |
|---|---|---|
| | starting | ending |
| Transcript name | position | position |
| T51958_PEA_1_T4 (SEQ ID NO: 1081) | 5085 | 5107 |
| T51958_PEA_1_T5 (SEQ ID NO: 1082) | 5069 | 5091 |
| T51958_PEA_1_T6 (SEQ ID NO: 1083) | 4058 | 4080 |
| T51958_PEA_1_T8 (SEQ ID NO: 1084) | 3772 | 3794 |
| T51958_PEA_1_T12 (SEQ ID NO: 1085) | 5915 | 5937 |
| T51958_PEA_1_T16 (SEQ ID NO: 1086) | 5682 | 5704 |
| T51958_PEA_1_T41 (SEQ ID NO: 1092) | 3938 | 3960 |

[3549] Segment cluster T51958_PEA_{—}1_node_{—}77 (SEQ ID NO:1137) according to the present invention can be found in the following transcript(s): T51958_PEA_{—}1_T4 (SEQ ID NO:1081), T51958_PEA_{—}1_T5 (SEQ ID NO:1082), T51958_PEA_{—}1_T6 (SEQ ID NO:1083), T51958_PEA_{—}1_T8 (SEQ ID NO:1084),

[3550] T51958_PEA_{—}1_T12 (SEQ ID NO:1085), T51958_PEA_{—}1_T16 (SEQ ID NO:1086) and T51958_PEA_{—}1_T41 (SEQ ID NO:1092). Table 61 below describes the starting and ending position of this segment on each transcript.

TABLE 61
Segment location on transcripts

| | Segment | Segment |
|---|---|---|
| | starting | ending |
| Transcript name | position | position |
| T51958_PEA_1_T4 (SEQ ID NO: 1081) | 5108 | 5123 |
| T51958_PEA_1_T5 (SEQ ID NO: 1082) | 5092 | 5107 |
| T51958_PEA_1_T6 (SEQ ID NO: 1083) | 4081 | 4096 |
| T51958_PEA_1_T8 (SEQ ID NO: 1084) | 3795 | 3810 |
| T51958_PEA_1_T12 (SEQ ID NO: 1085) | 5938 | 5953 |
| T51958_PEA_1_T16 (SEQ ID NO: 1086) | 5705 | 5720 |
| T51958_PEA_1_T41 (SEQ ID NO: 1092) | 3961 | 3976 |

[3551] Segment cluster T51958_PEA_{—}1_node_{—}80 (SEQ ID NO:1138) according to the present invention is supported by 1 libraries. The number of libraries was determined as previously described. This segment can be found in the following transcript(s): T51958_PEA_{—}1_T35 (SEQ ID NO:1088). Table 62 below describes the starting and ending position of this segment on each transcript.

TABLE 62
Segment location on transcripts

| | Segment | Segment |
|---|---|---|
| | starting | ending |
| Transcript name | position | position |
| T51958_PEA_1_T35 (SEQ ID NO: 1088) | 2734 | 2788 |

[3552] Segment cluster T51958_PEA_{—}1_node_{—}82 (SEQ ID NO:1139) according to the present invention is supported by 1 libraries. The number of libraries was determined as previously described. This segment can be found in the following transcript(s): T51958_PEA_{—}1_T35 (SEQ ID NO:1088). Table 63 below describes the starting and ending position of this segment on each transcript.

TABLE 63
Segment location on transcripts

| | Segment | Segment |
|---|---|---|
| Transcript name | starting position | ending position |
| T51958_PEA_1_T35 | 2789 | 2877 |
| (SEQ ID NO: 1088) | | |

[3553] Segment cluster T51958_PEA_{—}1_node_{—}84 (SEQ ID NO:1140) according to the present invention is supported by 1 libraries. The number of libraries was determined as previously described. This segment can be found in the following transcript(s): T51958_PEA_{—}1_T35 (SEQ ID NO:1088). Table 64 below describes the starting and ending position of this segment on each transcript.

TABLE 64
Segment location on transcripts

| | Segment | Segment |
|---|---|---|
| Transcript name | starting position | ending position |
| T51958_PEA_1_T35 | 2878 | 2946 |
| (SEQ ID NO: 1088) | | |

### Variant Protein Alignment to the Previously Known Protein:

[chemical structure]

[chemical structure]

[chemical structure]

[chemical structure]

[chemical structure]

[chemical structure]

[chemical structure]

[chemical structure]

[chemical structure]

[chemical structure]

[chemical structure]

[chemical structure]

[chemical structure]

[chemical structure]

[chemical structure]

[chemical structure]

[chemical structure]

[chemical structure]

[chemical structure]

[chemical structure]

[chemical structure]

[chemical structure]

[chemical structure]

[chemical structure]

[chemical structure]

[chemical structure]

[chemical structure]

[chemical structure]

[chemical structure]

[chemical structure]

[chemical structure]

[chemical structure]

[chemical structure]

[chemical structure]

[chemical structure]

[chemical structure]

[chemical structure]

[chemical structure]

[chemical structure]

[chemical structure]

[chemical structure]

[chemical structure]

[chemical structure]

[chemical structure]

[chemical structure]

[chemical structure]

[chemical structure]

[chemical structure]

[chemical structure]

[chemical structure]

[chemical structure]

[chemical structure]

[chemical structure]

[chemical structure]

[chemical structure]

[chemical structure]

[chemical structure]

[chemical structure]

[chemical structure]

[chemical structure]

[chemical structure]

[chemical structure]

[chemical structure]

[chemical structure]

[chemical structure]

[chemical structure]

[chemical structure]

[chemical structure]

[chemical structure]

[chemical structure]

[chemical structure]

[chemical structure]

[chemical structure]

[chemical structure]

[chemical structure]

[chemical structure]

[chemical structure]

[chemical structure]

[chemical structure]

[chemical structure]

[chemical structure]

[chemical structure]

[chemical structure]

[chemical structure]

[chemical structure]

[chemical structure]

[chemical structure]

[chemical structure]

[chemical structure]

[chemical structure]

[chemical structure]

[chemical structure]

[chemical structure]

### Expression of Homo sapiens PTK7 Protein Tyrosine Kinase 7 (PTK7) T51958 Transcripts which are Detectable by Amplicon as Depicted in Sequence Name T51958Seg38 (SEQ ID NO: 1369) in Normal and Cancerous Colon Tissues

[3555] Expression of Homo sapiens PTK7 protein tyrosine kinase 7 (PTK7) transcripts detectable by or according to seg38, T51958seg38 amplicon (SEQ ID NO: 1369) and T51958seg38F (SEQ ID NO: 1367) and T51958seg38R (SEQ ID NO: 1368) primers was measured by real time PCR. In parallel the expression of four housekeeping genes —PBGD (GenBank Accession No. BC019323 (SEQ ID NO:1576); amplicon—PBGD-amplicon, SEQ ID NO:531), HPRT1 (GenBank Accession No. NM_{—}000194 (SEQ ID NO:1577); amplicon—HPRT1-amplicon, SEQ ID NO:612), G6PD (GenBank Accession No. NM_{—}000402 (SEQ ID NO:1578); G6PD amplicon, SEQ ID NO:615), RPS27A (GenBank Accession No. NM_{—}002954 (SEQ ID NO:1579); RPS27A amplicon, SEQ ID NO:1261), was measured similarly. For each RT sample, the expression of the above amplicon was normalized to the geometric mean of the quantities of the housekeeping genes. The normalized quantity of each RT sample was then divided by the median of the quantities of the normal post-mortem (PM) samples (Sample Nos. 41, 52, 62-67, 69-71, Table 1, above, “Tissue samples in testing panel”), to obtain a value of fold up-regulation for each sample relative to median of the normal PM samples.

[3556] FIG. 64 is a histogram showing over expression of the above-indicated Homo sapiens PTK7 protein tyrosine kinase 7 (PTK7) transcripts in cancerous colon samples relative to the normal samples. (Values represent the average of duplicate experiments. Error bars indicate the minimal and maximal values obtained.) The number and percentage of samples that exhibit at least 3 fold over-expression, out of the total number of samples tested is indicated in the bottom.

[3557] As is evident from FIG. 64, the expression of Homo sapiens PTK7 protein tyrosine kinase 7 (PTK7) transcripts detectable by the above amplicon in cancer samples was significantly higher than in the non-cancerous samples (Sample Nos 41, 52, 62-67, 69-71, Table 1, “Tissue samples in testing panel”). Notably an over-expression of at least 3 fold was found in 23 out of 37 adenocarcinoma samples,

[3558] Statistical analysis was applied to verify the significance of these results, as described below.

[3559] The P value for the difference in the expression levels of Homo sapiens PTK7 protein tyrosine kinase 7 (PTK7) transcripts detectable by the above amplicon in colon cancer samples versus the normal tissue samples was determined by T test as 4.58E-04.

[3560] Threshold of 3 fold overexpression was found to differentiate between cancer and normal samples with P value of 1.97E-04 as checked by exact fisher test. The above values demonstrate statistical significance of the results.

[3561] Primer pairs are also optionally and preferably encompassed within the present invention; for example, for the above experiment, the following primer pair was used as a non-limiting illustrative example only of a suitable primer pair: T51958seg38F forward primer (SEQ ID NO: 1367); and T51958seg38R reverse primer (SEQ ID NO: 1368).

[3562] The present invention also preferably encompasses any amplicon obtained through the use of any suitable primer pair; for example, for the above experiment, the following amplicon was obtained as a non-limiting illustrative example only of a suitable amplicon: T51958seg38 (SEQ ID NO: 1369).

Forward primer (SEQ ID NO: 1367):
GCTTGCCCTTTCATGTGGA
Reverse primer (SEQ ID NO: 1368):
TCACGATGAGACCTGACACTCTG
Amplicon (SEQ ID NO: 1369):
GCTTGCCCTTTCATGTGGAGCACTGTGATTGGACCCAAGTTGGCAAGAGT
GGAAGACCAGGGGACAGAACAGAAATCCCCATGGTGGCCAGAGTGTCAGG
TCTCATCGTGA

### Expression of Homo sapiens PTK7 Protein Tyrosine Kinase 7 (PTK7) T51958 Transcripts which are Detectable by Amplicon as Depicted in Sequence Name T51958Seg7 (SEQ ID NO: 1372) in Normal and Cancerous Colon Tissues

[3563] Expression of Homo sapiens PTK7 protein tyrosine kinase 7 (PTK7) transcripts detectable by or according to seg7, T51958seg7 amplicon (SEQ ID NO: 1372) and T51958seg7F (SEQ ID NO: 1370) and T51958seg7R (SEQ ID NO: 1371) primers was measured by real time PCR. In parallel the expression of four housekeeping genes —PBGD (GenBank Accession No. BC019323 (SEQ ID NO:1576); amplicon—PBGD-amplicon, SEQ ID NO:531), HPRT1 (GenBank Accession No. NM_{—}000194 (SEQ ID NO:1577); amplicon—HPRT1-amplicon, SEQ ID NO:612), G6PD (GenBank Accession No. NM_{—}000402 (SEQ ID NO:1578); G6PD amplicon, SEQ ID NO:615), RPS27A (GenBank Accession No. NM_{—}002954 (SEQ ID NO:1579); RPS27A amplicon, SEQ ID NO:1261), was measured similarly. For each RT sample, the expression of the above amplicon was normalized to the geometric mean of the quantities of the housekeeping genes. The normalized quantity of each RT sample was then divided by the median of the quantities of the normal post-mortem (PM) samples (Sample Nos. 41, 52, 62-67, 69-71, Table 1, above, “Tissue samples in testing panel”), to obtain a value of fold up-regulation for each sample relative to median of the normal PM samples.

[3564] FIG. 65 is a histogram showing over expression of the above-indicated Homo sapiens PTK7 protein tyrosine kinase 7 (PTK7) transcripts in cancerous colon samples relative to the normal samples. (Values represent the average of duplicate experiments. Error bars indicate the minimal and maximal values obtained.) The number and percentage of samples that exhibit at least 3 fold over-expression, out of the total number of samples tested is indicated in the bottom.

[3565] As is evident from FIG. 65 the expression of Homo sapiens PTK7 protein tyrosine kinase 7 (PTK7) transcripts detectable by the above amplicon in cancer samples was significantly higher than in the non-cancerous samples (Sample Nos. 41, 52, 62-67, 69-71, Table 1, “Tissue samples in testing panel”). Notably an over-expression of at least 3 fold was found in 19 out of 37 adenocarcinoma samples,

[3566] Statistical analysis was applied to verify the significance of these results, as described below.

[3567] The P value for the difference in the expression levels of Homo sapiens PTK7 protein tyrosine kinase 7 (PTK7) transcripts detectable by the above amplicon in colon cancer samples versus the normal tissue samples was determined by T test as 1.74E-05.

[3568] Threshold of 3 fold overexpression was found to differentiate between cancer and normal samples with P value of 1.53E-03 as checked by exact fisher test. The above values demonstrate statistical significance of the results.

[3569] Primer pairs are also optionally and preferably encompassed within the present invention; for example, for the above experiment, the following primer pair was used as a non-limiting illustrative example only of a suitable primer pair: T51958seg7F forward primer (SEQ ID NO: 1370); and T51958seg7R reverse primer (SEQ ID NO: 1371).

[3570] The present invention also preferably encompasses any amplicon obtained through the use of any suitable primer pair; for example, for the above experiment, the following amplicon was obtained as a non-limiting illustrative example only of a suitable amplicon: T51958seg7 (SEQ ID NO: 1372).

Forward primer (SEQ ID NO: 1370):
GTGCCCAGTCCCCCTGTC
Reverse primer (SEQ ID NO: 1371):
CCTGGCCCGTTTAACTGGA
Amplicon (SEQ ID NO: 1372):
GTGCCCAGTCCCCCTGTCAGACCCTCAATGACTGAGGCCTGGGGGATCCC
TCCCTTACCTCAGCTTCTCCCATTTCCAGTTAAACGGGCCAGG

### Description for Cluster Z17877

[3571] Cluster Z17877 features 9 transcript(s) and 17 segment(s) of interest, the names for which are given in Tables 1 and 2, respectively, the sequences themselves are given at the end of the application. The selected protein variants are given in table 3.

TABLE 1
Transcripts of interest

| Transcript Name | SEQ ID NO: |
|---|---|
| Z17877_PEA_1_T0 | 1157 |
| Z17877_PEA_1_T2 | 1158 |
| Z17877_PEA_1_T3 | 1159 |
| Z17877_PEA_1_T4 | 1160 |
| Z17877_PEA_1_T6 | 1161 |
| Z17877_PEA_1_T7 | 1162 |
| Z17877_PEA_1_T8 | 1163 |
| Z17877_PEA_1_T11 | 1164 |
| Z17877_PEA_1_T12 | 1165 |

TABLE 2
Segments of interest

| Segment Name | SEQ ID NO: |
|---|---|
| Z17877_PEA_1_node_0 | 1166 |
| Z17877_PEA_1_node_3 | 1167 |
| Z17877_PEA_1_node_8 | 1168 |
| Z17877_PEA_1_node_9 | 1169 |
| Z17877_PEA_1_node_10 | 1170 |
| Z17877_PEA_1_node_11 | 1171 |
| Z17877_PEA_1_node_13 | 1172 |
| Z17877_PEA_1_node_15 | 1173 |
| Z17877_PEA_1_node_16 | 1174 |
| Z17877_PEA_1_node_18 | 1175 |
| Z17877_PEA_1_node_1 | 1176 |
| Z17877_PEA_1_node_2 | 1177 |
| Z17877_PEA_1_node_4 | 1178 |
| Z17877_PEA_1_node_5 | 1179 |
| Z17877_PEA_1_node_6 | 1180 |
| Z17877_PEA_1_node_14 | 1181 |
| Z17877_PEA_1_node_17 | 1182 |

TABLE 3
Proteins of interest

| | SEQ | |
|---|---|---|
| Protein Name | ID NO: | Corresponding Transcript(s) |
| Z17877_PEA_1_P1 | 1183 | Z17877_PEA_1_T0 (SEQ ID NO: |
| | | 1157); Z17877_PEA_1_T3 (SEQ ID |
| | | NO: 1159); Z17877_PEA_1_T7 |
| | | (SEQ ID NO: 1162) |
| Z17877_PEA_1_P2 | 1184 | Z17877_PEA_1_T6 (SEQ ID NO: |
| | | 1161); Z17877_PEA_1_T11 (SEQ ID |
| | | NO: 1164) |
| Z17877_PEA_1_P3 | 1185 | Z17877_PEA_1_T12 (SEQ ID NO: |
| | | 1165) |
| Z17877_PEA_1_P6 | 1186 | Z17877_PEA_1_T2 (SEQ ID NO: |
| | | 1158); Z17877_PEA_1_T4 (SEQ ID |
| | | NO: 1160); Z17877_PEA_1_T8 |
| | | (SEQ ID NO: 1163) |

[3572] Cluster Z17877 can be used as a diagnostic marker according to overexpression of transcripts of this cluster in cancer. Expression of such transcripts in normal tissues is also given according to the previously described methods. The term “number” in the left hand column of the table and the numbers on the y-axis of the figure below refer to weighted expression of ESTs in each category, as “parts per million” (ratio of the expression of ESTs for a particular cluster to the expression of all ESTs in that category, according to parts per million).

[3573] Overall, the following results were obtained as shown with regard to the histograms in FIG. 66 and Table 4. This cluster is overexpressed (at least at a minimum level) in the following pathological conditions: brain malignant tumors and malignant tumors involving the bone marrow.

TABLE 4
Normal tissue distribution

| Name of Tissue | Number |
|---|---|
| adrenal | 80 |
| bladder | 41 |
| bone | 64 |
| brain | 5 |
| colon | 63 |
| epithelial | 73 |
| general | 56 |
| head and neck | 0 |
| kidney | 31 |
| liver | 53 |
| lung | 44 |
| lymph nodes | 98 |
| breast | 149 |
| bone marrow | 0 |
| muscle | 40 |
| ovary | 80 |
| pancreas | 61 |
| prostate | 24 |
| skin | 107 |
| stomach | 36 |
| Thyroid | 0 |
| uterus | 186 |

TABLE 5
P values and ratios for expression in cancerous tissue

| Name of Tissue | P1 | P2 | SP1 | R3 | SP2 | R4 |
|---|---|---|---|---|---|---|
| adrenal | 5.2e−01 | 6.0e−01 | 6.2e−01 | 1.1 | 7.4e−01 | 0.9 |
| bladder | 5.4e−01 | 4.5e−01 | 2.8e−01 | 2.0 | 3.8e−01 | 1.7 |
| bone | 6.5e−02 | 3.1e−01 | 1.8e−01 | 2.3 | 5.6e−01 | 1.2 |
| brain | 2.5e−01 | 2.6e−01 | 1.5e−04 | 6.7 | 1.4e−05 | 6.9 |
| colon | 6.7e−02 | 1.0e−01 | 2.0e−01 | 1.9 | 4.0e−01 | 1.4 |
| epithelial | 3.4e−01 | 4.0e−01 | 4.1e−01 | 1.0 | 4.7e−01 | 0.9 |
| general | 3.2e−02 | 4.4e−02 | 2.8e−04 | 1.6 | 1.1e−03 | 1.4 |
| head and neck | 2.1e−01 | 3.3e−01 | 0.0e+00 | 0.0 | 0.0e+00 | 0.0 |
| kidney | 4.2e−01 | 5.2e−01 | 5.7e−02 | 2.6 | 1.5e−01 | 1.9 |
| liver | 8.2e−01 | 6.9e−01 | 1 | 0.5 | 5.1e−01 | 1.4 |
| lung | 3.4e−01 | 5.2e−01 | 2.9e−01 | 1.6 | 3.3e−01 | 1.2 |
| lymph nodes | 1.6e−01 | 2.9e−01 | 6.4e−01 | 1.1 | 7.0e−01 | 0.8 |
| breast | 7.2e−01 | 7.9e−01 | 8.6e−01 | 0.7 | 9.6e−01 | 0.5 |
| bone marrow | 4.3e−01 | 7.1e−02 | 1.5e−01 | 9.0 | 6.5e−03 | 7.5 |
| muscle | 6.0e−01 | 6.7e−01 | 2.6e−02 | 3.9 | 3.0e−01 | 1.3 |
| ovary | 5.8e−01 | 6.4e−01 | 6.1e−01 | 0.9 | 7.9e−01 | 0.7 |
| pancreas | 7.3e−01 | 7.3e−01 | 9.2e−01 | 0.5 | 8.7e−01 | 0.7 |
| prostate | 7.3e−01 | 7.6e−01 | 4.7e−01 | 1.4 | 1.0e−01 | 1.4 |
| skin | 5.7e−01 | 7.1e−01 | 1 | 0.1 | 9.7e−01 | 0.2 |
| stomach | 5.8e−01 | 5.9e−02 | 1 | 0.5 | 3.2e−01 | 1.8 |
| Thyroid | 2.9e−01 | 2.9e−01 | 4.4e−01 | 2.0 | 4.4e−01 | 2.0 |
| uterus | 6.9e−01 | 7.7e−01 | 1 | 0.3 | 9.7e−01 | 0.4 |

[3574] As noted above, cluster Z17877 features 9 transcript(s), which were listed in Table 1 above. A description of each variant protein according to the present invention is now provided.

[3575] Variant protein Z17877_PEA_{—}1_P1 (SEQ ID NO:1183) according to the present invention has an amino acid sequence as given at the end of the application; it is encoded by transcript(s) Z17877_PEA_{—}1_T0 (SEQ ID NO:1157). The location of the variant protein was determined according to results from a number of different software programs and analyses, including analyses from SignalP and other specialized programs. The variant protein is believed to be located as follows with regard to the cell: intracellularly. The protein localization is believed to be intracellularly because of manual inspection of known protein localization and/or gene structure.

[3576] Variant protein Z17877_PEA_{—}1_P1 (SEQ ID NO:1183) is encoded by the following transcript(s): Z17877_PEA_{—}1_T0 (SEQ ID NO:1157), for which the sequence(s) is/are given at the end of the application. The coding portion of transcript Z17877_PEA_{—}1_T0 (SEQ ID NO:1157) is shown in bold; this coding portion starts at position 1206 and ends at position 2522. The transcript also has the following SNPs as listed in Table 6 (given according to their position on the nucleotide sequence, with the alternative nucleic acid listed; the last column indicates whether the SNP is known or not; the presence of known SNPs in variant protein Z17877_PEA_{—}1_P1 (SEQ ID NO:1183) sequence provides support for the deduced sequence of this variant protein according to the present invention).

TABLE 6
Nucleic acid SNPs

| SNP position on | Alternative | Previously |
|---|---|---|
| nucleotide sequence | nucleic acid | known SNP? |
| 84 | C -> T | Yes |
| 209 | C -> G | Yes |
| 274 | G -> T | Yes |
| 457 | G -> C | Yes |
| 503 | A -> C | Yes |
| 628 | C -> T | Yes |
| 706 | G -> A | Yes |
| 771 | T -> C | Yes |
| 819 | C -> T | Yes |
| 930 | C -> | No |
| 1022 | T -> | No |
| 1065 | C -> T | Yes |
| 1237 | A -> G | Yes |
| 1376 | C -> G | No |
| 1379 | C -> G | No |
| 1440 | C -> G | No |
| 1653 | G -> A | No |
| 1683 | G -> T | Yes |
| 1713 | G -> A | Yes |
| 1898 | G -> A | Yes |
| 2123 | G -> A | No |
| 2170 | C -> T | Yes |
| 2297 | C -> | No |
| 2297 | C -> T | No |
| 2391 | -> T | No |
| 2431 | -> G | No |
| 2501 | A -> C | No |
| 2522 | G -> C | Yes |
| 2575 | A -> G | Yes |
| 2634 | T -> C | Yes |
| 2654 | A -> G | Yes |
| 2750 | T -> G | No |
| 2906 | T -> A | No |
| 2921 | T -> G | No |
| 2948 | T -> G | No |

[3577] Variant protein Z17877_PEA_{—}1_P2 (SEQ ID NO:1184) according to the present invention has an amino acid sequence as given at the end of the application; it is encoded by transcript(s) Z17877_PEA_{—}1_T6 (SEQ ID NO:1161) and Z17877_PEA_{—}1_T11 (SEQ ID NO:1164). The location of the variant protein was determined according to results from a number of different software programs and analyses, including analyses from SignalP and other specialized programs. The variant protein is believed to be located as follows with regard to the cell: intracellularly. The protein localization is believed to be intracellularly because of manual inspection of known protein localization and/or gene structure.

[3578] Variant protein Z17877_PEA_{—}1_P2 (SEQ ID NO:1184) also has the following non-silent SNPs (Single Nucleotide Polymorphisms) as listed in Table 7, (given according to their position(s) on the amino acid sequence, with the alternative amino acid(s) listed; the last column indicates whether the SNP is known or not; the presence of known SNPs in variant protein Z17877_PEA_{—}1_P2 (SEQ ID NO:1184) sequence provides support for the deduced sequence of this variant protein according to the present invention).

TABLE 7
Amino acid mutations

| SNP position(s) on | Alternative | Previously |
|---|---|---|
| amino acid sequence | amino acid(s) | known SNP? |
| 11 | N -> S | Yes |
| 79 | P -> A | No |
| 150 | A -> T | No |
| 160 | G -> C | Yes |
| 170 | V -> I | Yes |
| 273 | I -> T | Yes |
| 352 | P -> L | Yes |

[3579] Variant protein Z17877_PEA_{—}1_P2 (SEQ ID NO:1184) is encoded by the following transcript(s): Z17877_PEA_{—}1_T6 (SEQ ID NO:1161) and Z17877_PEA_{—}1_T11 (SEQ ID NO:1164), for which the sequence(s) is/are given at the end of the application.

[3580] The coding portion of transcript Z17877_PEA_{—}1_T6 (SEQ ID NO:1161) is shown in bold; this coding portion starts at position 1206 and ends at position 2270. The transcript also has the following SNPs as listed in Table 8 (given according to their position on the nucleotide sequence, with the alternative nucleic acid listed; the last column indicates whether the SNP is known or not; the presence of known SNPs in variant protein Z17877_PEA_{—}1_P2 (SEQ ID NO:1184) sequence provides support for the deduced sequence of this variant protein according to the present invention).

TABLE 8
Nucleic acid SNPs

| SNP position on | Alternative | Previously |
|---|---|---|
| nucleotide sequence | nucleic acid | known SNP? |
| 84 | C -> T | Yes |
| 209 | C -> G | Yes |
| 274 | G -> T | Yes |
| 457 | G -> C | Yes |
| 503 | A -> C | Yes |
| 628 | C -> T | Yes |
| 706 | G -> A | Yes |
| 771 | T -> C | Yes |
| 819 | C -> T | Yes |
| 930 | C -> | No |
| 1022 | T -> | No |
| 1065 | C -> T | Yes |
| 1237 | A -> G | Yes |
| 1376 | C -> G | No |
| 1379 | C -> G | No |
| 1440 | C -> G | No |
| 1653 | G -> A | No |
| 1683 | G -> T | Yes |
| 1713 | G -> A | Yes |
| 1898 | G -> A | Yes |
| 2023 | T -> C | Yes |
| 2260 | C -> T | Yes |
| 2453 | G -> C | Yes |
| 2482 | G -> A | Yes |
| 2553 | T -> | Yes |
| 2603 | T -> | Yes |
| 2612 | T -> | Yes |
| 2875 | G -> A | Yes |
| 2938 | G -> A | Yes |
| 3295 | A -> G | Yes |
| 3499 | G -> A | No |
| 3546 | C -> T | Yes |
| 3673 | C -> | No |
| 3673 | C -> T | No |
| 3767 | -> T | No |
| 3807 | -> G | No |
| 3877 | A -> C | No |
| 3898 | G -> C | Yes |
| 3951 | A -> G | Yes |
| 4010 | T -> C | Yes |
| 4030 | A -> G | Yes |
| 4126 | T -> G | No |
| 4282 | T -> A | No |
| 4297 | T -> G | No |
| 4324 | T -> G | No |

[3581] The coding portion of transcript Z17877_PEA_{—}1_T11 (SEQ ID NO:1164) is shown in bold; this coding portion starts at position 602 and ends at position 1666. The transcript also has the following SNPs as listed in Table 9 (given according to their position on the nucleotide sequence, with the alternative nucleic acid listed; the last column indicates whether the SNP is known or not; the presence of known SNPs in variant protein Z17877_PEA_{—}1_P2 (SEQ ID NO:1184) sequence provides support for the deduced sequence of this variant protein according to the present invention).

TABLE 9
Nucleic acid SNPs

| SNP position on | Alternative | Previously |
|---|---|---|
| nucleotide sequence | nucleic acid | known SNP? |
| 84 | C -> T | Yes |
| 209 | C -> G | Yes |
| 274 | G -> T | Yes |
| 418 | T -> | No |
| 461 | C -> T | Yes |
| 633 | A -> G | Yes |
| 772 | C -> G | No |
| 775 | C -> G | No |
| 836 | C -> G | No |
| 1049 | G -> A | No |
| 1079 | G -> T | Yes |
| 1109 | G -> A | Yes |
| 1294 | G -> A | Yes |
| 1419 | T -> C | Yes |
| 1656 | C -> T | Yes |
| 1849 | G -> C | Yes |
| 1878 | G -> A | Yes |
| 1949 | T -> | Yes |
| 1999 | T -> | Yes |
| 2008 | T -> | Yes |
| 2271 | G -> A | Yes |
| 2334 | G -> A | Yes |
| 2691 | A -> G | Yes |
| 2868 | G -> A | No |
| 2915 | C -> T | Yes |
| 3042 | C -> | No |
| 3042 | C -> T | No |
| 3136 | -> T | No |
| 3176 | -> G | No |
| 3246 | A -> C | No |
| 3267 | G -> C | Yes |
| 3320 | A -> G | Yes |
| 3379 | T -> C | Yes |
| 3399 | A -> G | Yes |
| 3495 | T -> G | No |
| 3651 | T -> A | No |
| 3666 | T -> G | No |
| 3693 | T -> G | No |

[3582] Variant protein Z17877_PEA_{—}1_P3 (SEQ ID NO:1185) according to the present invention has an amino acid sequence as given at the end of the application; it is encoded by transcript(s) Z17877_PEA_{—}1_T12 (SEQ ID NO:1165). The location of the variant protein was determined according to results from a number of different software programs and analyses, including analyses from SignalP and other specialized programs. The variant protein is believed to be located as follows with regard to the cell: intracellularly. The protein localization is believed to be intracellularly because of manual inspection of known protein localization and/or gene structure.

[3583] Variant protein Z17877_PEA_{—}1_P3 (SEQ ID NO:1185) also has the following non-silent SNPs (Single Nucleotide Polymorphisms) as listed in Table 10, (given according to their position(s) on the amino acid sequence, with the alternative amino acid(s) listed; the last column indicates whether the SNP is known or not; the presence of known SNPs in variant protein Z17877_PEA_{—}1_P3 (SEQ ID NO:1185) sequence provides support for the deduced sequence of this variant protein according to the present invention).

TABLE 10
Amino acid mutations

| SNP position(s) on | Alternative | Previously |
|---|---|---|
| amino acid sequence | amino acid(s) | known SNP? |
| 11 | N -> S | Yes |
| 79 | P -> A | No |
| 150 | A -> T | No |
| 160 | G -> C | Yes |
| 170 | V -> I | Yes |
| 331 | A -> V | Yes |
| 373 | R -> | No |
| 441 | E -> D | No |

[3584] Variant protein Z17877_PEA_{—}1_P3 (SEQ ID NO:1185) is encoded by the following transcript(s): Z17877_PEA_{—}1_T12 (SEQ ID NO:1165), for which the sequence(s) is/are given at the end of the application. The coding portion of transcript Z17877_PEA_{—}1_T12 (SEQ ID NO:1165) is shown in bold; this coding portion starts at position 602 and ends at position 1945. The transcript also has the following SNPs as listed in Table 11 (given according to their position on the nucleotide sequence, with the alternative nucleic acid listed; the last column indicates whether the SNP is known or not; the presence of known SNPs in variant protein Z17877_PEA_{—}1_P3 (SEQ ID NO:1185) sequence provides support for the deduced sequence of this variant protein according to the present invention).

TABLE 11
Nucleic acid SNPs

| SNP position on | Alternative | Previously |
|---|---|---|
| nucleotide sequence | nucleic acid | known SNP? |
| 84 | C -> T | Yes |
| 209 | C -> G | Yes |
| 274 | G -> T | Yes |
| 418 | T -> | No |
| 461 | C -> T | Yes |
| 633 | A -> G | Yes |
| 772 | C -> G | No |
| 775 | C -> G | No |
| 836 | C -> G | No |
| 1049 | G -> A | No |
| 1079 | G -> T | Yes |
| 1109 | G -> A | Yes |
| 1294 | G -> A | Yes |
| 1546 | G -> A | No |
| 1593 | C -> T | Yes |
| 1720 | C -> | No |
| 1720 | C -> T | No |
| 1814 | -> T | No |
| 1854 | -> G | No |
| 1924 | A -> C | No |
| 1945 | G -> C | Yes |
| 1998 | A -> G | Yes |
| 2057 | T -> C | Yes |
| 2077 | A -> G | Yes |
| 2173 | T -> G | No |
| 2329 | T -> A | No |
| 2344 | T -> G | No |
| 2371 | T -> G | No |

[3585] Variant protein Z17877_PEA_{—}1_P6 (SEQ ID NO:1186) according to the present invention has an amino acid sequence as given at the end of the application; it is encoded by transcript(s) Z17877_PEA_{—}1_T2 (SEQ ID NO:1158), Z17877_PEA_{—}1_T4 (SEQ ID NO:1160) and Z17877_PEA_{—}1_T8 (SEQ ID NO:1163). The location of the variant protein was determined according to results from a number of different software programs and analyses, including analyses from SignalP and other specialized programs. The variant protein is believed to be located as follows with regard to the cell: unknown.

[3586] Variant protein Z17877_PEA_{—}1_P6 (SEQ ID NO:1186) also has the following non-silent SNPs (Single Nucleotide Polymorphisms) as listed in Table 12, (given according to their position(s) on the amino acid sequence, with the alternative amino acid(s) listed; the last column indicates whether the SNP is known or not; the presence of known SNPs in variant protein Z17877_PEA_{—}1_P6 (SEQ ID NO:1186) sequence provides support for the deduced sequence of this variant protein according to the present invention).

TABLE 12
Amino acid mutations

| SNP position(s) on | Alternative | Previously |
|---|---|---|
| amino acid sequence | amino acid(s) | known SNP? |
| 57 | A -> G | Yes |
| 79 | G -> C | Yes |

[3587] Variant protein Z17877_PEA_{—}1_P6 (SEQ ID NO:1186) is encoded by the following transcript(s): Z17877_PEA_{—}1_T2 (SEQ ID NO:1158), Z17877_PEA_{—}1_T4 (SEQ ID NO:1160) and Z17877_PEA_{—}1_T8 (SEQ ID NO:1163), for which the sequence(s) is/are given at the end of the application.

[3588] The coding portion of transcript Z17877_PEA_{—}1_T2 (SEQ ID NO:1158) is shown in bold; this coding portion starts at position 40 and ends at position 381. The transcript also has the following SNPs as listed in Table 13 (given according to their position on the nucleotide sequence, with the alternative nucleic acid listed; the last column indicates whether the SNP is known or not; the presence of known SNPs in variant protein Z17877_PEA_{—}1_P6 (SEQ ID NO:1186) sequence provides support for the deduced sequence of this variant protein according to the present invention).

TABLE 13
Nucleic acid SNPs

| SNP position on | Alternative | Previously |
|---|---|---|
| nucleotide sequence | nucleic acid | known SNP? |
| 84 | C -> T | Yes |
| 209 | C -> G | Yes |
| 274 | G -> T | Yes |
| 457 | G -> C | Yes |
| 503 | A -> C | Yes |
| 628 | C -> T | Yes |
| 706 | G -> A | Yes |
| 771 | T -> C | Yes |
| 819 | C -> T | Yes |
| 930 | C -> | No |
| 1022 | T -> | No |
| 1065 | C -> T | Yes |
| 1344 | G -> T | Yes |
| 1361 | C -> G | Yes |
| 1413 | G -> A | Yes |
| 1418 | G -> A | Yes |
| 1790 | C -> T | Yes |
| 2059 | G -> A | Yes |
| 2244 | G -> A | Yes |
| 2451 | T -> G | No |
| 2460 | T -> A | Yes |
| 2500 | G -> | No |
| 2533 | C -> T | Yes |
| 2581 | C -> T | Yes |
| 2734 | C -> G | Yes |
| 2861 | A -> G | Yes |
| 3000 | C -> G | No |
| 3003 | C -> G | No |
| 3064 | C -> G | No |
| 3277 | G -> A | No |
| 3307 | G -> T | Yes |
| 3337 | G -> A | Yes |
| 3522 | G -> A | Yes |
| 3747 | G -> A | No |
| 3794 | C -> T | Yes |
| 3921 | C -> | No |
| 3921 | C -> T | No |
| 4015 | -> T | No |
| 4055 | -> G | No |
| 4125 | A -> C | No |
| 4146 | G -> C | Yes |
| 4199 | A -> G | Yes |
| 4258 | T -> C | Yes |
| 4278 | A -> G | Yes |
| 4374 | T -> G | No |
| 4530 | T -> A | No |
| 4545 | T -> G | No |
| 4572 | T -> G | No |

[3589] The coding portion of transcript Z17877_PEA_{—}1_T4 (SEQ ID NO:1160) is shown in bold; this coding portion starts at position 40 and ends at position 381. The transcript also has the following SNPs as listed in Table 14 (given according to their position on the nucleotide sequence, with the alternative nucleic acid listed; the last column indicates whether the SNP is known or not; the presence of known SNPs in variant protein Z17877_PEA_{—}1_P6 (SEQ ID NO:1186) sequence provides support for the deduced sequence of this variant protein according to the present invention).

TABLE 14
Nucleic acid SNPs

| SNP position on | Alternative | Previously |
|---|---|---|
| nucleotide sequence | nucleic acid | known SNP? |
| 84 | C -> T | Yes |
| 209 | C -> G | Yes |
| 274 | G -> T | Yes |
| 457 | G -> C | Yes |
| 503 | A -> C | Yes |
| 628 | C -> T | Yes |
| 706 | G -> A | Yes |
| 844 | C -> | No |
| 936 | T -> | No |
| 979 | C -> T | Yes |
| 1258 | G -> T | Yes |
| 1275 | C -> G | Yes |
| 1327 | G -> A | Yes |
| 1332 | G -> A | Yes |
| 1704 | C -> T | Yes |
| 1973 | G -> A | Yes |
| 2158 | G -> A | Yes |
| 2365 | T -> G | No |
| 2374 | T -> A | Yes |
| 2414 | G -> | No |
| 2447 | C -> T | Yes |
| 2495 | C -> T | Yes |
| 2648 | C -> G | Yes |
| 2775 | A -> G | Yes |
| 2914 | C -> G | No |
| 2917 | C -> G | No |
| 2978 | C -> G | No |
| 3191 | G -> A | No |
| 3221 | G -> T | Yes |
| 3251 | G -> A | Yes |
| 3436 | G -> A | Yes |
| 3661 | G -> A | No |
| 3708 | C -> T | Yes |
| 3835 | C -> | No |
| 3835 | C -> T | No |
| 3929 | -> T | No |
| 3969 | -> G | No |
| 4039 | A -> C | No |
| 4060 | G -> C | Yes |
| 4113 | A -> G | Yes |
| 4172 | T -> C | Yes |
| 4192 | A -> G | Yes |
| 4288 | T -> G | No |
| 4444 | T -> A | No |
| 4459 | T -> G | No |
| 4486 | T -> G | No |

[3590] The coding portion of transcript Z17877_PEA_{—}1_T8 (SEQ ID NO:1163) is shown in bold; this coding portion starts at position 40 and ends at position 381. The transcript also has the following SNPs as listed in Table 15 (given according to their position on the nucleotide sequence, with the alternative nucleic acid listed; the last column indicates whether the SNP is known or not; the presence of known SNPs in variant protein Z17877_PEA_{—}1_P6 (SEQ ID NO:1186) sequence provides support for the deduced sequence of this variant protein according to the present invention).

TABLE 15
Nucleic acid SNPs

| SNP position on | Alternative | Previously |
|---|---|---|
| nucleotide sequence | nucleic acid | known SNP? |
| 84 | C -> T | Yes |
| 209 | C -> G | Yes |
| 274 | G -> T | Yes |
| 457 | G -> C | Yes |
| 503 | A -> C | Yes |
| 628 | C -> T | Yes |
| 706 | G -> A | Yes |
| 771 | T -> C | Yes |
| 819 | C -> T | Yes |
| 930 | C -> | No |
| 1022 | T -> | No |
| 1065 | C -> T | Yes |
| 1237 | A -> G | Yes |
| 1376 | C -> G | No |
| 1379 | C -> G | No |
| 1440 | C -> G | No |
| 1653 | G -> A | No |
| 1683 | G -> T | Yes |
| 1713 | G -> A | Yes |
| 1898 | G -> A | Yes |
| 2150 | G -> A | No |
| 2197 | C -> T | Yes |
| 2324 | C -> | No |
| 2324 | C -> T | No |
| 2418 | -> T | No |
| 2458 | -> G | No |
| 2528 | A -> C | No |
| 2549 | G -> C | Yes |
| 2602 | A -> G | Yes |
| 2661 | T -> C | Yes |
| 2681 | A -> G | Yes |
| 2777 | T -> G | No |
| 2933 | T -> A | No |
| 2948 | T -> G | No |
| 2975 | T -> G | No |

[3591] As noted above, cluster Z17877 features 17 segment(s), which were listed in Table 2 above and for which the sequence(s) are given at the end of the application. These segment(s) are portions of nucleic acid sequence(s) which are described herein separately because they are of particular interest. A description of each segment according to the present invention is now provided.

[3592] Segment cluster Z17877_PEA_{—}1_node_{—}0 (SEQ ID NO:1166) according to the present invention is supported by 4 libraries. The number of libraries was determined as previously described. This segment can be found in the following transcript(s): Z17877_PEA_{—}1_T0 (SEQ ID NO:1157), Z17877_PEA_{—}1_T2 (SEQ ID NO:1158), Z17877_PEA_{—}1_T3 (SEQ ID NO:1159), Z17877_PEA_{—}1_T4 (SEQ ID NO:1160), Z17877_PEA_{—}1_T6 (SEQ ID NO:1161), Z17877_PEA_{—}1_T7 (SEQ ID NO:1162), Z17877_PEA_{—}1_T8 (SEQ ID NO:1163), Z17877_PEA_{—}1_T11 (SEQ ID NO:1164) and Z17877_PEA_{—}1_T12 (SEQ ID NO:1165). Table 16 below describes the starting and ending position of this segment on each transcript.

TABLE 16
Segment location on transcripts

| | Segment | Segment |
|---|---|---|
| | starting | ending |
| Transcript name | position | position |
| Z17877_PEA_1_T0 (SEQ ID NO: 1157) | 1 | 330 |
| Z17877_PEA_1_T2 (SEQ ID NO: 1158) | 1 | 330 |
| Z17877_PEA_1_T3 (SEQ ID NO: 1159) | 1 | 330 |
| Z17877_PEA_1_T4 (SEQ ID NO: 1160) | 1 | 330 |
| Z17877_PEA_1_T6 (SEQ ID NO: 1161) | 1 | 330 |
| Z17877_PEA_1_T7 (SEQ ID NO: 1162) | 1 | 330 |
| Z17877_PEA_1_T8 (SEQ ID NO: 1163) | 1 | 330 |
| Z17877_PEA_1_T11 (SEQ ID NO: 1164) | 1 | 330 |
| Z17877_PEA_1_T12 (SEQ ID NO: 1165) | 1 | 330 |

[3593] Segment cluster Z17877_PEA_{—}1_node_{—}3 (SEQ ID NO:1167) according to the present invention is supported by 23 libraries. The number of libraries was determined as previously described. This segment can be found in the following transcript(s): Z17877_PEA_{—}1_T0 (SEQ ID NO:1157), Z17877_PEA_{—}1_T2 (SEQ ID NO:1158), Z17877_PEA_{—}1_T3 (SEQ ID NO:1159), Z17877_PEA_{—}1_T4 (SEQ ID NO:1160), Z17877_PEA_{—}1_T6 (SEQ ID NO:1161) and Z17877_PEA_{—}1_T8 (SEQ ID NO:1163). Table 17 below describes the starting and ending position of this segment on each transcript.

TABLE 17
Segment location on transcripts

| | Segment | Segment |
|---|---|---|
| | starting | ending |
| Transcript name | position | position |
| Z17877_PEA_1_T0 (SEQ ID NO: 1157) | 404 | 755 |
| Z17877_PEA_1_T2 (SEQ ID NO: 1158) | 404 | 755 |
| Z17877_PEA_1_T3 (SEQ ID NO: 1159) | 404 | 755 |
| Z17877_PEA_1_T4 (SEQ ID NO: 1160) | 404 | 755 |
| Z17877_PEA_1_T6 (SEQ ID NO: 1161) | 404 | 755 |
| Z17877_PEA_1_T8 (SEQ ID NO: 1163) | 404 | 755 |

[3594] Segment cluster Z17877_PEA_{—}1_node_{—}8 (SEQ ID NO:1168) according to the present invention is supported by 100 libraries. The number of libraries was determined as previously described. This segment can be found in the following transcript(s): Z17877_PEA_{—}1_T0 (SEQ ID NO:1157), Z17877_PEA_{—}1_T2 (SEQ ID NO:1158), Z17877_PEA_{—}1_T3 (SEQ ID NO:1159), Z17877_PEA_{—}1_T4 (SEQ ID NO:1160), Z17877_PEA_{—}1_T6 (SEQ ID NO:1161) and Z17877_PEA_{—}1_T8 (SEQ ID NO:1163). Table 18 below describes the starting and ending position of this segment on each transcript.

TABLE 18
Segment location on transcripts

| | Segment | Segment |
|---|---|---|
| | starting | ending |
| Transcript name | position | position |
| Z17877_PEA_1_T0 (SEQ ID NO: 1157) | 862 | 1007 |
| Z17877_PEA_1_T2 (SEQ ID NO: 1158) | 862 | 1007 |
| Z17877_PEA_1_T3 (SEQ ID NO: 1159) | 862 | 1007 |
| Z17877_PEA_1_T4 (SEQ ID NO: 1160) | 776 | 921 |
| Z17877_PEA_1_T6 (SEQ ID NO: 1161) | 862 | 1007 |
| Z17877_PEA_1_T8 (SEQ ID NO: 1163) | 862 | 1007 |

[3595] Segment cluster Z17877_PEA_{—}1_node_{—}9 (SEQ ID NO:1169) according to the present invention is supported by 110 libraries. The number of libraries was determined as previously described. This segment can be found in the following transcript(s): Z17877_PEA_{—}1_T0 (SEQ ID NO:1157), Z17877_PEA_{—}1_T2 (SEQ ID NO:1158), Z17877_PEA_{—}1_T3 (SEQ ID NO:1159), Z17877_PEA_{—}1_T4 (SEQ ID NO:1160), Z17877_PEA_{—}1_T6 (SEQ ID NO:1161), Z17877_PEA_{—}1_T7 (SEQ ID NO:1162), Z17877_PEA_{—}1_T8 (SEQ ID NO:1163), Z17877_PEA_{—}1_T11 (SEQ ID NO:1164) and Z17877_PEA_{—}1_T12 (SEQ ID NO:1165). Table 19 below describes the starting and ending position of this segment on each transcript.

TABLE 19
Segment location on transcripts

| | Segment | Segment |
|---|---|---|
| | starting | ending |
| Transcript name | position | position |
| Z17877_PEA_1_T0 (SEQ ID NO: 1157) | 1008 | 1190 |
| Z17877_PEA_1_T2 (SEQ ID NO: 1158) | 1008 | 1190 |
| Z17877_PEA_1_T3 (SEQ ID NO: 1159) | 1008 | 1190 |
| Z17877_PEA_1_T4 (SEQ ID NO: 1160) | 922 | 1104 |
| Z17877_PEA_1_T6 (SEQ ID NO: 1161) | 1008 | 1190 |
| Z17877_PEA_1_T7 (SEQ ID NO: 1162) | 404 | 586 |
| Z17877_PEA_1_T8 (SEQ ID NO: 1163) | 1008 | 1190 |
| Z17877_PEA_1_T11 (SEQ ID NO: 1164) | 404 | 586 |
| Z17877_PEA_1_T12 (SEQ ID NO: 1165) | 404 | 586 |

[3596] Segment cluster Z17877_PEA_{—}1_node_{—}10 (SEQ ID NO:1170) according to the present invention is supported by 8 libraries. The number of libraries was determined as previously described. This segment can be found in the following transcript(s): Z17877_PEA_{—}1_T2 (SEQ ID NO:1158) and Z17877_PEA_{—}1_T4 (SEQ ID NO:1160). Table 20 below describes the starting and ending position of this segment on each transcript.

TABLE 20
Segment location on transcripts

| | Segment | Segment |
|---|---|---|
| | starting | ending |
| Transcript name | position | position |
| Z17877_PEA_1_T2 (SEQ ID NO: 1158) | 1191 | 1520 |
| Z17877_PEA_1_T4 (SEQ ID NO: 1160) | 1105 | 1434 |

[3597] Segment cluster Z17877_PEA_{—}1_node_{—}11 (SEQ ID NO:1171) according to the present invention is supported by 23 libraries. The number of libraries was determined as previously described. This segment can be found in the following transcript(s): Z17877_PEA_{—}1_T2 (SEQ ID NO:1158) and Z17877_PEA_{—}1_T4 (SEQ ID NO:1160). Table 21 below describes the starting and ending position of this segment on each transcript.

TABLE 21
Segment location on transcripts

| | Segment | Segment |
|---|---|---|
| | starting | ending |
| Transcript name | position | position |
| Z17877_PEA_1_T2 (SEQ ID NO: 1158) | 1521 | 2814 |
| Z17877_PEA_1_T4 (SEQ ID NO: 1160) | 1435 | 2728 |

[3598] Segment cluster Z17877_PEA_{—}1_node_{—}13 (SEQ ID NO:1172) according to the present invention is supported by 108 libraries. The number of libraries was determined as previously described. This segment can be found in the following transcript(s): Z17877_PEA_{—}1_T0 (SEQ ID NO:1157), Z17877_PEA_{—}1_T2 (SEQ ID NO:1158), Z17877_PEA_{—}1_T3 (SEQ ID NO:1159), Z17877_PEA_{—}1_T4 (SEQ ID NO:1160), Z17877_PEA_{—}1_T6 (SEQ ID NO:1161), Z17877_PEA_{—}1_T7 (SEQ ID NO:1162), Z17877_PEA_{—}1_T8 (SEQ ID NO:1163), Z17877_PEA_{—}1_T11 (SEQ ID NO:1164) and Z17877_PEA_{—}1_T12 (SEQ ID NO:1165). Table 22 below describes the starting and ending position of this segment on each transcript.

TABLE 22
Segment location on transcripts

| | Segment | Segment |
|---|---|---|
| | starting | ending |
| Transcript name | position | position |
| Z17877_PEA_1_T0 (SEQ ID NO: 1157) | 1191 | 1402 |
| Z17877_PEA_1_T2 (SEQ ID NO: 1158) | 2815 | 3026 |
| Z17877_PEA_1_T3 (SEQ ID NO: 1159) | 1191 | 1402 |
| Z17877_PEA_1_T4 (SEQ ID NO: 1160) | 2729 | 2940 |
| Z17877_PEA_1_T6 (SEQ ID NO: 1161) | 1191 | 1402 |
| Z17877_PEA_1_T7 (SEQ ID NO: 1162) | 587 | 798 |
| Z17877_PEA_1_T8 (SEQ ID NO: 1163) | 1191 | 1402 |
| Z17877_PEA_1_T11 (SEQ ID NO: 1164) | 587 | 798 |
| Z17877_PEA_1_T12 (SEQ ID NO: 1165) | 587 | 798 |

[3599] Segment cluster Z17877_PEA_{—}1_node_{—}15 (SEQ ID NO:1173) according to the present invention is supported by 139 libraries. The number of libraries was determined as previously described. This segment can be found in the following transcript(s): Z17877_PEA_{—}1_T0 (SEQ ID NO:1157), Z17877_PEA_{—}1_T2 (SEQ ID NO:1158), Z17877_PEA_{—}1_T3 (SEQ ID NO:1159), Z17877_PEA_{—}1_T4 (SEQ ID NO:1160), Z17877_PEA_{—}1_T6 (SEQ ID NO:1161), Z17877_PEA_{—}1_T7 (SEQ ID NO:1162), Z17877_PEA_{—}1_T8 (SEQ ID NO:1163), Z17877_PEA_{—}1_T11 (SEQ ID NO:1164) and Z17877_PEA_{—}1_T12 (SEQ ID NO:1165). Table 23 below describes the starting and ending position of this segment on each transcript.

TABLE 23
Segment location on transcripts

| | Segment | Segment |
|---|---|---|
| | starting | ending |
| Transcript name | position | position |
| Z17877_PEA_1_T0 (SEQ ID NO: 1157) | 1481 | 1962 |
| Z17877_PEA_1_T2 (SEQ ID NO: 1158) | 3105 | 3586 |
| Z17877_PEA_1_T3 (SEQ ID NO: 1159) | 1481 | 1962 |
| Z17877_PEA_1_T4 (SEQ ID NO: 1160) | 3019 | 3500 |
| Z17877_PEA_1_T6 (SEQ ID NO: 1161) | 1481 | 1962 |
| Z17877_PEA_1_T7 (SEQ ID NO: 1162) | 877 | 1358 |
| Z17877_PEA_1_T8 (SEQ ID NO: 1163) | 1481 | 1962 |
| Z17877_PEA_1_T11 (SEQ ID NO: 1164) | 877 | 1358 |
| Z17877_PEA_1_T12 (SEQ ID NO: 1165) | 877 | 1358 |

[3600] Segment cluster Z17877_PEA_{—}1_node_{—}16 (SEQ ID NO:1174) according to the present invention is supported by 21 libraries. The number of libraries was determined as previously described. This segment can be found in the following transcript(s): Z17877_PEA_{—}1_T6 (SEQ ID NO:1161) and Z17877_PEA_{—}1_T11 (SEQ ID NO:1164). Table 24 below describes the starting and ending position of this segment on each transcript.

TABLE 24
Segment location on transcripts

| | Segment | Segment |
|---|---|---|
| | starting | ending |
| Transcript name | position | position |
| Z17877_PEA_1_T6 (SEQ ID NO: 1161) | 1963 | 3311 |
| Z17877_PEA_1_T11 (SEQ ID NO: 1164) | 1359 | 2707 |

[3601] Segment cluster Z17877_PEA_{—}1_node_{—}18 (SEQ ID NO:1175) according to the present invention is supported by 263 libraries. The number of libraries was determined as previously described. This segment can be found in the following transcript(s): Z17877_PEA_{—}1_T0 (SEQ ID NO:1157), Z17877_PEA_{—}1_T2 (SEQ ID NO:1158), Z17877_PEA_{—}1_T3 (SEQ ID NO:1159), Z17877_PEA_{—}1_T4 (SEQ ID NO:1160), Z17877_PEA_{—}1_T6 (SEQ ID NO:1161), Z17877_PEA_{—}1_T7 (SEQ ID NO:1162), Z17877_PEA_{—}1_T8 (SEQ ID NO:1163), Z17877_PEA_{—}1_T11 (SEQ ID NO:1164) and Z17877_PEA_{—}1_T12 (SEQ ID NO:1165). Table 25 below describes the starting and ending position of this segment on each transcript.

TABLE 25
Segment location on transcripts

| | Segment | Segment |
|---|---|---|
| | starting | ending |
| Transcript name | position | position |
| Z17877_PEA_1_T0 (SEQ ID NO: 1157) | 1963 | 3001 |
| Z17877_PEA_1_T2 (SEQ ID NO: 1158) | 3587 | 4625 |
| Z17877_PEA_1_T3 (SEQ ID NO: 1159) | 1963 | 2841 |
| Z17877_PEA_1_T4 (SEQ ID NO: 1160) | 3501 | 4539 |
| Z17877_PEA_1_T6 (SEQ ID NO: 1161) | 3339 | 4377 |
| Z17877_PEA_1_T7 (SEQ ID NO: 1162) | 1359 | 2397 |
| Z17877_PEA_1_T8 (SEQ ID NO: 1163) | 1990 | 3028 |
| Z17877_PEA_1_T11 (SEQ ID NO: 1164) | 2708 | 3746 |
| Z17877_PEA_1_T12 (SEQ ID NO: 1165) | 1386 | 2424 |

[3602] According to an optional embodiment of the present invention, short segments related to the above cluster are also provided. These segments are up to about 120 bp in length, and so are included in a separate description.

[3603] Segment cluster Z17877_PEA_{—}1_node_{—}1 (SEQ ID NO:1176) according to the present invention is supported by 3 libraries. The number of libraries was determined as previously described. This segment can be found in the following transcript(s): Z17877_PEA_{—}1_T0 (SEQ ID NO:1157), Z17877_PEA_{—}1_T2 (SEQ ID NO:1158), Z17877_PEA_{—}1_T3 (SEQ ID NO:1159), Z17877_PEA_{—}1_T4 (SEQ ID NO:1160), Z17877_PEA_{—}1_T6 (SEQ ID NO:1161), Z17877_PEA_{—}1_T7 (SEQ ID NO:1162), Z17877_PEA_{—}1_T8 (SEQ ID NO:1163), Z17877_PEA_{—}1_T11 (SEQ ID NO:1164) and Z17877_PEA_{—}1_T12 (SEQ ID NO:1165). Table 26 below describes the starting and ending position of this segment on each transcript.

TABLE 26
Segment location on transcripts

| | Segment | Segment |
|---|---|---|
| | starting | ending |
| Transcript name | position | position |
| Z17877_PEA_1_T0 (SEQ ID NO: 1157) | 331 | 378 |
| Z17877_PEA_1_T2 (SEQ ID NO: 1158) | 331 | 378 |
| Z17877_PEA_1_T3 (SEQ ID NO: 1159) | 331 | 378 |
| Z17877_PEA_1_T4 (SEQ ID NO: 1160) | 331 | 378 |
| Z17877_PEA_1_T6 (SEQ ID NO: 1161) | 331 | 378 |
| Z17877_PEA_1_T7 (SEQ ID NO: 1162) | 331 | 378 |
| Z17877_PEA_1_T8 (SEQ ID NO: 1163) | 331 | 378 |
| Z17877_PEA_1_T11 (SEQ ID NO: 1164) | 331 | 378 |
| Z17877_PEA_1_T12 (SEQ ID NO: 1165) | 331 | 378 |

[3604] Segment cluster Z17877_PEA_{—}1_node_{—}2 (SEQ ID NO:1177) according to the present invention can be found in the following transcript(s): Z17877_PEA_{—}1_T0 (SEQ ID NO:1157), Z17877_PEA_{—}1_T2 (SEQ ID NO:1158), Z17877_PEA_{—}1_T3 (SEQ ID NO:1159), Z17877_PEA_{—}1_T4 (SEQ ID NO:1160), Z17877_PEA_{—}1_T6 (SEQ ID NO:1161), Z17877_PEA_{—}1_T7 (SEQ ID NO:1162), Z17877_PEA_{—}1_T8 (SEQ ID NO:1163), Z17877_PEA_{—}1_T11 (SEQ ID NO:1164) and Z17877_PEA_{—}1_T12 (SEQ ID NO:1165). Table 27 below describes the starting and ending position of this segment on each transcript.

TABLE 27
Segment location on transcripts

| | Segment | Segment |
|---|---|---|
| | starting | ending |
| Transcript name | position | position |
| Z17877_PEA_1_T0 (SEQ ID NO: 1157) | 379 | 403 |
| Z17877_PEA_1_T2 (SEQ ID NO: 1158) | 379 | 403 |
| Z17877_PEA_1_T3 (SEQ ID NO: 1159) | 379 | 403 |
| Z17877_PEA_1_T4 (SEQ ID NO: 1160) | 379 | 403 |
| Z17877_PEA_1_T6 (SEQ ID NO: 1161) | 379 | 403 |
| Z17877_PEA_1_T7 (SEQ ID NO: 1162) | 379 | 403 |
| Z17877_PEA_1_T8 (SEQ ID NO: 1163) | 379 | 403 |
| Z17877_PEA_1_T11 (SEQ ID NO: 1164) | 379 | 403 |
| Z17877_PEA_1_T12 (SEQ ID NO: 1165) | 379 | 403 |

[3605] Segment cluster Z17877_PEA_{—}1_node_{—}4 (SEQ ID NO:1178) according to the present invention can be found in the following transcript(s): Z17877_PEA_{—}1_T0 (SEQ ID NO:1157), Z17877_PEA_{—}1_T2 (SEQ ID NO:1158), Z17877_PEA_{—}1_T3 (SEQ ID NO:1159), Z17877_PEA_{—}1_T4 (SEQ ID NO:1160), Z17877_PEA_{—}1_T6 (SEQ ID NO:1161) and Z17877_PEA_{—}1_T8 (SEQ ID NO:1163). Table 28 below describes the starting and ending position of this segment on each transcript.

TABLE 28
Segment location on transcripts

| | Segment | Segment |
|---|---|---|
| | starting | ending |
| Transcript name | position | position |
| Z17877_PEA_1_T0 (SEQ ID NO: 1157) | 756 | 763 |
| Z17877_PEA_1_T2 (SEQ ID NO: 1158) | 756 | 763 |
| Z17877_PEA_1_T3 (SEQ ID NO: 1159) | 756 | 763 |
| Z17877_PEA_1_T4 (SEQ ID NO: 1160) | 756 | 763 |
| Z17877_PEA_1_T6 (SEQ ID NO: 1161) | 756 | 763 |
| Z17877_PEA_1_T8 (SEQ ID NO: 1163) | 756 | 763 |

[3606] Segment cluster Z17877_PEA_{—}1_node_{—}5 (SEQ ID NO:1179) according to the present invention is supported by 80 libraries. The number of libraries was determined as previously described. This segment can be found in the following transcript(s): Z17877_PEA_{—}1_T0 (SEQ ID NO:1157), Z17877_PEA_{—}1_T2 (SEQ ID NO:1158), Z17877_PEA_{—}1_T3 (SEQ ID NO:1159), Z17877_PEA_{—}1_T6 (SEQ ID NO:1161) and Z17877_PEA_{—}1_T8 (SEQ ID NO:1163). Table 29 below describes the starting and ending position of this segment on each transcript.

TABLE 29
Segment location on transcripts

| | Segment | Segment |
|---|---|---|
| | starting | ending |
| Transcript name | position | position |
| Z17877_PEA_1_T0 (SEQ ID NO: 1157) | 764 | 849 |
| Z17877_PEA_1_T2 (SEQ ID NO: 1158) | 764 | 849 |
| Z17877_PEA_1_T3 (SEQ ID NO: 1159) | 764 | 849 |
| Z17877_PEA_1_T6 (SEQ ID NO: 1161) | 764 | 849 |
| Z17877_PEA_1_T8 (SEQ ID NO: 1163) | 764 | 849 |

[3607] Segment cluster Z17877_PEA_{—}1_node_{—}6 (SEQ ID NO:1180) according to the present invention can be found in the following transcript(s): Z17877_PEA_{—}1_T0 (SEQ ID NO:1157), Z17877_PEA_{—}1_T2 (SEQ ID NO:1158), Z17877_PEA_{—}1_T3 (SEQ ID NO:1159), Z17877_PEA_{—}1_T4 (SEQ ID NO:1160), Z17877_PEA_{—}1_T6 (SEQ ID NO:1161) and Z17877_PEA_{—}1_T8 (SEQ ID NO:1163). Table 30 below describes the starting and ending position of this segment on each transcript.

TABLE 30
Segment location on transcripts

| | Segment | |
|---|---|---|
| | starting | Segment |
| Transcript name | position | ending position |
| Z17877_PEA_1_T0 (SEQ ID NO: 1157) | 850 | 861 |
| Z17877_PEA_1_T2 (SEQ ID NO: 1158) | 850 | 861 |
| Z17877_PEA_1_T3 (SEQ ID NO: 1159) | 850 | 861 |
| Z17877_PEA_1_T4 (SEQ ID NO: 1160) | 764 | 775 |
| Z17877_PEA_1_T6 (SEQ ID NO: 1161) | 850 | 861 |
| Z17877_PEA_1_T8 (SEQ ID NO: 1163) | 850 | 861 |

[3608] Segment cluster Z17877_PEA_{—}1_node_{—}14 (SEQ ID NO:1181) according to the present invention is supported by 83 libraries. The number of libraries was determined as previously described. This segment can be found in the following transcript(s): Z17877_PEA_{—}1_T0 (SEQ ID NO:1157), Z17877_PEA_{—}1_T2 (SEQ ID NO:1158), Z17877_PEA_{—}1_T3 (SEQ ID NO:1159), Z17877_PEA_{—}1_T4 (SEQ ID NO:1160), Z17877_PEA_{—}1_T6 (SEQ ID NO:1161), Z17877_PEA_{—}1_T7 (SEQ ID NO:1162), Z17877_PEA_{—}1_T8 (SEQ ID NO:1163), Z17877_PEA_{—}1_T11 (SEQ ID NO:1164) and Z17877_PEA_{—}1_T12 (SEQ ID NO:1165). Table 31 below describes the starting and ending position of this segment on each transcript.

TABLE 31
Segment location on transcripts

| | Segment | |
|---|---|---|
| | starting | Segment |
| Transcript name | position | ending position |
| Z17877_PEA_1_T0 (SEQ ID NO: 1157) | 1403 | 1480 |
| Z17877_PEA_1_T2 (SEQ ID NO: 1158) | 3027 | 3104 |
| Z17877_PEA_1_T3 (SEQ ID NO: 1159) | 1403 | 1480 |
| Z17877_PEA_1_T4 (SEQ ID NO: 1160) | 2941 | 3018 |
| Z17877_PEA_1_T6 (SEQ ID NO: 1161) | 1403 | 1480 |
| Z17877_PEA_1_T7 (SEQ ID NO: 1162) | 799 | 876 |
| Z17877_PEA_1_T8 (SEQ ID NO: 1163) | 1403 | 1480 |
| Z17877_PEA_1_T11 (SEQ ID NO: 1164) | 799 | 876 |
| Z17877_PEA_1_T12 (SEQ ID NO: 1165) | 799 | 876 |

[3609] Segment cluster Z17877_PEA_{—}1_node_{—}17 (SEQ ID NO:1182) according to the present invention is supported by 11 libraries. The number of libraries was determined as previously described. This segment can be found in the following transcript(s): Z17877_PEA_{—}1_T6 (SEQ ID NO:1161), Z17877_PEA_{—}1_T8 (SEQ ID NO:1163) and Z17877_PEA_{—}1_T12 (SEQ ID NO:1165). Table 32 below describes the starting and ending position of this segment on each transcript.

TABLE 32
Segment location on transcripts

| | Segment | |
|---|---|---|
| | starting | Segment |
| Transcript name | position | ending position |
| Z17877_PEA_1_T6 (SEQ ID NO: 1161) | 3312 | 3338 |
| Z17877_PEA_1_T8 (SEQ ID NO: 1163) | 1963 | 1989 |
| Z17877_PEA_1_T12 (SEQ ID NO: 1165) | 1359 | 1385 |

### Expression of c-myc-P64 mRNA, Initiating from Promoter P0 Z17877 Transcripts which are Detectable by Amplicon as Depicted in Sequence Name Z17877Seg8 (SEQ ID NO: 1375) in Normal and Cancerous Colon Tissues

[3610] Expression of c-myc-P64 mRNA, initiating from promoter P0 transcripts detectable by or according to seg8, Z17877seg8 amplicon (SEQ ID NO: 1375) and Z17877seg8 F (SEQ ID NO: 1373) and Z17877seg8 R (SEQ ID NO: 1374) primers was measured by real time PCR. In parallel the expression of four housekeeping genes —PBGD (GenBank Accession No. BC019323 (SEQ ID NO:1576); amplicon—PBGD-amplicon, SEQ ID NO:531), HPRT1 (GenBank Accession No. NM_{—}000194 (SEQ ID NO:1577); amplicon—HPRT1-amplicon, SEQ ID NO:612), G6PD (GenBank Accession No. NM_{—}000402 (SEQ ID NO:1578); G6PD amplicon, SEQ ID NO:615), RPS27A (GenBank Accession No. NM_{—}002954 (SEQ ID NO:1579); RPS27A amplicon, SEQ ID NO:1261), was measured similarly. For each RT sample, the expression of the above amplicon was normalized to the geometric mean of the quantities of the housekeeping genes. The normalized quantity of each RT sample was then divided by the median of the quantities of the normal post-mortem (PM) samples (Sample Nos. 41, 52, 62-67, 69-71, Table 1, above, “Tissue samples in testing panel”), to obtain a value of fold up-regulation for each sample relative to median of the normal PM samples.

[3611] FIG. 67 is a histogram showing over expression of the above-indicated c-myc-P64 mRNA, initiating from promoter P0 transcripts in cancerous colon samples relative to the normal samples. The number and percentage of samples that exhibit at least 3 fold over-expression, out of the total number of samples tested is indicated in the bottom.

[3612] As is evident from FIG. 67, the expression of c-myc-P64 mRNA, initiating from promoter P0 transcripts detectable by the above amplicon in cancer samples was significantly higher than in the non-cancerous samples (Sample Nos. 41, 52, 62-67, 69-71 Table 1, “Tissue samples in testing panel”). Notably an over-expression of at least 3 fold was found in 13 out of 37 adenocarcinoma samples,

[3613] Statistical analysis was applied to verify the significance of these results, as described below.

[3614] The P value for the difference in the expression levels of c-myc-P64 mRNA, initiating from promoter P0 transcripts detectable by the above amplicon in colon cancer samples versus the normal tissue samples was determined by T test as 6.27E-05.

[3615] Threshold of 3 fold overexpression was found to differentiate between cancer and normal samples with P value of 1.85E-02 as checked by exact fisher test. The above values demonstrate statistical significance of the results.

[3616] Primer pairs are also optionally and preferably encompassed within the present invention; for example, for the above experiment, the following primer pair was used as a non-limiting illustrative example only of a suitable primer pair: Z17877seg8F forward primer (SEQ ID NO: 1373); and Z17877seg8R reverse primer (SEQ ID NO: 1374).

[3617] The present invention also preferably encompasses any amplicon obtained through the use of any suitable primer pair; for example, for the above experiment, the following amplicon was obtained as a non-limiting illustrative example only of a suitable amplicon: Z17877seg8 (SEQ ID NO: 1375).

Forward primer (SEQ ID NO: 1373):
AGCAAGGACGCGACTCTCC
Reverse primer (SEQ ID NO: 1374):
AATCCAGCGTCTAAGCAGCTG
Amplicon (SEQ ID NO: 1375):
AGCAAGGACGCGACTCTCCCGACGCGGGGAGGCTATTCTGCCCATTTGGG
GACACTTCCCCGCCGCTGCCAGGACCCGCTTCTCTGAAAGGCTCTCCTTG
CAGCTGCTTAGACGCTGGATT

[3618] Combined expression of 19 sequences (T23657seg 29-32 (SEQ ID NO: 1363); T23657seg 22 (SEQ ID NO: 1360); T23657seg 41 (SEQ ID NO: 1366); T23657seg17-18 (SEQ ID NO: 1357); AA315457seg8 (SEQ ID NO:1383); R30650seg76 (SEQ ID NO: 1354); HUM-CEASeg33 (SEQ ID NO: 1345); CEA-Seg35 (SEQ ID NO: 1348); CEA-Seg31 (SEQ ID NO: 1342); AA58339seg1 (SEQ ID NO: 1327); AA583399seg17 (SEQ ID NO: 1324); AA583399-seg30-32 (SEQ ID NO: 1321); HUMCACH1A seg101 (SEQ ID NO: 1337); HSHCGIseg20 (SEQ ID NO: 1378); HSHCGIseg35 (SEQ ID NO: 1381); M78035seg 42 (SEQ ID NO: 1351); T51958seg7 (SEQ ID NO: 1372); T51958seg38 (SEQ ID NO: 1369); Z17877seg8 (SEQ ID NO: 1375)) in normal and cancerous colon tissues.

[3619] Expression of solute carrier organic anion transporter family, member 4A1 (SLC04A1), Carcinoembryonic antigen-related cell adhesion molecule 5 [Precursor], myeloma overexpressed gene (in a subset of t(11;14) positive multiple myelomas) (MYEOV), Voltage-dependent L-type calcium channel alpha-1D subunit Calcium channel, L type, alpha-1 polypeptide, isoform 2, TRIM31 tripartite motif, S-adenosylhomocysteine hydrolase (AHCY), Homo sapiens PTK7 protein tyrosine kinase 7 (PTK7) and c-myc-P64 mRNA, initiating from promoter PO transcripts detectable by or according to T23657seg 29-32 (SEQ ID NO: 1363); T23657seg 22 (SEQ ID NO: 1360); T23657seg 41 (SEQ ID NO: 1366); T23657seg17-18 (SEQ ID NO: 1357); AA315457seg8 SEQ ID NO: 1383; R30650seg76 (SEQ ID NO: 1354); HUM-CEASeg33 (SEQ ID NO: 1345); CEA-Seg35 (SEQ ID NO: 1348); CEA-Seg31 (SEQ ID NO: 1342); AA58339seg1 (SEQ ID NO: 1327); AA583399seg17 (SEQ ID NO: 1324); AA583399-seg30-32 (SEQ ID NO: 1321); HUMCACH1A seg101 (SEQ ID NO: 1337); HSHCGIseg20 (SEQ ID NO: 1378); HSHCGIseg35 (SEQ ID NO: 1381); M78035seg 42 (SEQ ID NO: 1351); T51958seg7 (SEQ ID NO: 1372); T51958seg38 (SEQ ID NO: 1369); Z17877seg8 (SEQ ID NO: 1375) amplicons was measured by real time PCR. In parallel the expression of four housekeeping genes —PBGD (GenBank Accession No. BC019323 (SEQ ID NO:1576); amplicon—PBGD-amplicon, SEQ ID NO:531), HPRT1 (GenBank Accession No. NM_{—}000194 (SEQ ID NO:1577); amplicon—HPRT1-amplicon, SEQ ID NO:612), G6PD (GenBank Accession No. NM_{—}000402 (SEQ ID NO:1578); G6PD amplicon, SEQ ID NO:615), RPS27A (GenBank Accession No. NM_{—}002954 (SEQ ID NO:1579); RPS27A amplicon, SEQ ID NO:1261), was measured similarly. For each RT sample, the expression of the above amplicons was normalized to the geometric mean of the quantities of the housekeeping genes. The normalized quantity of each RT sample of each amplicon was then divided by the median of the quantities of the normal post-mortem (PM) samples detected for the same amplicon (Sample Nos. 41, 52, 62-67, 69-71, Table 1, above, “Tissue samples in testing panel”), to obtain a value of fold up-regulation for each sample relative to median of the normal PM samples.

[3620] FIG. 68 is a histogram showing over expression of the above-indicated transcripts in cancerous colon samples relative to the normal samples. The number and percentage of samples that exhibit at least 5 fold over-expression of at least one of the sequences, out of the total number of samples tested is indicated in the bottom.

[3621] As is evident from FIG. 68, an over-expression of at least 5 fold in at least one of the sequences was found in 37 out of 37 adenocarcinoma samples.

[3622] Statistical analysis was applied to verify the significance of these results, as described below. Threshold of 5 fold overexpression of at least one of the amplicons was found to differentiate between cancer and normal samples with P value of 5.31E-10 as checked by exact fisher test.

[3623] The above values demonstrate statistical significance of the results.

[3624] The FIG. 68 shows combined results for the colon panel marker, as a non-limiting example of a combination of markers according to the present invention.

### Description for Cluster HSHCGI

[3625] Cluster HSHCGI features 24 transcript(s) and 29 segment(s) of interest, the names for which are given in Tables 1 and 2, respectively, the sequences themselves are given at the end of the application. The selected protein variants are given in table 3.

TABLE 1
Transcripts of interest

| Transcript Name | SEQ ID NO: |
|---|---|
| HSHCGI_PEA_3_T0 | 1187 |
| HSHCGI_PEA_3_T1 | 1188 |
| HSHCGI_PEA_3_T2 | 1189 |
| HSHCGI_PEA_3_T3 | 1190 |
| HSHCGI_PEA_3_T4 | 1191 |
| HSHCGI_PEA_3_T5 | 1192 |
| HSHCGI_PEA_3_T6 | 1193 |
| HSHCGI_PEA_3_T7 | 1194 |
| HSHCGI_PEA_3_T8 | 1195 |
| HSHCGI_PEA_3_T9 | 1196 |
| HSHCGI_PEA_3_T10 | 1197 |
| HSHCGI_PEA_3_T11 | 1198 |
| HSHCGI_PEA_3_T12 | 1199 |
| HSHCGI_PEA_3_T13 | 1200 |
| HSHCGI_PEA_3_T14 | 1201 |
| HSHCGI_PEA_3_T15 | 1202 |
| HSHCGI_PEA_3_T17 | 1203 |
| HSHCGI_PEA_3_T18 | 1204 |
| HSHCGI_PEA_3_T19 | 1205 |
| HSHCGI_PEA_3_T20 | 1206 |
| HSHCGI_PEA_3_T21 | 1207 |
| HSHCGI_PEA_3_T22 | 1208 |
| HSHCGI_PEA_3_T23 | 1209 |
| HSHCGI_PEA_3_T24 | 1210 |

TABLE 2
Segments of interest

| Segment Name | SEQ ID NO: |
|---|---|
| HSHCGI_PEA_3_node_0 | 1211 |
| HSHCGI_PEA_3_node_2 | 1212 |
| HSHCGI_PEA_3_node_7 | 1213 |
| HSHCGI_PEA_3_node_8 | 1214 |
| HSHCGI_PEA_3_node_14 | 1215 |
| HSHCGI_PEA_3_node_16 | 1216 |
| HSHCGI_PEA_3_node_18 | 1217 |
| HSHCGI_PEA_3_node_20 | 1218 |
| HSHCGI_PEA_3_node_26 | 1219 |
| HSHCGI_PEA_3_node_28 | 1220 |
| HSHCGI_PEA_3_node_30 | 1221 |
| HSHCGI_PEA_3_node_32 | 1222 |
| HSHCGI_PEA_3_node_33 | 1223 |
| HSHCGI_PEA_3_node_34 | 1224 |
| HSHCGI_PEA_3_node_36 | 1225 |
| HSHCGI_PEA_3_node_1 | 1226 |
| HSHCGI_PEA_3_node_4 | 1227 |
| HSHCGI_PEA_3_node_6 | 1228 |
| HSHCGI_PEA_3_node_9 | 1229 |
| HSHCGI_PEA_3_node_11 | 1230 |
| HSHCGI_PEA_3_node_13 | 1231 |
| HSHCGI_PEA_3_node_19 | 1232 |
| HSHCGI_PEA_3_node_21 | 1233 |
| HSHCGI_PEA_3_node_22 | 1234 |
| HSHCGI_PEA_3_node_23 | 1235 |
| HSHCGI_PEA_3_node_24 | 1236 |
| HSHCGI_PEA_3_node_27 | 1237 |
| HSHCGI_PEA_3_node_31 | 1238 |
| HSHCGI_PEA_3_node_35 | 1239 |

TABLE 3
Proteins of interest

| Protein Name | SEQ ID NO: | Corresponding Transcript(s) |
|---|---|---|
| HSHCGI_PEA_3_P17 | 1243 | HSHCGI_PEA_3_T13 (SEQ ID NO: 1200) |
| HSHCGI_PEA_3_P18 | 1244 | HSHCGI_PEA_3_T0 (SEQ ID NO: 1187) |
| HSHCGI_PEA_3_P19 | 1245 | HSHCGI_PEA_3_T11 (SEQ ID NO: 1198) |
| HSHCGI_PEA_3_P1 | 1246 | HSHCGI_PEA_3_T3 (SEQ ID NO: 1190) |
| HSHCGI_PEA_3_P4 | 1247 | HSHCGI_PEA_3_T5 (SEQ ID NO: 1192); HSHCGI_PEA_3_T12 (SEQ |
| | | ID NO: 1199) |
| HSHCGI_PEA_3_P6 | 1248 | HSHCGI_PEA_3_T7 (SEQ ID NO: 1194) |
| HSHCGI_PEA_3_P7 | 1249 | HSHCGI_PEA_3_T8 (SEQ ID NO: 1195) |
| HSHCGI_PEA_3_P8 | 1250 | HSHCGI_PEA_3_T9 (SEQ ID NO: 1196) |
| HSHCGI_PEA_3_P9 | 1251 | HSHCGI_PEA_3_T10 (SEQ ID NO: 1197) |
| HSHCGI_PEA_3_P12 | 1252 | HSHCGI_PEA_3_T14 (SEQ ID NO: 1201); HSHCGI_PEA_3_T15 |
| | | (SEQ ID NO: 1202); HSHCGI_PEA_3_T20 (SEQ ID NO: 1206) |
| HSHCGI_PEA_3_P13 | 1253 | HSHCGI_PEA_3_T17 (SEQ ID NO: 1203); HSHCGI_PEA_3_T19 |
| | | (SEQ ID NO: 1205) |
| HSHCGI_PEA_3_P14 | 1254 | HSHCGI_PEA_3_T18 (SEQ ID NO: 1204) |
| HSHCGI_PEA_3_P15 | 1255 | HSHCGI_PEA_3_T21 (SEQ ID NO: 1207); HSHCGI_PEA_3_T22 |
| | | (SEQ ID NO: 1208) |
| HSHCGI_PEA_3_P16 | 1256 | HSHCGI_PEA_3_T23 (SEQ ID NO: 1209) |
| HSHCGI_PEA_3_P20 | 1257 | HSHCGI_PEA_3_T1 (SEQ ID NO: 1188); HSHCGI_PEA_3_T2 (SEQ |
| | | ID NO: 1189) |
| HSHCGI_PEA_3_P21 | 1258 | HSHCGI_PEA_3_T4 (SEQ ID NO: 1191) |
| HSHCGI_PEA_3_P22 | 1259 | HSHCGI_PEA_3_T6 (SEQ ID NO: 1193) |

[3626] As noted above, cluster HSHCGI features 24 transcript(s), which were listed in Table 1 above. A description of each variant protein according to the present invention is now provided.

[3627] Variant protein HSHCGI_PEA_{—}3_P17 (SEQ ID NO:1243) according to the present invention has an amino acid sequence as given at the end of the application; it is encoded by transcript(s) HSHCGI_PEA_{—}3_T13 (SEQ ID NO:1200). One or more alignments to one or more previously published protein sequences are given at the end of the application. A brief description of the relationship of the variant protein according to the present invention to each such aligned protein is as follows:

[3628] Comparison Report Between HSHCGI_PEA_{—}3_P17 (SEQ ID NO:1243) and TM31_HUMAN (SEQ ID NO: 1242):

[3629] 1. An isolated chimeric polypeptide encoding for HSHCGI_PEA_{—}3_P17 (SEQ ID NO:1243), comprising a first amino acid sequence being at least 90% homologous to MASGQFVNKLQEEVICPICLDILQKPVTIDCGHNFCPQCITQIGETSCGFFKCPLCKTSVRRDAIRFNSLLRN LVEKIQALQASEVQSKRKEATCPRHQEMFHYFCEDDGKFLCFVCRESKDHKSHNVSLIEEAAQNYQGQIQ EQIQVLQQKEKETVQVKAQGVHRVDVFTDQVEHEKQRILTEFELLHQVLEEEKNFLLSRIYWLGHEGTEA GKHYV corresponding to amino acids 1-218 of TM31_HUMAN (SEQ ID NO:1242), which also corresponds to amino acids 1-218 of HSHCGI_PEA_{—}3_P17 (SEQ ID NO:1243), and a second amino acid sequence being at least 70%, optionally at least 80%, preferably at least 85%, more preferably at least 90% and most preferably at least 95% homologous to a polypeptide having the sequence EIPLMPTVERSQEARCYP (SEQ ID NO:1442) corresponding to amino acids 219-236 of HSHCGI_PEA_{—}3_P17 (SEQ ID NO:1243), wherein said first amino acid sequence and second amino acid sequence are contiguous and in a sequential order.

[3630] 2. An isolated polypeptide encoding for a tail of HSHCGI_PEA_{—}3_P17 (SEQ ID NO:1243), comprising a polypeptide being at least 70%, optionally at least about 80%, preferably at least about 85%, more preferably at least about 90% and most preferably at least about 95% homologous to the sequence EIPLMPTVERSQEARCYP (SEQ ID NO:1442) in HSHCGI_PEA_{—}3_P17 (SEQ ID NO:1243).

[3631] The location of the variant protein was determined according to results from a number of different software programs and analyses, including analyses from SignalP and other specialized programs. The variant protein is believed to be located as follows with regard to the cell: intracellularly. The protein localization is believed to be intracellularly because neither of the trans-membrane region prediction programs predicted a trans-membrane region for this protein. In addition both signal-peptide prediction programs predict that this protein is a non-secreted protein.

[3632] Variant protein HSHCGI_PEA_{—}3_P17 (SEQ ID NO:1243) also has the following non-silent SNPs (Single Nucleotide Polymorphisms) as listed in Table 4, (given according to their position(s) on the amino acid sequence, with the alternative amino acid(s) listed; the last column indicates whether the SNP is known or not; the presence of known SNPs in variant protein HSHCGI_PEA_{—}3_P17 (SEQ ID NO:1243) sequence provides support for the deduced sequence of this variant protein according to the present invention).

TABLE 4
Amino acid mutations

| SNP position(s) on amino | Alternative | Previously |
|---|---|---|
| acid sequence | amino acid(s) | known SNP? |
| 38 | Q -> | No |
| 38 | Q -> K | No |
| 61 | R -> | No |
| 118 | R -> C | Yes |
| 233 | R -> H | Yes |

[3633] Variant protein HSHCGI_PEA_{—}3_P17 (SEQ ID NO:1243) is encoded by the following transcript(s): HSHCGI_PEA_{—}3_T13 (SEQ ID NO:1200), for which the sequence(s) is/are given at the end of the application. The coding portion of transcript HSHCGI_PEA_{—}3_T13 (SEQ ID NO:1200) is shown in bold; this coding portion starts at position 111 and ends at position 814. The transcript also has the following SNPs as listed in Table 5 (given according to their position on the nucleotide sequence, with the alternative nucleic acid listed; the last column indicates whether the SNP is known or not; the presence of known SNPs in variant protein HSHCGI_PEA_{—}3_P17 (SEQ ID NO:1243) sequence provides support for the deduced sequence of this variant protein according to the present invention).

TABLE 5
Nucleic acid SNPs

| SNP position on | Alternative | Previously |
|---|---|---|
| nucleotide sequence | nucleic acid | known SNP? |
| 24 | -> C | No |
| 60 | A -> | No |
| 61 | C -> | No |
| 197 | C -> T | Yes |
| 222 | A -> | No |
| 292 | G -> | No |
| 297 | -> G | No |
| 419 | C -> T | Yes |
| 462 | C -> T | Yes |
| 749 | G -> A | Yes |
| 804 | G -> A | Yes |
| 879 | A -> | No |
| 960 | C -> T | Yes |
| 981 | G -> A | Yes |
| 1274 | C -> A | No |
| 1372 | G -> A | Yes |
| 1423 | A -> C | Yes |
| 1592 | G -> A | Yes |
| 1765 | G -> A | Yes |
| 1770 | G -> C | Yes |
| 1858 | T -> C | No |
| 2006 | A -> G | Yes |

[3634] Variant protein HSHCGI_PEA_{—}3_P18 (SEQ ID NO:1244) according to the present invention has an amino acid sequence as given at the end of the application; it is encoded by transcript(s) HSHCGI_PEA_{—}3_T0 (SEQ ID NO:1187). The location of the variant protein was determined according to results from a number of different software programs and analyses, including analyses from SignalP and other specialized programs. The variant protein is believed to be located as follows with regard to the cell: intracellularly. The protein localization is believed to be intracellularly because neither of the trans-membrane region prediction programs predicted a trans-membrane region for this protein. In addition both signal-peptide prediction programs predict that this protein is a non-secreted protein.

[3635] Variant protein HSHCGI_PEA_{—}3_P18 (SEQ ID NO:1244) also has the following non-silent SNPs (Single Nucleotide Polymorphisms) as listed in Table 6, (given according to their position(s) on the amino acid sequence, with the alternative amino acid(s) listed; the last column indicates whether the SNP is known or not; the presence of known SNPs in variant protein HSHCGI_PEA_{—}3_P18 (SEQ ID NO:1244) sequence provides support for the deduced sequence of this variant protein according to the present invention).

TABLE 6
Amino acid mutations

| SNP position(s) on amino | Alternative | Previously |
|---|---|---|
| acid sequence | amino acid(s) | known SNP? |
| 38 | K -> | No |
| 61 | R -> | No |
| 118 | R -> C | Yes |
| 232 | V -> I | Yes |
| 256 | R -> | No |
| 388 | A -> E | No |
| 421 | E -> K | Yes |

[3636] Variant protein HSHCGI_PEA_{—}3_P18 (SEQ ID NO:1244) is encoded by the following transcript(s): HSHCGI_PEA_{—}3_T0 (SEQ ID NO:1187), for which the sequence(s) is/are given at the end of the application. The coding portion of transcript HSHCGI_PEA_{—}3_T0 (SEQ ID NO:1187) is shown in bold; this coding portion starts at position 111 and ends at position 1385. The transcript also has the following SNPs as listed in Table 7 (given according to their position on the nucleotide sequence, with the alternative nucleic acid listed; the last column indicates whether the SNP is known or not; the presence of known SNPs in variant protein HSHCGI_PEA_{—}3_P18 (SEQ ID NO:1244) sequence provides support for the deduced sequence of this variant protein according to the present invention).

TABLE 7
Nucleic acid SNPs

| SNP position on | Alternative | Previously |
|---|---|---|
| nucleotide sequence | nucleic acid | known SNP? |
| 24 | -> C | No |
| 60 | A -> | No |
| 61 | C -> | No |
| 197 | C -> T | Yes |
| 222 | A -> | No |
| 292 | G -> | No |
| 297 | -> G | No |
| 419 | C -> T | Yes |
| 462 | C -> T | Yes |
| 749 | G -> A | Yes |
| 804 | G -> A | Yes |
| 878 | A -> | No |
| 959 | C -> T | Yes |
| 980 | G -> A | Yes |
| 1273 | C -> A | No |
| 1371 | G -> A | Yes |
| 1422 | A -> C | Yes |
| 1591 | G -> A | Yes |
| 1764 | G -> A | Yes |
| 1769 | G -> C | Yes |
| 1857 | T -> C | No |
| 2005 | A -> G | Yes |

[3637] Variant protein HSHCGI_PEA_{—}3_P19 (SEQ ID NO:1245) according to the present invention has an amino acid sequence as given at the end of the application; it is encoded by transcript(s) HSHCGI_PEA_{—}3_T11 (SEQ ID NO:1198). One or more alignments to one or more previously published protein sequences are given at the end of the application. A brief description of the relationship of the variant protein according to the present invention to each such aligned protein is as follows:

[3638] Comparison Report Between HSHCGI_PEA_{—}3_P19 (SEQ ID NO:1245) and TM31_HUMAN_V2 (SEQ ID NO:1241):

[3639] 1. An isolated chimeric polypeptide encoding for HSHCGI_PEA_{—}3_P19 (SEQ ID NO:1245), comprising a first amino acid sequence being at least 90% homologous to MASGQFVNKLQEEVICPICLDILQKPVTIDCGHNFCLKCITQIGETSCGFFKCPLCKTSVRRDAIRFNSLLRN LVEKIQALQASEVQSKRKEATCPRHQEMFHYFCEDDGKFLCFVCRESKDHKSHNVSLIEEAAQNYQGQIQ EQIQVLQQKEKETVQVKAQGVHRVDVFTDQVEHEKQRILTEFELLHQVLEEEKNFLLSRIYWLGHEGTEA GKHYVASTEPQLNDLKKLVDSLKTKQNMPPRQLLE corresponding to amino acids 1-248 of TM31_HUMAN_V2 (SEQ ID NO:1241), which also corresponds to amino acids 1-248 of HSHCGI_PEA_{—}3_P19 (SEQ ID NO:1245), and a second amino acid sequence being at least 70%, optionally at least 80%, preferably at least 85%, more preferably at least 90% and most preferably at least 95% homologous to a polypeptide having the sequence NWRKNSVKQNQDTTPSQGA (SEQ ID NO:1443) corresponding to amino acids 249-267 of HSHCGI_PEA_{—}3_P19 (SEQ ID NO:1245), wherein said first amino acid sequence and second amino acid sequence are contiguous and in a sequential order.

[3640] 2. An isolated polypeptide encoding for a tail of HSHCGI_PEA_{—}3_P19 (SEQ ID NO:1245), comprising a polypeptide being at least 70%, optionally at least about 80%, preferably at least about 85%, more preferably at least about 90% and most preferably at least about 95% homologous to the sequence NWRKNSVKQNQDTTPSQGA (SEQ ID NO:1443) in HSHCGI_PEA_{—}3_P19 (SEQ ID NO:1245).

[3641] It should be noted that the known protein sequence (TM31_HUMAN (SEQ ID NO:1242)) has one or more changes than the sequence given at the end of the application and named as being the amino acid sequence for TM31_HUMAN_V2 (SEQ ID NO:1241). These changes were previously known to occur and are listed in the table below.

TABLE 8
Changes to TM31_HUMAN_V2 (SEQ ID NO: 1241)

| SNP position(s) on amino | |
|---|---|
| acid sequence | Type of change |
| 38 | conflict |

[3642] The location of the variant protein was determined according to results from a number of different software programs and analyses, including analyses from SignalP and other specialized programs. The variant protein is believed to be located as follows with regard to the cell: intracellularly. The protein localization is believed to be intracellularly because neither of the trans-membrane region prediction programs predicted a trans-membrane region for this protein. In addition both signal-peptide prediction programs predict that this protein is a non-secreted protein.

[3643] Variant protein HSHCGI_PEA_{—}3_P19 (SEQ ID NO:1245) also has the following non-silent SNPs (Single Nucleotide Polymorphisms) as listed in Table 9, (given according to their position(s) on the amino acid sequence, with the alternative amino acid(s) listed; the last column indicates whether the SNP is known or not; the presence of known SNPs in variant protein HSHCGI_PEA_{—}3_P19 (SEQ ID NO:1245) sequence provides support for the deduced sequence of this variant protein according to the present invention).

TABLE 9
Amino acid mutations

| SNP position(s) on amino | Alternative | Previously |
|---|---|---|
| acid sequence | amino acid(s) | known SNP? |
| 38 | K -> | No |
| 61 | R -> | No |
| 118 | R -> C | Yes |
| 232 | V -> I | Yes |
| 261 | T -> M | Yes |

[3644] Variant protein HSHCGI_PEA_{—}3_P19 (SEQ ID NO:1245) is encoded by the following transcript(s): HSHCGI_PEA_{—}3_T11 (SEQ ID NO:1198), for which the sequence(s) is/are given at the end of the application. The coding portion of transcript HSHCGI_PEA_{—}3_T11 (SEQ ID NO:1198) is shown in bold; this coding portion starts at position 111 and ends at position 911. The transcript also has the following SNPs as listed in Table 10 (given according to their position on the nucleotide sequence, with the alternative nucleic acid listed; the last column indicates whether the SNP is known or not; the presence of known SNPs in variant protein HSHCGI_PEA_{—}3_P19 (SEQ ID NO:1245) sequence provides support for the deduced sequence of this variant protein according to the present invention).

TABLE 10
Nucleic acid SNPs

| SNP position on | Alternative | Previously |
|---|---|---|
| nucleotide sequence | nucleic acid | known SNP? |
| 24 | -> C | No |
| 60 | A -> | No |
| 61 | C -> | No |
| 197 | C -> T | Yes |
| 222 | A -> | No |
| 292 | G -> | No |
| 297 | -> G | No |
| 419 | C -> T | Yes |
| 462 | C -> T | Yes |
| 749 | G -> A | Yes |
| 804 | G -> A | Yes |
| 892 | C -> T | Yes |
| 913 | G -> A | Yes |
| 1206 | C -> A | No |
| 1304 | G -> A | Yes |
| 1355 | A -> C | Yes |
| 1524 | G -> A | Yes |
| 1697 | G -> A | Yes |
| 1702 | G -> C | Yes |
| 1790 | T -> C | No |
| 1938 | A -> G | Yes |

[3645] Variant protein HSHCGI_PEA_{—}3_P1 (SEQ ID NO:1246) according to the present invention has an amino acid sequence as given at the end of the application; it is encoded by transcript(s) HSHCGI_PEA_{—}3_T3 (SEQ ID NO:1190). The location of the variant protein was determined according to results from a number of different software programs and analyses, including analyses from SignalP and other specialized programs. The variant protein is believed to be located as follows with regard to the cell: intracellularly. The protein localization is believed to be intracellularly because neither of the trans-membrane region prediction programs predicted a trans-membrane region for this protein. In addition both signal-peptide prediction programs predict that this protein is a non-secreted protein.

[3646] Variant protein HSHCGI_PEA_{—}3_P1 (SEQ ID NO:1246) also has the following non-silent SNPs (Single Nucleotide Polymorphisms) as listed in Table 11, (given according to their position(s) on the amino acid sequence, with the alternative amino acid(s) listed; the last column indicates whether the SNP is known or not; the presence of known SNPs in variant protein HSHCGI_PEA_{—}3_P1 (SEQ ID NO:1246) sequence provides support for the deduced sequence of this variant protein according to the present invention).

TABLE 11
Amino acid mutations

| SNP position(s) on amino | Alternative | Previously |
|---|---|---|
| acid sequence | amino acid(s) | known SNP? |
| 38 | K -> | No |
| 61 | R -> | No |
| 118 | R -> C | Yes |
| 232 | V -> I | Yes |
| 256 | R -> | No |
| 388 | A -> E | No |
| 421 | E -> K | Yes |

[3647] Variant protein HSHCGI_PEA_{—}3_P1 (SEQ ID NO:1246) is encoded by the following transcript(s): HSHCGI_PEA_{—}3_T3 (SEQ ID NO:1190), for which the sequence(s) is/are given at the end of the application. The coding portion of transcript HSHCGI_PEA_{—}3_T3 (SEQ ID NO:1190) is shown in bold; this coding portion starts at position 139 and ends at position 1413. The transcript also has the following SNPs as listed in Table 12 (given according to their position on the nucleotide sequence, with the alternative nucleic acid listed; the last column indicates whether the SNP is known or not; the presence of known SNPs in variant protein HSHCGI_PEA_{—}3_P1 (SEQ ID NO:1246) sequence provides support for the deduced sequence of this variant protein according to the present invention).

TABLE 12
Nucleic acid SNPs

| SNP position on | Alternative | Previously |
|---|---|---|
| nucleotide sequence | nucleic acid | known SNP? |
| 88 | A -> | No |
| 89 | C -> | No |
| 225 | C -> T | Yes |
| 250 | A -> | No |
| 320 | G -> | No |
| 325 | -> G | No |
| 447 | C -> T | Yes |
| 490 | C -> T | Yes |
| 777 | G -> A | Yes |
| 832 | G -> A | Yes |
| 906 | A -> | No |
| 987 | C -> T | Yes |
| 1008 | G -> A | Yes |
| 1301 | C -> A | No |
| 1399 | G -> A | Yes |
| 1450 | A -> C | Yes |
| 1566 | G -> A | Yes |
| 1571 | G -> C | Yes |
| 1659 | T -> C | No |
| 1807 | A -> G | Yes |

[3648] Variant protein HSHCGI_PEA_{—}3_P4 (SEQ ID NO:1247) according to the present invention has an amino acid sequence as given at the end of the application; it is encoded by transcript(s) HSHCGI_PEA_{—}3_T5 (SEQ ID NO:1192). One or more alignments to one or more previously published protein sequences are given at the end of the application. A brief description of the relationship of the variant protein according to the present invention to each such aligned protein is as follows:

[3649] Comparison Report Between HSHCGI_PEA_{—}3_P4 (SEQ ID NO:1247) and TM31_HUMAN_V1 (SEQ ID NO:1240):

[3650] 1. An isolated chimeric polypeptide encoding for HSHCGI_PEA_{—}3_P4 (SEQ ID NO:1247), comprising a first amino acid sequence being at least 90% homologous to MASGQFVNKLQEEVICPICLDILQKPVTIDCGHNFCLKCITQIGETSCGFFKCPLCKTSVRKNAIRFNSLLRN LVEKIQALQASEVQSKRKEATCPRHQEMFHYFCEDDGKFLCFVCRESKDHKSHNVSLIEEAAQNYQGQIQ EQIQVLQQKEKETVQVKAQGVHRVDVFTDQVEHEKQRILTEFELLHQVLEEEKNFLLSRIYWLGHEGTEA GKHYVASTEPQLNDLKKLVDSLKTKQNMPPRQLLEDIKVVLCR corresponding to amino acids 1-256 of TM31_HUMAN_V1 (SEQ ID NO:1240), which also corresponds to amino acids 1-256 of HSHCGI_PEA_{—}3_P4 (SEQ ID NO:1247), and a second amino acid sequence being at least 70%, optionally at least 80%, preferably at least 85%, more preferably at least 90% and most preferably at least 95% homologous to a polypeptide having the sequence YDGPPQMYFAY (SEQ ID NO:1444) corresponding to amino acids 257-267 of HSHCGI_PEA_{—}3_P4 (SEQ ID NO:1247), wherein said first amino acid sequence and second amino acid sequence are contiguous and in a sequential order.

[3651] 2. An isolated polypeptide encoding for a tail of HSHCGI_PEA_{—}3_P4 (SEQ ID NO:1247), comprising a polypeptide being at least 70%, optionally at least about 80%, preferably at least about 85%, more preferably at least about 90% and most preferably at least about 95% homologous to the sequence YDGPPQMYFAY (SEQ ID NO:1444) in HSHCGI_PEA_{—}3_P4 (SEQ ID NO:1247).

[3652] It should be noted that the known protein sequence (TM31_HUMAN (SEQ ID NO:1242)) has one or more changes than the sequence given at the end of the application and named as being the amino acid sequence for TM31_HUMAN_V1 (SEQ ID NO:1240). These changes were previously known to occur and are listed in the table below.

TABLE 13
Changes to TM31_HUMAN_V1 (SEQ ID NO: 1240)

| SNP position(s) on amino | |
|---|---|
| acid sequence | Type of change |
| 38 | conflict |
| 63 | conflict |

[3653] The location of the variant protein was determined according to results from a number of different software programs and analyses, including analyses from SignalP and other specialized programs. The variant protein is believed to be located as follows with regard to the cell: intracellularly. The protein localization is believed to be intracellularly because neither of the trans-membrane region prediction programs predicted a trans-membrane region for this protein. In addition both signal-peptide prediction programs predict that this protein is a non-secreted protein.

[3654] Variant protein HSHCGI_PEA_{—}3_P4 (SEQ ID NO:1247) also has the following non-silent SNPs (Single Nucleotide Polymorphisms) as listed in Table 14, (given according to their position(s) on the amino acid sequence, with the alternative amino acid(s) listed; the last column indicates whether the SNP is known or not; the presence of known SNPs in variant protein HSHCGI_PEA_{—}3_P4 (SEQ ID NO:1247) sequence provides support for the deduced sequence of this variant protein according to the present invention).

TABLE 14
Amino acid mutations

| SNP position(s) on amino acid | Alternative | |
|---|---|---|
| sequence | amino acid(s) | Previously known SNP? |
| 38 | K -> | No |
| 61 | R -> | No |
| 118 | R -> C | Yes |
| 232 | V -> I | Yes |

[3655] Variant protein HSHCGI_PEA_{—}3_P4 (SEQ ID NO:1247) is encoded by the following transcript(s): HSHCGI_PEA_{—}3_T5 (SEQ ID NO:1192), for which the sequence(s) is/are given at the end of the application. The coding portion of transcript HSHCGI_PEA_{—}3_T5 (SEQ ID NO:1192) is shown in bold; this coding portion starts at position 139 and ends at position 939. The transcript also has the following SNPs as listed in Table 15 (given according to their position on the nucleotide sequence, with the alternative nucleic acid listed; the last column indicates whether the SNP is known or not; the presence of known SNPs in variant protein HSHCGI_PEA_{—}3_P4 (SEQ ID NO:1247) sequence provides support for the deduced sequence of this variant protein according to the present invention).

TABLE 15
Nucleic acid SNPs

| SNP position on nucleotide | Alternative | Previously |
|---|---|---|
| sequence | nucleic acid | known SNP? |
| 88 | A -> | No |
| 89 | C -> | No |
| 225 | C -> T | Yes |
| 250 | A -> | No |
| 320 | G -> | No |
| 325 | -> G | No |
| 447 | C -> T | Yes |
| 490 | C -> T | Yes |
| 777 | G -> A | Yes |
| 832 | G -> A | Yes |
| 953 | T -> C | Yes |
| 980 | A -> G | Yes |
| 1048 | T -> C | Yes |
| 1072 | T -> C | Yes |
| 1078 | C -> A | Yes |
| 1282 | T -> C | Yes |
| 1283 | G -> T | Yes |
| 1349 | C -> T | Yes |
| 1486 | G -> A | Yes |
| 1541 | G -> A | Yes |
| 1587 | G -> A | Yes |
| 1598 | G -> A | Yes |
| 1635 | G -> T | Yes |
| 1640 | C -> T | Yes |
| 1686 | C -> G | Yes |
| 1688 | A -> G | Yes |
| 1759 | A -> | No |
| 1840 | C -> T | Yes |
| 1861 | G -> A | Yes |
| 2154 | C -> A | No |
| 2252 | G -> A | Yes |
| 2303 | A -> C | Yes |
| 2472 | G -> A | Yes |
| 2645 | G -> A | Yes |
| 2650 | G -> C | Yes |
| 2738 | T -> C | No |
| 2886 | A -> G | Yes |

[3656] Variant protein HSHCGI_PEA_{—}3_P6 (SEQ ID NO:1248) according to the present invention has an amino acid sequence as given at the end of the application; it is encoded by transcript(s) HSHCGI_PEA_{—}3_T7 (SEQ ID NO:1194). One or more alignments to one or more previously published protein sequences are given at the end of the application. A brief description of the relationship of the variant protein according to the present invention to each such aligned protein is as follows:

[3657] Comparison Report Between HSHCGI_PEA_{—}3_P6 (SEQ ID NO:1248) and TM31_HUMAN_V1 (SEQ ID NO:1240):

[3658] 1. An isolated chimeric polypeptide encoding for HSHCGI_PEA_{—}3_P6 (SEQ ID NO:1248), comprising a first amino acid sequence being at least 90% homologous to MASGQFVNKLQEEVICPICLDILQKPVTIDCGHNFCLKCITQIGETSCGFFKCPLCKTSVRKNAIRFNSLLRN LVEKIQALQASEVQSKRKEATCPRHQEMFHYFCEDDGKFLCFVCRESKDHKSHNVSLIEEAAQNYQGQIQ EQIQVLQQKEKETVQVKAQGVHRVDVFTDQVEHEKQRILTEFELLHQVLEEEKNFLLSRIYWLGHEGTEA GKHYVASTEPQLNDLKKLVDSLKTKQNMPPRQLLEDIKVVLCR corresponding to amino acids 1-256 of TM31_HUMAN_V1 (SEQ ID NO:1240), which also corresponds to amino acids 1-256 of HSHCGI_PEA_{—}3_P6 (SEQ ID NO:1248), and a second amino acid sequence being at least 70%, optionally at least 80%, preferably at least 85%, more preferably at least 90% and most preferably at least 95% homologous to a polypeptide having the sequence PTPG (SEQ ID NO:1445) corresponding to amino acids 257-260 of HSHCGI_PEA_{—}3_P6 (SEQ ID NO:1248), wherein said first amino acid sequence and second amino acid sequence are contiguous and in a sequential order.

[3659] 2. An isolated polypeptide encoding for a tail of HSHCGI_PEA_{—}3_P6 (SEQ ID NO:1248), comprising a polypeptide being at least 70%, optionally at least about 80%, preferably at least about 85%, more preferably at least about 90% and most preferably at least about 95% homologous to the sequence PTPG (SEQ ID NO:1445) in HSHCGI_PEA_{—}3_P6 (SEQ ID NO:1248).

[3660] It should be noted that the known protein sequence (TM31_HUMAN (SEQ ID NO:1242)) has one or more changes than the sequence given at the end of the application and named as being the amino acid sequence for TM31_HUMAN_V1 (SEQ ID NO:1240). These changes were previously known to occur and are listed in the table below.

TABLE 16
Changes to TM31_HUMAN_V1 (SEQ ID NO: 1240)

| SNP position(s) on amino | |
|---|---|
| acid sequence | Type of change |
| 38 | conflict |
| 63 | conflict |

[3661] The location of the variant protein was determined according to results from a number of different software programs and analyses, including analyses from SignalP and other specialized programs. The variant protein is believed to be located as follows with regard to the cell: intracellularly. The protein localization is believed to be intracellularly because neither of the trans-membrane region prediction programs predicted a trans-membrane region for this protein. In addition both signal-peptide prediction programs predict that this protein is a non-secreted protein.

[3662] Variant protein HSHCGI_PEA_{—}3_P6 (SEQ ID NO:1248) also has the following non-silent SNPs (Single Nucleotide Polymorphisms) as listed in Table 17, (given according to their position(s) on the amino acid sequence, with the alternative amino acid(s) listed; the last column indicates whether the SNP is known or not; the presence of known SNPs in variant protein HSHCGI_PEA_{—}3_P6 (SEQ ID NO:1248) sequence provides support for the deduced sequence of this variant protein according to the present invention).

TABLE 17
Amino acid mutations

| SNP position(s) on amino acid | Alternative | |
|---|---|---|
| sequence | amino acid(s) | Previously known SNP? |
| 38 | K -> | No |
| 61 | R -> | No |
| 118 | R -> C | Yes |
| 232 | V -> I | Yes |

[3663] Variant protein HSHCGI_PEA_{—}3_P6 (SEQ ID NO:1248) is encoded by the following transcript(s): HSHCGI_PEA_{—}3_T7 (SEQ ID NO:1194), for which the sequence(s) is/are given at the end of the application. The coding portion of transcript HSHCGI_PEA_{—}3_T7 (SEQ ID NO:1194) is shown in bold; this coding portion starts at position 139 and ends at position 918. The transcript also has the following SNPs as listed in Table 18 (given according to their position on the nucleotide sequence, with the alternative nucleic acid listed; the last column indicates whether the SNP is known or not; the presence of known SNPs in variant protein HSHCGI_PEA_{—}3_P6 (SEQ ID NO:1248) sequence provides support for the deduced sequence of this variant protein according to the present invention).

TABLE 18
Nucleic acid SNPs

| SNP position on nucleotide | | Previously |
|---|---|---|
| sequence | Alternative nucleic acid | known SNP? |
| 88 | A -> | No |
| 89 | C -> | No |
| 225 | C -> T | Yes |
| 250 | A -> | No |
| 320 | G -> | No |
| 325 | -> G | No |
| 447 | C -> T | Yes |
| 490 | C -> T | Yes |
| 777 | G -> A | Yes |
| 832 | G -> A | Yes |
| 1185 | C -> A | No |
| 1283 | G -> A | Yes |
| 1334 | A -> C | Yes |
| 1503 | G -> A | Yes |
| 1676 | G -> A | Yes |
| 1681 | G -> C | Yes |
| 1769 | T -> C | No |
| 1917 | A -> G | Yes |

[3664] Variant protein HSHCGI_PEA_{—}3_P7 (SEQ ID NO:1249) according to the present invention has an amino acid sequence as given at the end of the application; it is encoded by transcript(s) HSHCGI_PEA_{—}3_T8 (SEQ ID NO:1195). One or more alignments to one or more previously published protein sequences are given at the end of the application. A brief description of the relationship of the variant protein according to the present invention to each such aligned protein is as follows:

[3665] Comparison Report Between HSHCGI_PEA_{—}3_P7 (SEQ ID NO:1249) and TM31_HUMAN_V1 (SEQ ID NO:1240):

[3666] 1. An isolated chimeric polypeptide encoding for HSHCGI_PEA_{—}3_P7 (SEQ ID NO:1249), comprising a first amino acid sequence being at least 90% homologous to MASGQFVNKLQEEVICPICLDILQKPVTIDCGHNFCLKCITQIGETSCGFFKCPLCKTSVRKNAIRFNSLLRN LVEKIQALQASEVQSKRKEATCPRHQEMFHYFCEDDGKFLCFVCRESKDHKSHNVSLIEEAAQNYQGQIQ EQIQVLQQKEKETVQVKAQGVHRVDVFTDQVEHEKQRILTEFELLHQVLEEEKNFLLSRIYWLGHEGTEA GKHYVASTEPQLNDLKKLVDSLKTKQNMPPRQLLEDIKVVLCRS corresponding to amino acids 1-257 of TM31_HUMAN_V1 (SEQ ID NO:1240), which also corresponds to amino acids 1-257 of HSHCGI_PEA_{—}3_P7 (SEQ ID NO:1249), and a second amino acid sequence being at least 70%, optionally at least 80%, preferably at least 85%, more preferably at least 90% and most preferably at least 95% homologous to a polypeptide having the sequence SFSHTSSPDLTNQLNHIFLEVKSFSFSTQPLFLWNWRKNSVKQNQDTTPSQGA (SEQ ID NO:1446) corresponding to amino acids 258-310 of HSHCGI_PEA_{—}3_P7 (SEQ ID NO:1249), wherein said first amino acid sequence and second amino acid sequence are contiguous and in a sequential order.

[3667] 2. An isolated polypeptide encoding for a tail of HSHCGI_PEA_{—}3_P7 (SEQ ID NO:1249), comprising a polypeptide being at least 70%, optionally at least about 80%, preferably at least about 85%, more preferably at least about 90% and most preferably at least about 95% homologous to the sequence SFSHTSSPDLTNQLNHIFLEVKSFSFSTQPLFLWNWRKNSVKQNQDTTPSQGA (SEQ ID NO:1446) in HSHCGI_PEA_{—}3_P7 (SEQ ID NO:1249).

[3668] It should be noted that the known protein sequence (TM31_HUMAN (SEQ ID NO:1242)) has one or more changes than the sequence given at the end of the application and named as being the amino acid sequence for TM31_HUMAN_V1 (SEQ ID NO:1240). These changes were previously known to occur and are listed in the table below.

TABLE 19
Changes to TM31_HUMAN_V1 (SEQ ID NO: 1240)

| SNP position(s) on amino | |
|---|---|
| acid sequence | Type of change |
| 38 | conflict |
| 63 | conflict |

[3669] The location of the variant protein was determined according to results from a number of different software programs and analyses, including analyses from SignalP and other specialized programs. The variant protein is believed to be located as follows with regard to the cell: intracellularly. The protein localization is believed to be intracellularly because neither of the trans-membrane region prediction programs predicted a trans-membrane region for this protein. In addition both signal-peptide prediction programs predict that this protein is a non-secreted protein.

[3670] Variant protein HSHCGI_PEA_{—}3_P7 (SEQ ID NO:1249) also has the following non-silent SNPs (Single Nucleotide Polymorphisms) as listed in Table 20, (given according to their position(s) on the amino acid sequence, with the alternative amino acid(s) listed; the last column indicates whether the SNP is known or not; the presence of known SNPs in variant protein HSHCGI_PEA_{—}3_P7 (SEQ ID NO:1249) sequence provides support for the deduced sequence of this variant protein according to the present invention).

TABLE 20
Amino acid mutations

| SNP position(s) on amino acid | Alternative | |
|---|---|---|
| sequence | amino acid(s) | Previously known SNP? |
| 38 | K -> | No |
| 61 | R -> | No |
| 118 | R -> C | Yes |
| 232 | V -> I | Yes |
| 277 | E -> | No |
| 304 | T -> M | Yes |

[3671] Variant protein HSHCGI_PEA_{—}3_P7 (SEQ ID NO:1249) is encoded by the following transcript(s): HSHCGI_PEA_{—}3_T8 (SEQ ID NO:1195), for which the sequence(s) is/are given at the end of the application. The coding portion of transcript HSHCGI_PEA_{—}3_T8 (SEQ ID NO:1195) is shown in bold; this coding portion starts at position 139 and ends at position 1068. The transcript also has the following SNPs as listed in Table 21 (given according to their position on the nucleotide sequence, with the alternative nucleic acid listed; the last column indicates whether the SNP is known or not; the presence of known SNPs in variant protein HSHCGI_PEA_{—}3_P7 (SEQ ID NO:1249) sequence provides support for the deduced sequence of this variant protein according to the present invention).

TABLE 21
Nucleic acid SNPs

| SNP position on nucleotide | | Previously |
|---|---|---|
| sequence | Alternative nucleic acid | known SNP? |
| 88 | A -> | No |
| 89 | C -> | No |
| 225 | C -> T | Yes |
| 250 | A -> | No |
| 320 | G -> | No |
| 325 | -> G | No |
| 447 | C -> T | Yes |
| 490 | C -> T | Yes |
| 777 | G -> A | Yes |
| 832 | G -> A | Yes |
| 968 | A -> | No |
| 1049 | C -> T | Yes |
| 1070 | G -> A | Yes |
| 1363 | C -> A | No |
| 1461 | G -> A | Yes |
| 1512 | A -> C | Yes |
| 1681 | G -> A | Yes |
| 1854 | G -> A | Yes |
| 1859 | G -> C | Yes |
| 1947 | T -> C | No |
| 2095 | A -> G | Yes |

[3672] Variant protein HSHCGI_PEA_{—}3_P8 (SEQ ID NO:1250) according to the present invention has an amino acid sequence as given at the end of the application; it is encoded by transcript(s) HSHCGI_PEA_{—}3_T9 (SEQ ID NO:1196). One or more alignments to one or more previously published protein sequences are given at the end of the application. A brief description of the relationship of the variant protein according to the present invention to each such aligned protein is as follows:

[3673] Comparison Report Between HSHCGI_PEA_{—}3_P8 (SEQ ID NO:1250) and TM31_HUMAN_V1 (SEQ ID NO:1240):

[3674] 1. An isolated chimeric polypeptide encoding for HSHCGI_PEA_{—}3_P8 (SEQ ID NO:1250), comprising a first amino acid sequence being at least 90% homologous to MASGQFVNKLQEEVICPICLDILQKPVTIDCGHNFCLKCITQIGETSCGFFKCPLCKTSVRKNAIRFNSLLRN LVEKIQALQASEVQSKRKEATCPRHQEMFHYFCEDDGKFLCFVCRESKDHKSHNVSLIEEAAQNYQGQIQ EQIQVLQQKEKETVQVKAQGVHRVDVFTDQVEHEKQRILTEFELLHQVLEEEKNFLLSRIYWLGHEGTEA GKHYVASTEPQLNDLKKLVDSLKTKQNMPPRQLLEDIKVVLCRSEEFQFLNPTPVPLELEKKLSEAKSRHD SITGSLKKFKDQLQADRKKDENRFFKSMNKNDMKSWGLLQKNNHKMNKTSEPGSSSAG corresponding to amino acids 1-342 of TM31_HUMAN_V1 (SEQ ID NO:1240), which also corresponds to amino acids 1-342 of HSHCGI_PEA_{—}3_P8 (SEQ ID NO:1250), and a second amino acid sequence being at least 70%, optionally at least 80%, preferably at least 85%, more preferably at least 90% and most preferably at least 95% homologous to a polypeptide having the sequence KSPVSEY corresponding to amino acids 343-349 of HSHCGI_PEA_{—}3_P8 (SEQ ID NO:1250), wherein said first amino acid sequence and second amino acid sequence are contiguous and in a sequential order.

[3675] 2. An isolated polypeptide encoding for a tail of HSHCGI_PEA_{—}3_P8 (SEQ ID NO:1250), comprising a polypeptide being at least 70%, optionally at least about 80%, preferably at least about 85%, more preferably at least about 90% and most preferably at least about 95% homologous to the sequence KSPVSEY in HSHCGI_PEA_{—}3_P8 (SEQ ID NO:1250).

[3676] It should be noted that the known protein sequence (TM31_HUMAN (SEQ ID NO:1242)) has one or more changes than the sequence given at the end of the application and named as being the amino acid sequence for TM31_HUMAN_V1 (SEQ ID NO:1240). These changes were previously known to occur and are listed in the table below.

TABLE 22
Changes to TM31_HUMAN_V1 (SEQ ID NO: 1240)

| SNP position(s) on amino | |
|---|---|
| acid sequence | Type of change |
| 38 | conflict |
| 63 | conflict |

[3677] The location of the variant protein was determined according to results from a number of different software programs and analyses, including analyses from SignalP and other specialized programs. The variant protein is believed to be located as follows with regard to the cell: intracellularly. The protein localization is believed to be intracellularly because neither of the trans-membrane region prediction programs predicted a trans-membrane region for this protein. In addition both signal-peptide prediction programs predict that this protein is a non-secreted protein.

[3678] Variant protein HSHCGI_PEA_{—}3_P8 (SEQ ID NO:1250) also has the following non-silent SNPs (Single Nucleotide Polymorphisms) as listed in Table 23, (given according to their position(s) on the amino acid sequence, with the alternative amino acid(s) listed; the last column indicates whether the SNP is known or not; the presence of known SNPs in variant protein HSHCGI_PEA_{—}3_P8 (SEQ ID NO:1250) sequence provides support for the deduced sequence of this variant protein according to the present invention).

TABLE 23
Amino acid mutations

| SNP position(s) on amino acid | Alternative | |
|---|---|---|
| sequence | amino acid(s) | Previously known SNP? |
| 38 | K -> | No |
| 61 | R -> | No |
| 118 | R -> C | Yes |
| 232 | V -> I | Yes |
| 256 | R -> | No |

[3679] Variant protein HSHCGI_PEA_{—}3_P8 (SEQ ID NO:1250) is encoded by the following transcript(s): HSHCGI_PEA_{—}3_T9 (SEQ ID NO:1196), for which the sequence(s) is/are given at the end of the application. The coding portion of transcript HSHCGI_PEA_{—}3_T9 (SEQ ID NO:1196) is shown in bold; this coding portion starts at position 139 and ends at position 1185. The transcript also has the following SNPs as listed in Table 24 (given according to their position on the nucleotide sequence, with the alternative nucleic acid listed; the last column indicates whether the SNP is known or not; the presence of known SNPs in variant protein HSHCGI_PEA_{—}3_P8 (SEQ ID NO:1250) sequence provides support for the deduced sequence of this variant protein according to the present invention).

TABLE 24
Nucleic acid SNPs

| SNP position on nucleotide | | Previously |
|---|---|---|
| sequence | Alternative nucleic acid | know SNP? |
| 88 | A -> | No |
| 89 | C -> | No |
| 225 | C -> T | Yes |
| 250 | A -> | No |
| 320 | G -> | No |
| 325 | -> G | No |
| 447 | C -> T | Yes |
| 490 | C -> T | Yes |
| 777 | G -> A | Yes |
| 832 | G -> A | Yes |
| 906 | A -> | No |
| 987 | C -> T | Yes |
| 1008 | G -> A | Yes |
| 1281 | A -> G | Yes |
| 1613 | C -> A | No |
| 1711 | G -> A | Yes |
| 1762 | A -> C | Yes |
| 1931 | G -> A | Yes |
| 2104 | G -> A | Yes |
| 2109 | G -> C | Yes |
| 2197 | T -> C | No |
| 2345 | A -> G | Yes |

[3680] Variant protein HSHCGI_PEA_{—}3_P9 (SEQ ID NO:1251) according to the present invention has an amino acid sequence as given at the end of the application; it is encoded by transcript(s) HSHCGI_PEA_{—}3_T10 (SEQ ID NO:1197). One or more alignments to one or more previously published protein sequences are given at the end of the application. A brief description of the relationship of the variant protein according to the present invention to each such aligned protein is as follows:

[3681] Comparison Report Between HSHCGI_PEA_{—}3_P9 (SEQ ID NO:1251) and TM31 HUMAN_V1 (SEQ ID NO:1240):

[3682] 1. An isolated chimeric polypeptide encoding for HSHCGI_PEA_{—}3_P9 (SEQ ID NO:1251), comprising a first amino acid sequence being at least 90% homologous to MASGQFVNKLQEEVICPICLDILQKPVTIDCGHNFCLKCITQIGETSCGFFKCPLCKTSVRKNAIRFNSLLRN LVEKIQALQASEVQSKRKEATCPRHQEMFHYFCEDDGKFLCFVCRESKDHKSHNVSLIEEAAQNYQGQIQ EQIQVLQQKEKETVQVKAQGVHRVDVFTDQVEHEKQRILTEFELLHQVLEEEKNFLLSRIYWLGHEGTEA GKHYVASTEPQLNDLKKLVDSLKTKQNMPPRQLLEDIKVVLCR corresponding to amino acids 1-256 of TM31_HUMAN_V1 (SEQ ID NO:1240), which also corresponds to amino acids 1-256 of HSHCGI_PEA_{—}3_P9 (SEQ ID NO:1251), and a second amino acid sequence being at least 70%, optionally at least 80%, preferably at least 85%, more preferably at least 90% and most preferably at least 95% homologous to a polypeptide having the sequence TGEKTQ (SEQ ID NO:1448) corresponding to amino acids 257-262 of HSHCGI_PEA_{—}3_P9 (SEQ ID NO:1251), wherein said first amino acid sequence and second amino acid sequence are contiguous and in a sequential order.

[3683] 2. An isolated polypeptide encoding for a tail of HSHCGI_PEA_{—}3_P9 (SEQ ID NO:1251), comprising a polypeptide being at least 70%, optionally at least about 80%, preferably at least about 85%, more preferably at least about 90% and most preferably at least about 95% homologous to the sequence TGEKTQ (SEQ ID NO:1448) in HSHCGI_PEA_{—}3_P9 (SEQ ID NO:1251).

[3684] It should be noted that the known protein sequence (TM31_HUMAN (SEQ ID NO:1242)) has one or more changes than the sequence given at the end of the application and named as being the amino acid sequence for TM31_HUMAN_V1 (SEQ ID NO:1240). These changes were previously known to occur and are listed in the table below.

TABLE 25
Changes to TM31_HUMAN_V1 (SEQ ID NO: 1240)

| SNP position(s) on amino | |
|---|---|
| acid sequence | Type of change |
| 38 | conflict |
| 63 | conflict |

[3685] The location of the variant protein was determined according to results from a number of different software programs and analyses, including analyses from SignalP and other specialized programs. The variant protein is believed to be located as follows with regard to the cell: intracellularly. The protein localization is believed to be intracellularly because neither of the trans-membrane region prediction programs predicted a trans-membrane region for this protein. In addition both signal-peptide prediction programs predict that this protein is a non-secreted protein.

[3686] Variant protein HSHCGI_PEA_{—}3_P9 (SEQ ID NO:1251) also has the following non-silent SNPs (Single Nucleotide Polymorphisms) as listed in Table 26, (given according to their position(s) on the amino acid sequence, with the alternative amino acid(s) listed; the last column indicates whether the SNP is known or not; the presence of known SNPs in variant protein HSHCGI_PEA_{—}3_P9 (SEQ ID NO:1251) sequence provides support for the deduced sequence of this variant protein according to the present invention).

TABLE 26
Amino acid mutations

| SNP position(s) on amino acid | | Previously |
|---|---|---|
| sequence | Alternative amino acid(s) | know SNP? |
| 38 | K -> | No |
| 61 | R -> | No |
| 118 | R -> C | Yes |
| 232 | V -> I | Yes |

[3687] Variant protein HSHCGI_PEA_{—}3_P9 (SEQ ID NO:1251) is encoded by the following transcript(s): HSHCGI_PEA_{—}3_T10 (SEQ ID NO:1197), for which the sequence(s) is/are given at the end of the application. The coding portion of transcript HSHCGI_PEA_{—}3_T10 (SEQ ID NO:1197) is shown in bold; this coding portion starts at position 139 and ends at position 924. The transcript also has the following SNPs as listed in Table 27 (given according to their position on the nucleotide sequence, with the alternative nucleic acid listed; the last column indicates whether the SNP is known or not; the presence of known SNPs in variant protein HSHCGI_PEA_{—}3_P9 (SEQ ID NO:1251) sequence provides support for the deduced sequence of this variant protein according to the present invention).

TABLE 27
Nucleic acid SNPs

| SNP position on nucleotide | | Previously |
|---|---|---|
| sequence | Alternative nucleic acid | known SNP? |
| 88 | A -> | No |
| 89 | C -> | No |
| 225 | C -> T | Yes |
| 250 | A -> | No |
| 320 | G -> | No |
| 325 | -> G | No |
| 447 | C -> T | Yes |
| 490 | C -> T | Yes |
| 777 | G -> A | Yes |
| 832 | G -> A | Yes |
| 943 | C -> T | Yes |
| 964 | G -> A | Yes |
| 1257 | C -> A | No |
| 1355 | G -> A | Yes |
| 1406 | A -> C | Yes |
| 1575 | G -> A | Yes |
| 1748 | G -> A | Yes |
| 1753 | G -> C | Yes |
| 1841 | T -> C | No |
| 1989 | A -> G | Yes |

[3688] Variant protein HSHCGI_PEA_{—}3_P12 (SEQ ID NO:1252) according to the present invention has an amino acid sequence as given at the end of the application; it is encoded by transcript(s) HSHCGI_PEA_{—}3_T14 (SEQ ID NO:1201). One or more alignments to one or more previously published protein sequences are given at the end of the application. A brief description of the relationship of the variant protein according to the present invention to each such aligned protein is as follows:

[3689] Comparison Report Between HSHCGI_PEA_{—}3_P12 (SEQ ID NO:1252) and TM31_HUMAN (SEQ ID NO:1242):

[3690] 1. An isolated chimeric polypeptide encoding for HSHCGI_PEA_{—}3_P12 (SEQ ID NO:1252), comprising a first amino acid sequence being at least 90% homologous to MNKNDMKSWGLLQKNNHKMNKTSEPGSSSAGGRTTSGPPNHHSSAPSHSLFRASSAGKVTFPVCLLASY DEISGQGASSQDTKTFDVALSEELHAALSEWLTAIRAWFCEVPSS corresponding to amino acids 312-425 of TM31_HUMAN (SEQ ID NO:1242), which also corresponds to amino acids 1-114 of HSHCGI_PEA_{—}3_P12 (SEQ ID NO:1252).

[3691] The location of the variant protein was determined according to results from a number of different software programs and analyses, including analyses from SignalP and other specialized programs. The variant protein is believed to be located as follows with regard to the cell: intracellularly. The protein localization is believed to be intracellularly because neither of the trans-membrane region prediction programs predicted a trans-membrane region for this protein. In addition both signal-peptide prediction programs predict that this protein is a non-secreted protein.

[3692] Variant protein HSHCGI_PEA_{—}3_P12 (SEQ ID NO:1252) is encoded by the following transcript(s): HSHCGI_PEA_{—}3_T14 (SEQ ID NO:1201), for which the sequence(s) is/are given at the end of the application. The coding portion of transcript HSHCGI_PEA_{—}3_T14 (SEQ ID NO:1201) is shown in bold; this coding portion starts at position 1795 and ends at position 2136. The transcript also has the following SNPs as listed in Table 28 (given according to their position on the nucleotide sequence, with the alternative nucleic acid listed; the last column indicates whether the SNP is known or not; the presence of known SNPs in variant protein HSHCGI_PEA_{—}3_P12 (SEQ ID NO:1252) sequence provides support for the deduced sequence of this variant protein according to the present invention).

TABLE 28
Nucleic acid SNPs

| SNP position on nucleotide | Alternative | |
|---|---|---|
| sequence | nucleic acid | Previously known SNP? |
| 348 | C -> T | Yes |
| 442 | G -> T | Yes |
| 466 | G -> | Yes |
| 468 | G -> | Yes |
| 823 | T -> C | Yes |
| 850 | A -> G | Yes |
| 918 | T -> C | Yes |
| 942 | T -> C | Yes |
| 948 | C -> A | Yes |
| 1152 | T -> C | Yes |
| 1153 | G -> T | Yes |
| 1219 | C -> T | Yes |
| 1356 | G -> A | Yes |
| 1411 | G -> A | Yes |
| 1457 | G -> A | Yes |
| 1468 | G -> A | Yes |
| 1505 | G -> T | Yes |
| 1510 | C -> T | Yes |
| 1556 | C -> G | Yes |
| 1558 | A -> G | Yes |
| 1629 | A -> | No |
| 1710 | C -> T | Yes |
| 1731 | G -> A | Yes |
| 2024 | C -> A | No |
| 2122 | G -> A | Yes |
| 2173 | A -> C | Yes |
| 2342 | G -> A | Yes |
| 2515 | G -> A | Yes |
| 2520 | G -> C | Yes |
| 2608 | T -> C | No |
| 2756 | A -> G | Yes |

[3693] Variant protein HSHCGI_PEA_{—}3_P13 (SEQ ID NO:1253) according to the present invention has an amino acid sequence as given at the end of the application; it is encoded by transcript(s) HSHCGI_PEA_{—}3_T17 (SEQ ID NO:1203). The location of the variant protein was determined according to results from a number of different software programs and analyses, including analyses from SignalP and other specialized programs. The variant protein is believed to be located as follows with regard to the cell: intracellularly. The protein localization is believed to be intracellularly because neither of the trans-membrane region prediction programs predicted a trans-membrane region for this protein. In addition both signal-peptide prediction programs predict that this protein is a non-secreted protein.

[3694] Variant protein HSHCGI_PEA_{—}3_P13 (SEQ ID NO:1253) is encoded by the following transcript(s): HSHCGI_PEA_{—}3_T17 (SEQ ID NO:1203), for which the sequence(s) is/are given at the end of the application. The coding portion of transcript HSHCGI_PEA_{—}3_T17 (SEQ ID NO:1203) is shown in bold; this coding portion starts at position 585 and ends at position 914. The transcript also has the following SNPs as listed in Table 29 (given according to their position on the nucleotide sequence, with the alternative nucleic acid listed; the last column indicates whether the SNP is known or not; the presence of known SNPs in variant protein HSHCGI_PEA_{—}3_P13 (SEQ ID NO:1253) sequence provides support for the deduced sequence of this variant protein according to the present invention).

TABLE 29
Nucleic acid SNPs

| SNP position on | | |
|---|---|---|
| nucleotide sequence | Alternative nucleic acid | Previously known SNP? |
| 606 | A -> G | Yes |
| 938 | C -> A | No |
| 1036 | G -> A | Yes |
| 1087 | A -> C | Yes |
| 1256 | G -> A | Yes |
| 1429 | G -> A | Yes |
| 1434 | G -> C | Yes |
| 1522 | T -> C | No |
| 1670 | A -> G | Yes |

[3695] Variant protein HSHCGI_PEA_{—}3_P14 (SEQ ID NO:1254) according to the present invention has an amino acid sequence as given at the end of the application; it is encoded by transcript(s) HSHCGI_PEA_{—}3_T18 (SEQ ID NO:1204). One or more alignments to one or more previously published protein sequences are given at the end of the application. A brief description of the relationship of the variant protein according to the present invention to each such aligned protein is as follows:

[3696] Comparison Report Between HSHCGI_PEA_{—}3_P14 (SEQ ID NO:1254) and TM31_HUMAN_V1 (SEQ ID NO:1240):

[3697] 1. An isolated chimeric polypeptide encoding for HSHCGI_PEA_{—}3_P14 (SEQ ID NO:1254), comprising a first amino acid sequence being at least 90% homologous to MASGQFVNKLQEEVICPICLDILQKPVTIDCGHNFCLKCITQIGETSCGFFKCPLCKTSVRKNAIRFNSLLRN LVEKIQALQASEVQSKRKEATCPRHQEMFHYFCEDDGKFLCFVCRESKDHKSHNVSLIEEAAQNYQGQIQ EQIQVLQQKEKETVQVKAQGVHRVDVFTDQVEHEKQRILTEFELLHQVLEEEKNFLLSRIYWLGHEGTEA GKHYVASTEPQLNDLKKLVDSLKTKQNMPPRQLLEDIKVVLCRSEEFQFLNPTPVPLELEKKLSEAKSRHD SITGSLKKFKDQLQADRKKDENRFFKSMNKNDMKS corresponding to amino acids 1-319 of TM31_HUMAN_V1 (SEQ ID NO:1240), which also corresponds to amino acids 1-319 of HSHCGI_PEA_{—}3_P14 (SEQ ID NO:1254), and a second amino acid sequence being at least 70%, optionally at least 80%, preferably at least 85%, more preferably at least 90% and most preferably at least 95% homologous to a polypeptide having the sequence CK corresponding to amino acids 320-321 of HSHCGI_PEA_{—}3_P14 (SEQ ID NO:1254), wherein said first amino acid sequence and second amino acid sequence are contiguous and in a sequential order.

[3698] It should be noted that the known protein sequence (TM31_HUMAN (SEQ ID NO:1242)) has one or more changes than the sequence given at the end of the application and named as being the amino acid sequence for TM31_HUMAN_V1 (SEQ ID NO:1240). These changes were previously known to occur and are listed in the table below.

TABLE 30
Changes to TM31_HUMAN_V1 (SEQ ID NO: 1240)

| SNP position(s) on amino | |
|---|---|
| acid sequence | Type of change |
| 38 | conflict |
| 63 | conflict |

[3699] The location of the variant protein was determined according to results from a number of different software programs and analyses, including analyses from SignalP and other specialized programs. The variant protein is believed to be located as follows with regard to the cell: intracellularly. The protein localization is believed to be intracellularly because neither of the trans-membrane region prediction programs predicted a trans-membrane region for this protein. In addition both signal-peptide prediction programs predict that this protein is a non-secreted protein.

[3700] Variant protein HSHCGI_PEA_{—}3_P14 (SEQ ID NO:1254) also has the following non-silent SNPs (Single Nucleotide Polymorphisms) as listed in Table 31, (given according to their position(s) on the amino acid sequence, with the alternative amino acid(s) listed; the last column indicates whether the SNP is known or not; the presence of known SNPs in variant protein HSHCGI_PEA_{—}3_P14 (SEQ ID NO:1254) sequence provides support for the deduced sequence of this variant protein according to the present invention).

TABLE 31
Amino acid mutations

| SNP position(s) on | | |
|---|---|---|
| amino acid sequence | Alternative amino acid(s) | Previously known SNP? |
| 38 | K -> | No |
| 61 | R -> | No |
| 118 | R -> C | Yes |
| 232 | V -> I | Yes |
| 256 | R -> | No |

[3701] Variant protein HSHCGI_PEA_{—}3_P14 (SEQ ID NO:1254) is encoded by the following transcript(s): HSHCGI_PEA_{—}3_T18 (SEQ ID NO:1204), for which the sequence(s) is/are given at the end of the application. The coding portion of transcript HSHCGI_PEA_{—}3_T18 (SEQ ID NO:1204) is shown in bold; this coding portion starts at position 139 and ends at position 1101. The transcript also has the following SNPs as listed in Table 32 (given according to their position on the nucleotide sequence, with the alternative nucleic acid listed; the last column indicates whether the SNP is known or not; the presence of known SNPs in variant protein HSHCGI_PEA_{—}3_P14 (SEQ ID NO:1254) sequence provides support for the deduced sequence of this variant protein according to the present invention).

TABLE 32
Nucleic acid SNPs

| SNP position on | | |
|---|---|---|
| nucleotide sequence | Alternative nucleic acid | Previously known SNP? |
| 88 | A -> | No |
| 89 | C -> | No |
| 225 | C -> T | Yes |
| 250 | A -> | No |
| 320 | G -> | No |
| 325 | -> G | No |
| 447 | C -> T | Yes |
| 490 | C -> T | Yes |
| 777 | G -> A | Yes |
| 832 | G -> A | Yes |
| 906 | A -> | No |
| 987 | C -> T | Yes |
| 1008 | G -> A | Yes |
| 1320 | A -> G | Yes |
| 1416 | C -> G | Yes |

[3702] Variant protein HSHCGI_PEA_{—}3_P15 (SEQ ID NO:1255) according to the present invention has an amino acid sequence as given at the end of the application; it is encoded by transcript(s) HSHCGI_PEA_{—}3_T21 (SEQ ID NO:1207). The location of the variant protein was determined according to results from a number of different software programs and analyses, including analyses from SignalP and other specialized programs. The variant protein is believed to be located as follows with regard to the cell: intracellularly. The protein localization is believed to be intracellularly because neither of the trans-membrane region prediction programs predicted a trans-membrane region for this protein. In addition both signal-peptide prediction programs predict that this protein is a non-secreted protein.

[3703] Variant protein HSHCGI_PEA_{—}3_P15 (SEQ ID NO:1255) is encoded by the following transcript(s): HSHCGI_PEA_{—}3_T21 (SEQ ID NO:1207), for which the sequence(s) is/are given at the end of the application. The coding portion of transcript HSHCGI_PEA_{—}3_T21 (SEQ ID NO:1207) is shown in bold; this coding portion starts at position 338 and ends at position 505. The transcript also has the following SNPs as listed in Table 33 (given according to their position on the nucleotide sequence, with the alternative nucleic acid listed; the last column indicates whether the SNP is known or not; the presence of known SNPs in variant protein HSHCGI_PEA_{—}3_P15 (SEQ ID NO:1255) sequence provides support for the deduced sequence of this variant protein according to the present invention).

TABLE 33
Nucleic acid SNPs

| SNP position on | | |
|---|---|---|
| nucleotide sequence | Alternative nucleic acid | Previously known SNP? |
| 15 | A -> G | Yes |
| 361 | A -> G | Yes |
| 377 | C -> T | Yes |
| 429 | C -> A | Yes |
| 606 | G -> A | Yes |
| 902 | T -> C | Yes |
| 1104 | G -> C | Yes |
| 1473 | T -> C | Yes |
| 1853 | A -> G | Yes |
| 2005 | C -> A | Yes |
| 2028 | C -> T | Yes |
| 2080 | A -> G | Yes |

[3704] Variant protein HSHCGI_PEA_{—}3_P16 (SEQ ID NO:1256) according to the present invention has an amino acid sequence as given at the end of the application; it is encoded by transcript(s) HSHCGI_PEA_{—}3_T23 (SEQ ID NO:1209). One or more alignments to one or more previously published protein sequences are given at the end of the application. A brief description of the relationship of the variant protein according to the present invention to each such aligned protein is as follows:

[3705] Comparison Report Between HSHCGI_PEA_{—}3_P16 (SEQ ID NO:1256) and TM31_HUMAN_V1:

[3706] 1. An isolated chimeric polypeptide encoding for HSHCGI_PEA_{—}3_P16 (SEQ ID NO:1256), comprising a first amino acid sequence being at least 90% homologous to MASGQFVNKLQEEVICPICLDILQKPVTIDCGHNFCLKCITQIGETSCGFFKCPLCKTSVRKNAIRFNSLLRN LVEKIQALQASEVQSKRKEATCPRHQEMFHYFCEDDGKFLCFVCRESKDHKSHNVSLIEEAAQNYQGQIQ EQIQVLQQKEKETVQVKAQGVHRVDVFT corresponding to amino acids 1-171 of TM31_HUMAN_V1 (SEQ ID NO:1240), which also corresponds to amino acids 1-171 of HSHCGI_PEA_{—}3_P16 (SEQ ID NO:1256), and a second amino acid sequence being at least 70%, optionally at least 80%, preferably at least 85%, more preferably at least 90% and most preferably at least 95% homologous to a polypeptide having the sequence VRKTPSHDLWKQKHLCQSSWNPLLH (SEQ ID NO:1449) corresponding to amino acids 172-196 of HSHCGI_PEA_{—}3_P16 (SEQ ID NO:1256), wherein said first amino acid sequence and second amino acid sequence are contiguous and in a sequential order.

[3707] 2. An isolated polypeptide encoding for a tail of HSHCGI_PEA_{—}3_P16 (SEQ ID NO:1256), comprising a polypeptide being at least 70%, optionally at least about 80%, preferably at least about 85%, more preferably at least about 90% and most preferably at least about 95% homologous to the sequence VRKTPSHDLWKQKHLCQSSWNPLLH (SEQ ID NO:1449) in HSHCGI_PEA_{—}3_P16 (SEQ ID NO:1256).

[3708] It should be noted that the known protein sequence (TM31_HUMAN (SEQ ID NO:1242)) has one or more changes than the sequence given at the end of the application and named as being the amino acid sequence for TM31_HUMAN_V1 (SEQ ID NO:1240). These changes were previously known to occur and are listed in the table below.

TABLE 34
Changes to TM31_HUMAN_V1 (SEQ ID NO: 1240)

| SNP position(s) on amino | |
|---|---|
| acid sequence | Type of change |
| 38 | conflict |
| 63 | conflict |

[3709] The location of the variant protein was determined according to results from a number of different software programs and analyses, including analyses from SignalP and other specialized programs. The variant protein is believed to be located as follows with regard to the cell: intracellularly. The protein localization is believed to be intracellularly because neither of the trans-membrane region prediction programs predicted a trans-membrane region for this protein. In addition both signal-peptide prediction programs predict that this protein is a non-secreted protein.

[3710] Variant protein HSHCGI_PEA_{—}3_P16 (SEQ ID NO:1256) also has the following non-silent SNPs (Single Nucleotide Polymorphisms) as listed in Table 35, (given according to their position(s) on the amino acid sequence, with the alternative amino acid(s) listed; the last column indicates whether the SNP is known or not; the presence of known SNPs in variant protein HSHCGI_PEA_{—}3_P16 (SEQ ID NO:1256) sequence provides support for the deduced sequence of this variant protein according to the present invention).

TABLE 35
Amino acid mutations

| SNP position(s) on | | |
|---|---|---|
| amino acid sequence | Alternative amino acid(s) | Previously known SNP? |
| 38 | K -> | No |
| 61 | R -> | No |
| 118 | R -> C | Yes |

[3711] Variant protein HSHCGI_PEA_{—}3_P16 (SEQ ID NO:1256) is encoded by the following transcript(s): HSHCGI_PEA_{—}3_T23 (SEQ ID NO:1209), for which the sequence(s) is/are given at the end of the application. The coding portion of transcript HSHCGI_PEA_{—}3_T23 (SEQ ID NO:1209) is shown in bold; this coding portion starts at position 139 and ends at position 726. The transcript also has the following SNPs as listed in Table 36 (given according to their position on the nucleotide sequence, with the alternative nucleic acid listed; the last column indicates whether the SNP is known or not; the presence of known SNPs in variant protein HSHCGI_PEA_{—}3_P16 (SEQ ID NO:1256) sequence provides support for the deduced sequence of this variant protein according to the present invention).

TABLE 36
Nucleic acid SNPs

| SNP position on | | |
|---|---|---|
| nucleotide sequence | Alternative nucleic acid | Previously known SNP? |
| 88 | A -> | No |
| 89 | C -> | No |
| 225 | C -> T | Yes |
| 250 | A -> | No |
| 320 | G -> | No |
| 325 | -> G | No |
| 447 | C -> T | Yes |
| 490 | C -> T | Yes |
| 769 | T -> G | Yes |
| 947 | G -> A | Yes |
| 1000 | C -> A | Yes |
| 1061 | C -> A | Yes |

[3712] Variant protein HSHCGI_PEA_{—}3_P20 (SEQ ID NO:1257) according to the present invention has an amino acid sequence as given at the end of the application; it is encoded by transcript(s) HSHCGI_PEA_{—}3_T1 (SEQ ID NO:1188) and HSHCGI_PEA_{—}3_T2 (SEQ ID NO:1189). The location of the variant protein was determined according to results from a number of different software programs and analyses, including analyses from SignalP and other specialized programs. The variant protein is believed to be located as follows with regard to the cell: intracellularly. The protein localization is believed to be intracellularly because neither of the trans-membrane region prediction programs predicted a trans-membrane region for this protein. In addition both signal-peptide prediction programs predict that this protein is a non-secreted protein.

[3713] Variant protein HSHCGI_PEA_{—}3_P20 (SEQ ID NO:1257) also has the following non-silent SNPs (Single Nucleotide Polymorphisms) as listed in Table 37, (given according to their position(s) on the amino acid sequence, with the alternative amino acid(s) listed; the last column indicates whether the SNP is known or not; the presence of known SNPs in variant protein HSHCGI_PEA_{—}3_P20 (SEQ ID NO:1257) sequence provides support for the deduced sequence of this variant protein according to the present invention).

TABLE 37
Amino acid mutations

| SNP position(s) on | | |
|---|---|---|
| amino acid sequence | Alternative amino acid(s) | Previously known SNP? |
| 38 | K -> | No |
| 61 | R -> | No |
| 118 | R -> C | Yes |
| 232 | V -> I | Yes |
| 256 | R -> | No |
| 388 | A -> E | No |
| 421 | E -> K | Yes |

[3714] Variant protein HSHCGI_PEA_{—}3_P20 (SEQ ID NO:1257) is encoded by the following transcript(s): HSHCGI_PEA_{—}3_T1 (SEQ ID NO:1188) and HSHCGI_PEA_{—}3_T2 (SEQ ID NO:1189), for which the sequence(s) is/are given at the end of the application.

[3715] The coding portion of transcript HSHCGI_PEA_{—}3_T1 (SEQ ID NO:1188) is shown in bold; this coding portion starts at position 139 and ends at position 1413. The transcript also has the following SNPs as listed in Table 38 (given according to their position on the nucleotide sequence, with the alternative nucleic acid listed; the last column indicates whether the SNP is known or not; the presence of known SNPs in variant protein HSHCGI_PEA_{—}3_P20 (SEQ ID NO:1257) sequence provides support for the deduced sequence of this variant protein according to the present invention).

TABLE 38
Nucleic acid SNPs

| SNP position on | | |
|---|---|---|
| nucleotide sequence | Alternative nucleic acid | Previously known SNP? |
| 88 | A -> | No |
| 89 | C -> | No |
| 225 | C -> T | Yes |
| 250 | A -> | No |
| 320 | G -> | No |
| 325 | -> G | No |
| 447 | C -> T | Yes |
| 490 | C -> T | Yes |
| 777 | G -> A | Yes |
| 832 | G -> A | Yes |
| 906 | A -> | No |
| 987 | C -> T | Yes |
| 1008 | G -> A | Yes |
| 1301 | C -> A | No |
| 1399 | G -> A | Yes |
| 1450 | A -> C | Yes |
| 1619 | G -> A | Yes |
| 1792 | G -> A | Yes |
| 1797 | G -> C | Yes |
| 1885 | T -> C | No |
| 2033 | A -> G | Yes |

[3716] The coding portion of transcript HSHCGI_PEA_{—}3_T2 (SEQ ID NO:1189) is shown in bold; this coding portion starts at position 112 and ends at position 1386. The transcript also has the following SNPs as listed in Table 39 (given according to their position on the nucleotide sequence, with the alternative nucleic acid listed; the last column indicates whether the SNP is known or not; the presence of known SNPs in variant protein HSHCGI_PEA_{—}3_P20 (SEQ ID NO:1257) sequence provides support for the deduced sequence of this variant protein according to the present invention).

TABLE 39
Nucleic acid SNPs

| SNP position on | | |
|---|---|---|
| nucleotide sequence | Alternative nucleic acid | Previously known SNP? |
| 61 | A -> | No |
| 62 | C -> | No |
| 198 | C -> T | Yes |
| 223 | A -> | No |
| 293 | G -> | No |
| 298 | -> G | No |
| 420 | C -> T | Yes |
| 463 | C -> T | Yes |
| 750 | G -> A | Yes |
| 805 | G -> A | Yes |
| 879 | A -> | No |
| 960 | C -> T | Yes |
| 981 | G -> A | Yes |
| 1274 | C -> A | No |
| 1372 | G -> A | Yes |
| 1423 | A -> C | Yes |
| 1592 | G -> A | Yes |
| 1765 | G -> A | Yes |
| 1770 | G -> C | Yes |
| 1858 | T -> C | No |
| 2006 | A -> G | Yes |

[3717] Variant protein HSHCGI_PEA_{—}3_P21 (SEQ ID NO:1258) according to the present invention has an amino acid sequence as given at the end of the application; it is encoded by transcript(s) HSHCGI_PEA_{—}3_T4 (SEQ ID NO:1191). One or more alignments to one or more previously published protein sequences are given at the end of the application. A brief description of the relationship of the variant protein according to the present invention to each such aligned protein is as follows:

[3718] Comparison Report Between HSHCGI_PEA_{—}3_P21 (SEQ ID NO:1258) and TM31_HUMAN:

[3719] 1. An isolated chimeric polypeptide encoding for HSHCGI_PEA_{—}3_P21 (SEQ ID NO:1258), comprising a first amino acid sequence being at least 70%, optionally at least 80%, preferably at least 85%, more preferably at least 90% and most preferably at least 95% homologous to a polypeptide having the sequence MHHSDWGNIMWIFQMSPLQNFRKEERNQ (SEQ ID NO:1450) corresponding to amino acids 1-28 of HSHCGI_PEA_{—}3_P21 (SEQ ID NO:1258), and a second amino acid sequence being at least 90% homologous to FLCFVCRESKDHKSHNVSLIEEAAQNYQGQIQEQIQVLQQKEKETVQVKAQGVHRVDVFTDQVEHEKQR1 LTEFELLHQVLEEEKNFLLSRIYWLGHEGTEAGKHYVASTEPQLNDLKKLVDSLKTKQNMPPRQLLEDIK VVLCRSEEFQFLNPTPVPLELEKKLSEAKSRHDSITGSLKKFKDQLQADRKKDENRFFKSMNKNDMKSWG LLQKNNHKMNKTSEPGSSSAGGRTTSGPPNHHSSAPSHSLFRASSAGKVTFPVCLLASYDEISGQGASSQD TKTFDVALSEELHAALSEWLTAIRAWFCEVPSS corresponding to amino acids 112-425 of TM31_HUMAN (SEQ ID NO:1242), which also corresponds to amino acids 29-342 of HSHCGI_PEA_{—}3_P21 (SEQ ID NO:1258), wherein said first amino acid sequence and second amino acid sequence are contiguous and in a sequential order.

[3720] 2. An isolated polypeptide encoding for a head of HSHCGI_PEA_{—}3_P21 (SEQ ID NO:1258), comprising a polypeptide being at least 70%, optionally at least about 80%, preferably at least about 85%, more preferably at least about 90% and most preferably at least about 95% homologous to the sequence MHHSDWGNIMWIFQMSPLQNFRKEERNQ (SEQ ID NO:1450) of HSHCGI_PEA_{—}3_P21 (SEQ ID NO:1258).

[3721] The location of the variant protein was determined according to results from a number of different software programs and analyses, including analyses from SignalP and other specialized programs. The variant protein is believed to be located as follows with regard to the cell: intracellularly. The protein localization is believed to be intracellularly because neither of the trans-membrane region prediction programs predicted a trans-membrane region for this protein. In addition both signal-peptide prediction programs predict that this protein is a non-secreted protein.

[3722] Variant protein HSHCGI_PEA_{—}3_P21 (SEQ ID NO:1258) also has the following non-silent SNPs (Single Nucleotide Polymorphisms) as listed in Table 40, (given according to their position(s) on the amino acid sequence, with the alternative amino acid(s) listed; the last column indicates whether the SNP is known or not; the presence of known SNPs in variant protein HSHCGI_PEA_{—}3_P21 (SEQ ID NO:1258) sequence provides support for the deduced sequence of this variant protein according to the present invention).

TABLE 40
Amino acid mutations

| SNP position(s) on | | |
|---|---|---|
| amino acid sequence | Alternative amino acid(s) | Previously known SNP? |
| 23 | K -> | No |
| 35 | R -> C | Yes |
| 149 | V -> I | Yes |
| 173 | R -> | No |
| 305 | A -> E | No |
| 338 | E -> K | Yes |

[3723] Variant protein HSHCGI_PEA_{—}3_P21 (SEQ ID NO:1258) is encoded by the following transcript(s): HSHCGI_PEA_{—}3_T4 (SEQ ID NO:1191), for which the sequence(s) is/are given at the end of the application. The coding portion of transcript HSHCGI_PEA_{—}3_T4 (SEQ ID NO:1191) is shown in bold; this coding portion starts at position 252 and ends at position 1277. The transcript also has the following SNPs as listed in Table 41 (given according to their position on the nucleotide sequence, with the alternative nucleic acid listed; the last column indicates whether the SNP is known or not; the presence of known SNPs in variant protein HSHCGI_PEA_{—}3_P21 (SEQ ID NO:1258) sequence provides support for the deduced sequence of this variant protein according to the present invention).

TABLE 41
Nucleic acid SNPs

| SNP position on | | |
|---|---|---|
| nucleotide sequence | Alternative nucleic acid | Previously known SNP? |
| 88 | A -> | No |
| 89 | C -> | No |
| 225 | C -> T | Yes |
| 250 | A -> | No |
| 320 | G -> | No |
| 325 | -> G | No |
| 354 | C -> T | Yes |
| 641 | G -> A | Yes |
| 696 | G -> A | Yes |
| 770 | A -> | No |
| 851 | C -> T | Yes |
| 872 | G -> A | Yes |
| 1165 | C -> A | No |
| 1263 | G -> A | Yes |
| 1314 | A -> C | Yes |
| 1483 | G -> A | Yes |
| 1656 | G -> A | Yes |
| 1661 | G -> C | Yes |
| 1749 | T -> C | No |
| 1897 | A -> G | Yes |

[3724] Variant protein HSHCGI_PEA_{—}3_P22 (SEQ ID NO:1259) according to the present invention has an amino acid sequence as given at the end of the application; it is encoded by transcript(s) HSHCGI_PEA_{—}3_T6 (SEQ ID NO:1193). One or more alignments to one or more previously published protein sequences are given at the end of the application. A brief description of the relationship of the variant protein according to the present invention to each such aligned protein is as follows:

[3725] Comparison Report Between HSHCGI_PEA_{—}3_P22 (SEQ ID NO:1259) and TM31_HUMAN:

[3726] 1. An isolated chimeric polypeptide encoding for HSHCGI_PEA_{—}3_P22 (SEQ ID NO:1259), comprising a first amino acid sequence being at least 90% homologous to MPPRQLLEDIKVVLCRSEEFQFLNPTPVPLELEKKLSEAKSRHDSITGSLKKFKDQLQADRKKDENRFFKS MNKNDMKSWGLLQKNNHKMNKTSEPGSSSAGGRTTSGPPNHHSSAPSHSLFRASSAGKVTFPVCLLASY DEISGQGASSQDTKTFDVALSEELHAALSEWLTAIRAWFCEVPSS corresponding to amino acids 241-425 of TM31_HUMAN (SEQ ID NO:1242), which also corresponds to amino acids 1-185 of HSHCGI_PEA_{—}3_P22 (SEQ ID NO:1259).

[3727] The location of the variant protein was determined according to results from a number of different software programs and analyses, including analyses from SignalP and other specialized programs. The variant protein is believed to be located as follows with regard to the cell: intracellularly. The protein localization is believed to be intracellularly because neither of the trans-membrane region prediction programs predicted a trans-membrane region for this protein. In addition both signal-peptide prediction programs predict that this protein is a non-secreted protein.

[3728] Variant protein HSHCGI_PEA_{—}3_P22 (SEQ ID NO:1259) also has the following non-silent SNPs (Single Nucleotide Polymorphisms) as listed in Table 42, (given according to their position(s) on the amino acid sequence, with the alternative amino acid(s) listed; the last column indicates whether the SNP is known or not; the presence of known SNPs in variant protein HSHCGI_PEA_{—}3_P22 (SEQ ID NO:1259) sequence provides support for the deduced sequence of this variant protein according to the present invention).

TABLE 42
Amino acid mutations

| SNP position(s) on | | |
|---|---|---|
| amino acid sequence | Alternative amino acid(s) | Previously known SNP? |
| 16 | R -> | No |
| 148 | A -> E | No |
| 181 | E -> K | Yes |

[3729] Variant protein HSHCGI_PEA_{—}3_P22 (SEQ ID NO:1259) is encoded by the following transcript(s): HSHCGI_PEA_{—}3_T6 (SEQ ID NO:1193), for which the sequence(s) is/are given at the end of the application. The coding portion of transcript HSHCGI_PEA_{—}3_T6 (SEQ ID NO:1193) is shown in bold; this coding portion starts at position 413 and ends at position 967. The transcript also has the following SNPs as listed in Table 43 (given according to their position on the nucleotide sequence, with the alternative nucleic acid listed; the last column indicates whether the SNP is known or not; the presence of known SNPs in variant protein HSHCGI_PEA_{—}3_P22 (SEQ ID NO:1259) sequence provides support for the deduced sequence of this variant protein according to the present invention).

TABLE 43
Nucleic acid SNPs

| SNP position on nucleotide | Alternative | |
|---|---|---|
| sequence | nucleic acid | Previously known SNP? |
| 9 | A -> T | Yes |
| 73 | A -> G | Yes |
| 331 | G -> A | Yes |
| 386 | G -> A | Yes |
| 460 | A -> | No |
| 541 | C -> T | Yes |
| 562 | G -> A | Yes |
| 855 | C -> A | No |
| 953 | G -> A | Yes |
| 1004 | A -> C | Yes |
| 1173 | G -> A | Yes |
| 1346 | G -> A | Yes |
| 1351 | G -> C | Yes |
| 1439 | T -> C | No |
| 1587 | A -> G | Yes |

[3730] As noted above, cluster HSHCGI features 29 segment(s), which were listed in Table 2 above and for which the sequence(s) are given at the end of the application. These segment(s) are portions of nucleic acid sequence(s) which are described herein separately because they are of particular interest. A description of each segment according to the present invention is now provided.

[3731] Segment cluster HSHCGI_PEA_{—}3_node_{—}0 (SEQ ID NO:1211) according to the present invention is supported by 3 libraries. The number of libraries was determined as previously described. This segment can be found in the following transcript(s): HSHCGI_PEA_{—}3_T21 (SEQ ID NO:1207) and HSHCGI_PEA_{—}3_T22 (SEQ ID NO:1208). Table 44 below describes the starting and ending position of this segment on each transcript.

TABLE 44
Segment location on transcripts

| | Segment | Segment |
|---|---|---|
| | starting | ending |
| Transcript name | position | position |
| HSHCGI_PEA_3_T21 (SEQ ID NO: 1207) | 1 | 185 |
| HSHCGI_PEA_3_T22 (SEQ ID NO: 1208) | 1 | 185 |

[3732] Segment cluster HSHCGI_PEA_{—}3_node_{—}2 (SEQ ID NO:1212) according to the present invention is supported by 6 libraries. The number of libraries was determined as previously described. This segment can be found in the following transcript(s): HSHCGI_PEA_{—}3_T21 (SEQ ID NO:1207) and HSHCGI_PEA_{—}3_T22 (SEQ ID NO:1208). Table 45 below describes the starting and ending position of this segment on each transcript.

TABLE 45
Segment location on transcripts

| | Segment | Segment |
|---|---|---|
| | starting | ending |
| Transcript name | position | position |
| HSHCGI_PEA_3_T21 (SEQ ID NO: 1207) | 186 | 2264 |
| HSHCGI_PEA_3_T22 (SEQ ID NO: 1208) | 186 | 2030 |

[3733] Segment cluster HSHCGI_PEA_{—}3_node_{—}7 (SEQ ID NO:1213) according to the present invention is supported by 27 libraries. The number of libraries was determined as previously described. This segment can be found in the following transcript(s): HSHCGI_PEA_{—}3_T0 (SEQ ID NO:1187), HSHCGI_PEA_{—}3_T1 (SEQ ID NO:1188), HSHCGI_PEA_{—}3_T2 (SEQ ID NO:1189), HSHCGI_PEA_{—}3_T3 (SEQ ID NO:1190), HSHCGI_PEA_{—}3_T4 (SEQ ID NO:1191), HSHCGI_PEA_{—}3_T5 (SEQ ID NO:1192), HSHCGI_PEA_{—}3_T7 (SEQ ID NO:1194), HSHCGI_PEA_{—}3_T8 (SEQ ID NO:1195), HSHCGI_PEA_{—}3_T9 (SEQ ID NO:1196), HSHCGI_PEA_{—}3_T10 (SEQ ID NO:1197), HSHCGI_PEA_{—}3_T11 (SEQ ID NO:1198), HSHCGI_PEA_{—}3_T12 (SEQ ID NO:1199), HSHCGI_PEA_{—}3_T13 (SEQ ID NO:1200), HSHCGI_PEA_{—}3_T18 (SEQ ID NO:1204) and HSHCGI_PEA_{—}3_T23 (SEQ ID NO:1209). Table 46 below describes the starting and ending position of this segment on each transcript.

TABLE 46
Segment location on transcripts

| | Segment | Segment |
|---|---|---|
| | starting | ending |
| Transcript name | position | position |
| HSHCGI_PEA_3_T0 (SEQ ID NO: 1187) | 28 | 307 |
| HSHCGI_PEA_3_T1 (SEQ ID NO: 1188) | 56 | 335 |
| HSHCGI_PEA_3_T2 (SEQ ID NO: 1189) | 29 | 308 |
| HSHCGI_PEA_3_T3 (SEQ ID NO: 1190) | 56 | 335 |
| HSHCGI_PEA_3_T4 (SEQ ID NO: 1191) | 56 | 335 |
| HSHCGI_PEA_3_T5 (SEQ ID NO: 1192) | 56 | 335 |
| HSHCGI_PEA_3_T7 (SEQ ID NO: 1194) | 56 | 335 |
| HSHCGI_PEA_3_T8 (SEQ ID NO: 1195) | 56 | 335 |
| HSHCGI_PEA_3_T9 (SEQ ID NO: 1196) | 56 | 335 |
| HSHCGI_PEA_3_T10 (SEQ ID NO: 1197) | 56 | 335 |
| HSHCGI_PEA_3_T11 (SEQ ID NO: 1198) | 28 | 307 |
| HSHCGI_PEA_3_T12 (SEQ ID NO: 1199) | 56 | 335 |
| HSHCGI_PEA_3_T13 (SEQ ID NO: 1200) | 28 | 307 |
| HSHCGI_PEA_3_T18 (SEQ ID NO: 1204) | 56 | 335 |
| HSHCGI_PEA_3_T23 (SEQ ID NO: 1209) | 56 | 335 |

[3734] Segment cluster HSHCGI_PEA_{—}3_node_{—}8 (SEQ ID NO:1214) according to the present invention is supported by 26 libraries. The number of libraries was determined as previously described. This segment can be found in the following transcript(s): HSHCGI_PEA_{—}3_T0 (SEQ ID NO:1187), HSHCGI_PEA_{—}3_T1 (SEQ ID NO:1188), HSHCGI_PEA_{—}3_T2 (SEQ ID NO:1189), HSHCGI_PEA_{—}3_T3 (SEQ ID NO:1190), HSHCGI_PEA_{—}3_T5 (SEQ ID NO:1192), HSHCGI_PEA_{—}3_T7 (SEQ ID NO:1194), HSHCGI_PEA_{—}3_T8 (SEQ ID NO:1195), HSHCGI_PEA_{—}3_T9 (SEQ ID NO:1196), HSHCGI_PEA_{—}3_T10 (SEQ ID NO:1197), HSHCGI_PEA_{—}3_T11 (SEQ ID NO:1198), HSHCGI_PEA_{—}3_T12 (SEQ ID NO:1199), HSHCGI_PEA_{—}3_T13 (SEQ ID NO:1200), HSHCGI_PEA_{—}3_T18 (SEQ ID NO:1204) and HSHCGI_PEA_{—}3_T23 (SEQ ID NO:1209). Table 47 below describes the starting and ending position of this segment on each transcript.

TABLE 47
Segment location on transcripts

| | Segment | Segment |
|---|---|---|
| | starting | ending |
| Transcript name | position | position |
| HSHCGI_PEA_3_T0 (SEQ ID NO: 1187) | 308 | 443 |
| HSHCGI_PEA_3_T1 (SEQ ID NO: 1188) | 336 | 471 |
| HSHCGI_PEA_3_T2 (SEQ ID NO: 1189) | 309 | 444 |
| HSHCGI_PEA_3_T3 (SEQ ID NO: 1190) | 336 | 471 |
| HSHCGI_PEA_3_T5 (SEQ ID NO: 1192) | 336 | 471 |
| HSHCGI_PEA_3_T7 (SEQ ID NO: 1194) | 336 | 471 |
| HSHCGI_PEA_3_T8 (SEQ ID NO: 1195) | 336 | 471 |
| HSHCGI_PEA_3_T9 (SEQ ID NO: 1196) | 336 | 471 |
| HSHCGI_PEA_3_T10 (SEQ ID NO: 1197) | 336 | 471 |
| HSHCGI_PEA_3_T11 (SEQ ID NO: 1198) | 308 | 443 |
| HSHCGI_PEA_3_T12 (SEQ ID NO: 1199) | 336 | 471 |
| HSHCGI_PEA_3_T13 (SEQ ID NO: 1200) | 308 | 443 |
| HSHCGI_PEA_3_T18 (SEQ ID NO: 1204) | 336 | 471 |
| HSHCGI_PEA_3_T23 (SEQ ID NO: 1209) | 336 | 471 |

[3735] Segment cluster HSHCGI_PEA_{—}3_node_{—}14 (SEQ ID NO:1215) according to the present invention is supported by 2 libraries. The number of libraries was determined as previously described. This segment can be found in the following transcript(s): HSHCGI_PEA_{—}3_T23 (SEQ ID NO:1209). Table 48 below describes the starting and ending position of this segment on each transcript.

TABLE 48
Segment location on transcripts

| | Segment | Segment |
|---|---|---|
| | starting | ending |
| Transcript name | position | position |
| HSHCGI_PEA_3_T23 (SEQ ID NO: 1209) | 652 | 1081 |

[3736] Segment cluster HSHCGI_PEA_{—}3_node_{—}16 (SEQ ID NO:1216) according to the present invention is supported by 43 libraries. The number of libraries was determined as previously described. This segment can be found in the following transcript(s): HSHCGI_PEA_{—}3_T0 (SEQ ID NO:1187), HSHCGI_PEA_{—}3_T1 (SEQ ID NO:1188), HSHCGI_PEA_{—}3_T2 (SEQ ID NO:1189), HSHCGI_PEA_{—}3_T3 (SEQ ID NO:1190), HSHCGI_PEA_{—}3_T4 (SEQ ID NO:1191), HSHCGI_PEA_{—}3_T5 (SEQ ID NO:1192), HSHCGI_PEA_{—}3_T6 (SEQ ID NO:1193), HSHCGI_PEA_{—}3_T7 (SEQ ID NO:1194), HSHCGI_PEA_{—}3_T8 (SEQ ID NO:1195), HSHCGI_PEA_{—}3_T9 (SEQ ID NO:1196), HSHCGI_PEA_{—}3_T10 (SEQ ID NO:1197), HSHCGI_PEA_{—}3_T11 (SEQ ID NO:1198), HSHCGI_PEA_{—}3_T12 (SEQ ID NO:1199), HSHCGI_PEA_{—}3_T13 (SEQ ID NO:1200) and HSHCGI_PEA_{—}3_T18 (SEQ ID NO:1204). Table 49 below describes the starting and ending position of this segment on each transcript.

TABLE 49
Segment location on transcripts

| | Segment | Segment |
|---|---|---|
| | starting | ending |
| Transcript name | position | position |
| HSHCGI_PEA_3_T0 (SEQ ID NO: 1187) | 624 | 854 |
| HSHCGI_PEA_3_T1 (SEQ ID NO: 1188) | 652 | 882 |
| HSHCGI_PEA_3_T2 (SEQ ID NO: 1189) | 625 | 855 |
| HSHCGI_PEA_3_T3 (SEQ ID NO: 1190) | 652 | 882 |
| HSHCGI_PEA_3_T4 (SEQ ID NO: 1191) | 516 | 746 |
| HSHCGI_PEA_3_T5 (SEQ ID NO: 1192) | 652 | 882 |
| HSHCGI_PEA_3_T6 (SEQ ID NO: 1193) | 206 | 436 |
| HSHCGI_PEA_3_T7 (SEQ ID NO: 1194) | 652 | 882 |
| HSHCGI_PEA_3_T8 (SEQ ID NO: 1195) | 652 | 882 |
| HSHCGI_PEA_3_T9 (SEQ ID NO: 1196) | 652 | 882 |
| HSHCGI_PEA_3_T10 (SEQ ID NO: 1197) | 652 | 882 |
| HSHCGI_PEA_3_T11 (SEQ ID NO: 1198) | 624 | 854 |
| HSHCGI_PEA_3_T12 (SEQ ID NO: 1199) | 652 | 882 |
| HSHCGI_PEA_3_T13 (SEQ ID NO: 1200) | 624 | 854 |
| HSHCGI_PEA_3_T18 (SEQ ID NO: 1204) | 652 | 882 |

[3737] Segment cluster HSHCGI_PEA_{—}3_node_{—}18 (SEQ ID NO:1217) according to the present invention is supported by 4 libraries. The number of libraries was determined as previously described. This segment can be found in the following transcript(s): HSHCGI_PEA_{—}3_T14 (SEQ ID NO:1201). Table 50 below describes the starting and ending position of this segment on each transcript.

TABLE 50
Segment location on transcripts

| | Segment | Segment |
|---|---|---|
| | starting | ending |
| Transcript name | position | position |
| HSHCGI_PEA_3_T14 (SEQ ID NO: 1201) | 1 | 752 |

[3738] Segment cluster HSHCGI_PEA_{—}3_node_{—}20 (SEQ ID NO:1218) according to the present invention is supported by 11 libraries. The number of libraries was determined as previously described. This segment can be found in the following transcript(s): HSHCGI_PEA_{—}3_T5 (SEQ ID NO:1192), HSHCGI_PEA_{—}3_T12 (SEQ ID NO:1199) and HSHCGI_PEA_{—}3_T14 (SEQ ID NO:1201). Table 51 below describes the starting and ending position of this segment on each transcript.

TABLE 51
Segment location on transcripts

| | Segment | Segment |
|---|---|---|
| | starting | ending |
| Transcript name | position | position |
| HSHCGI_PEA_3_T5 (SEQ ID NO: 1192) | 906 | 1696 |
| HSHCGI_PEA_3_T12 (SEQ ID NO: 1199) | 906 | 1696 |
| HSHCGI_PEA_3_T14 (SEQ ID NO: 1201) | 776 | 1566 |

[3739] Segment cluster HSHCGI_PEA_{—}3_node_{—}26 (SEQ ID NO:1219) according to the present invention is supported by 5 libraries. The number of libraries was determined as previously described. This segment can be found in the following transcript(s): HSHCGI_PEA_{—}3_T15 (SEQ ID NO:1202), HSHCGI_PEA_{—}3_T19 (SEQ ID NO:1205), HSHCGI_PEA_{—}3_T20 (SEQ ID NO:1206) and HSHCGI_PEA_{—}3_T24 (SEQ ID NO:1210). Table 52 below describes the starting and ending position of this segment on each transcript.

TABLE 52
Segment location on transcripts

| | Segment | Segment |
|---|---|---|
| | starting | ending |
| Transcript name | position | position |
| HSHCGI_PEA_3_T15 (SEQ ID NO: 1202) | 1 | 420 |
| HSHCGI_PEA_3_T19 (SEQ ID NO: 1205) | 1 | 420 |
| HSHCGI_PEA_3_T20 (SEQ ID NO: 1206) | 1 | 420 |
| HSHCGI_PEA_3_T24 (SEQ ID NO: 1210) | 1 | 420 |

[3740] Segment cluster HSHCGI_PEA_{—}3_node_{—}28 (SEQ ID NO:1220) according to the present invention is supported by 3 libraries. The number of libraries was determined as previously described. This segment can be found in the following transcript(s): HSHCGI_PEA_{—}3_T18 (SEQ ID NO:1204) and HSHCGI_PEA_{—}3_T24 (SEQ ID NO:1210). Table 53 below describes the starting and ending position of this segment on each transcript.

TABLE 53
Segment location on transcripts

| | Segment | Segment |
|---|---|---|
| | starting | ending |
| Transcript name | position | position |
| HSHCGI_PEA_3_T18 (SEQ ID NO: 1204) | 1097 | 1473 |
| HSHCGI_PEA_3_T24 (SEQ ID NO: 1210) | 496 | 872 |

[3741] Segment cluster HSHCGI_PEA_{—}3_node_{—}30 (SEQ ID NO:1221) according to the present invention is supported by 3 libraries. The number of libraries was determined as previously described. This segment can be found in the following transcript(s): HSHCGI_PEA_{—}3_T17 (SEQ ID NO:1203). Table 54 below describes the starting and ending position of this segment on each transcript.

TABLE 54
Segment location on transcripts

| | Segment | Segment |
|---|---|---|
| | starting | ending |
| Transcript name | position | position |
| HSHCGI_PEA_3_T17 (SEQ ID NO: 1203) | 1 | 421 |

[3742] Segment cluster HSHCGI_PEA_{—}3_node_{—}32 (SEQ ID NO:1222) according to the present invention is supported by 7 libraries. The number of libraries was determined as previously described. This segment can be found in the following transcript(s): HSHCGI_PEA_{—}3_T9 (SEQ ID NO:1196), HSHCGI_PEA_{—}3_T12 (SEQ ID NO:1199), HSHCGI_PEA_{—}3_T17 (SEQ ID NO:1203) and HSHCGI_PEA_{—}3_T19 (SEQ ID NO:1205). Table 55 below describes the starting and ending position of this segment on each transcript.

TABLE 55
Segment location on transcripts

| | Segment | Segment |
|---|---|---|
| | starting | ending |
| Transcript name | position | position |
| HSHCGI_PEA_3_T9 (SEQ ID NO: 1196) | 1163 | 1474 |
| HSHCGI_PEA_3_T12 (SEQ ID NO: 1199) | 2016 | 2327 |
| HSHCGI_PEA_3_T17 (SEQ ID NO: 1203) | 488 | 799 |
| HSHCGI_PEA_3_T19 (SEQ ID NO: 1205) | 562 | 873 |

[3743] Segment cluster HSHCGI_PEA_{—}3_node_{—}33 (SEQ ID NO:1223) according to the present invention is supported by 50 libraries. The number of libraries was determined as previously described. This segment can be found in the following transcript(s): HSHCGI_PEA_{—}3_T0 (SEQ ID NO:1187), HSHCGI_PEA_{—}3_T1 (SEQ ID NO:1188), HSHCGI_PEA_{—}3_T2 (SEQ ID NO:1189), HSHCGI_PEA_{—}3_T3 (SEQ ID NO:1190), HSHCGI_PEA_{—}3_T4 (SEQ ID NO:1191), HSHCGI_PEA_{—}3_T5 (SEQ ID NO:1192), HSHCGI_PEA_{—}3_T6 (SEQ ID NO:1193), HSHCGI_PEA_{—}3_T7 (SEQ ID NO:1194), HSHCGI_PEA_{—}3_T8 (SEQ ID NO:1195), HSHCGI_PEA_{—}3_T9 (SEQ ID NO:1196), HSHCGI_PEA_{—}3_T10 (SEQ ID NO:1197), HSHCGI_PEA_{—}3_T11 (SEQ ID NO:1198), HSHCGI_PEA_{—}3_T12 (SEQ ID NO:1199), HSHCGI_PEA_{—}3_T13 (SEQ ID NO:1200), HSHCGI_PEA_{—}3_T14 (SEQ ID NO:1201), HSHCGI_PEA_{—}3_T15 (SEQ ID NO:1202), HSHCGI_PEA_{—}3_T17 (SEQ ID NO:1203), HSHCGI_PEA_{—}3_T19 (SEQ ID NO:1205) and HSHCGI_PEA_{—}3_T20 (SEQ ID NO:1206). Table 56 below describes the starting and ending position of this segment on each transcript.

TABLE 56
Segment location on transcripts

| | Segment | Segment |
|---|---|---|
| | starting | ending |
| Transcript name | position | position |
| HSHCGI_PEA_3_T0 (SEQ ID NO: 1187) | 1135 | 1452 |
| HSHCGI_PEA_3_T1 (SEQ ID NO: 1188) | 1163 | 1480 |
| HSHCGI_PEA_3_T2 (SEQ ID NO: 1189) | 1136 | 1453 |
| HSHCGI_PEA_3_T3 (SEQ ID NO: 1190) | 1163 | 1480 |
| HSHCGI_PEA_3_T4 (SEQ ID NO: 1191) | 1027 | 1344 |
| HSHCGI_PEA_3_T5 (SEQ ID NO: 1192) | 2016 | 2333 |
| HSHCGI_PEA_3_T6 (SEQ ID NO: 1193) | 717 | 1034 |
| HSHCGI_PEA_3_T7 (SEQ ID NO: 1194) | 1047 | 1364 |
| HSHCGI_PEA_3_T8 (SEQ ID NO: 1195) | 1225 | 1542 |
| HSHCGI_PEA_3_T9 (SEQ ID NO: 1196) | 1475 | 1792 |
| HSHCGI_PEA_3_T10 (SEQ ID NO: 1197) | 1119 | 1436 |
| HSHCGI_PEA_3_T11 (SEQ ID NO: 1198) | 1068 | 1385 |
| HSHCGI_PEA_3_T12 (SEQ ID NO: 1199) | 2328 | 2645 |
| HSHCGI_PEA_3_T13 (SEQ ID NO: 1200) | 1136 | 1453 |
| HSHCGI_PEA_3_T14 (SEQ ID NO: 1201) | 1886 | 2203 |
| HSHCGI_PEA_3_T15 (SEQ ID NO: 1202) | 562 | 879 |
| HSHCGI_PEA_3_T17 (SEQ ID NO: 1203) | 800 | 1117 |
| HSHCGI_PEA_3_T19 (SEQ ID NO: 1205) | 874 | 1191 |
| HSHCGI_PEA_3_T20 (SEQ ID NO: 1206) | 562 | 879 |

[3744] Segment cluster HSHCGI_PEA_{—}3_node_{—}34 (SEQ ID NO:1224) according to the present invention is supported by 32 libraries. The number of libraries was determined as previously described. This segment can be found in the following transcript(s): HSHCGI_PEA_{—}3_T0 (SEQ ID NO:1187), HSHCGI_PEA_{—}3_T1 (SEQ ID NO:1188), HSHCGI_PEA_{—}3_T2 (SEQ ID NO:1189), HSHCGI_PEA_{—}3_T4 (SEQ ID NO:1191), HSHCGI_PEA_{—}3_T5 (SEQ ID NO:1192), HSHCGI_PEA_{—}3_T6 (SEQ ID NO:1193), HSHCGI_PEA_{—}3_T7 (SEQ ID NO:1194), HSHCGI_PEA_{—}3_T8 (SEQ ID NO:1195), HSHCGI_PEA_{—}3_T9 (SEQ ID NO:1196), HSHCGI_PEA_{—}3_T10 (SEQ ID NO:1197), HSHCGI_PEA_{—}3_T11 (SEQ ID NO:1198), HSHCGI_PEA_{—}3_T12 (SEQ ID NO:1199), HSHCGI_PEA_{—}3_T13 (SEQ ID NO:1200), HSHCGI_PEA_{—}3_T14 (SEQ ID NO:1201), HSHCGI_PEA_{—}3_T15 (SEQ ID NO:1202), HSHCGI_PEA_{—}3_T17 (SEQ ID NO:1203) and HSHCGI_PEA_{—}3_T19 (SEQ ID NO:1205). Table 57 below describes the starting and ending position of this segment on each transcript.

TABLE 57
Segment location on transcripts

| | Segment | Segment |
|---|---|---|
| | starting | ending |
| Transcript name | position | position |
| HSHCGI_PEA_3_T0 (SEQ ID NO: 1187) | 1453 | 1678 |
| HSHCGI_PEA_3_T1 (SEQ ID NO: 1188) | 1481 | 1706 |
| HSHCGI_PEA_3_T2 (SEQ ID NO: 1189) | 1454 | 1679 |
| HSHCGI_PEA_3_T4 (SEQ ID NO: 1191) | 1345 | 1570 |
| HSHCGI_PEA_3_T5 (SEQ ID NO: 1192) | 2334 | 2559 |
| HSHCGI_PEA_3_T6 (SEQ ID NO: 1193) | 1035 | 1260 |
| HSHCGI_PEA_3_T7 (SEQ ID NO: 1194) | 1365 | 1590 |
| HSHCGI_PEA_3_T8 (SEQ ID NO: 1195) | 1543 | 1768 |
| HSHCGI_PEA_3_T9 (SEQ ID NO: 1196) | 1793 | 2018 |
| HSHCGI_PEA_3_T10 (SEQ ID NO: 1197) | 1437 | 1662 |
| HSHCGI_PEA_3_T11 (SEQ ID NO: 1198) | 1386 | 1611 |
| HSHCGI_PEA_3_T12 (SEQ ID NO: 1199) | 2646 | 2871 |
| HSHCGI_PEA_3_T13 (SEQ ID NO: 1200) | 1454 | 1679 |
| HSHCGI_PEA_3_T14 (SEQ ID NO: 1201) | 2204 | 2429 |
| HSHCGI_PEA_3_T15 (SEQ ID NO: 1202) | 880 | 1105 |
| HSHCGI_PEA_3_T17 (SEQ ID NO: 1203) | 1118 | 1343 |
| HSHCGI_PEA_3_T19 (SEQ ID NO: 1205) | 1192 | 1417 |

[3745] Segment cluster HSHCGI_PEA_{—}3_node_{—}36 (SEQ ID NO:1225) according to the present invention is supported by 38 libraries. The number of libraries was determined as previously described. This segment can be found in the following transcript(s): HSHCGI_PEA_{—}3_T0 (SEQ ID NO:1187), HSHCGI_PEA_{—}3_T1 (SEQ ID NO:1188), HSHCGI_PEA_{—}3_T2 (SEQ ID NO:1189), HSHCGI_PEA_{—}3_T3 (SEQ ID NO:1190), HSHCGI_PEA_{—}3_T4 (SEQ ID NO:1191), HSHCGI_PEA_{—}3_T5 (SEQ ID NO:1192), HSHCGI_PEA_{—}3_T6 (SEQ ID NO:1193), HSHCGI_PEA_{—}3_T7 (SEQ ID NO:1194), HSHCGI_PEA_{—}3_T8 (SEQ ID NO:1195), HSHCGI_PEA_{—}3_T9 (SEQ ID NO:1196), HSHCGI_PEA_{—}3_T10 (SEQ ID NO:1197), HSHCGI_PEA_{—}3_T11 (SEQ ID NO:1198), HSHCGI_PEA_{—}3_T12 (SEQ ID NO:1199), HSHCGI_PEA_{—}3_T13 (SEQ ID NO:1200), HSHCGI_PEA_{—}3_T14 (SEQ ID NO:1201), HSHCGI_PEA_{—}3_T15 (SEQ ID NO:1202), HSHCGI_PEA_{—}3_T17 (SEQ ID NO:1203), HSHCGI_PEA_{—}3_T19 (SEQ ID NO:1205) and HSHCGI_PEA_{—}3_T20 (SEQ ID NO:1206). Table 58 below describes the starting and ending position of this segment on each transcript.

TABLE 58
Segment location on transcripts

| | Segment | Segment |
|---|---|---|
| | starting | ending |
| Transcript name | position | position |
| HSHCGI_PEA_3_T0 (SEQ ID NO: 1187) | 1792 | 2038 |
| HSHCGI_PEA_3_T1 (SEQ ID NO: 1188) | 1820 | 2066 |
| HSHCGI_PEA_3_T2 (SEQ ID NO: 1189) | 1793 | 2039 |
| HSHCGI_PEA_3_T3 (SEQ ID NO: 1190) | 1594 | 1840 |
| HSHCGI_PEA_3_T4 (SEQ ID NO: 1191) | 1684 | 1930 |
| HSHCGI_PEA_3_T5 (SEQ ID NO: 1192) | 2673 | 2919 |
| HSHCGI_PEA_3_T6 (SEQ ID NO: 1193) | 1374 | 1620 |
| HSHCGI_PEA_3_T7 (SEQ ID NO: 1194) | 1704 | 1950 |
| HSHCGI_PEA_3_T8 (SEQ ID NO: 1195) | 1882 | 2128 |
| HSHCGI_PEA_3_T9 (SEQ ID NO: 1196) | 2132 | 2378 |
| HSHCGI_PEA_3_T10 (SEQ ID NO: 1197) | 1776 | 2022 |
| HSHCGI_PEA_3_T11 (SEQ ID NO: 1198) | 1725 | 1971 |
| HSHCGI_PEA_3_T12 (SEQ ID NO: 1199) | 2985 | 3231 |
| HSHCGI_PEA_3_T13 (SEQ ID NO: 1200) | 1793 | 2039 |
| HSHCGI_PEA_3_T14 (SEQ ID NO: 1201) | 2543 | 2789 |
| HSHCGI_PEA_3_T15 (SEQ ID NO: 1202) | 1219 | 1465 |
| HSHCGI_PEA_3_T17 (SEQ ID NO: 1203) | 1457 | 1703 |
| HSHCGI_PEA_3_T19 (SEQ ID NO: 1205) | 1531 | 1777 |
| HSHCGI_PEA_3_T20 (SEQ ID NO: 1206) | 993 | 1239 |

[3746] According to an optional embodiment of the present invention, short segments related to the above cluster are also provided. These segments are up to about 120 bp in length, and so are included in a separate description.

[3747] Segment cluster HSHCGI_PEA_{—}3_node_{—}1 (SEQ ID NO:1226) according to the present invention is supported by 0 libraries. The number of libraries was determined as previously described. This segment can be found in the following transcript(s): HSHCGI_PEA_{—}3_T0 (SEQ ID NO:1187), HSHCGI_PEA_{—}3_T11 (SEQ ID NO:1198) and HSHCGI_PEA_{—}3_T13 (SEQ ID NO:1200). Table 59 below describes the starting and ending position of this segment on each transcript.

TABLE 59
Segment location on transcripts

| | Segment | Segment |
|---|---|---|
| | starting | ending |
| Transcript name | position | position |
| HSHCGI_PEA_3_T0 (SEQ ID NO: 1187) | 1 | 27 |
| HSHCGI_PEA_3_T11 (SEQ ID NO: 1198) | 1 | 27 |
| HSHCGI_PEA_3_T13 (SEQ ID NO: 1200) | 1 | 27 |

[3748] Segment cluster HSHCGI_PEA_{—}3_node_{—}4 (SEQ ID NO:1227) according to the present invention is supported by 4 libraries. The number of libraries was determined as previously described. This segment can be found in the following transcript(s): HSHCGI_PEA_{—}3_T2 (SEQ ID NO:1189). Table 60 below describes the starting and ending position of this segment on each transcript.

TABLE 60
.Segment location on transcripts

| | Segment | Segment |
|---|---|---|
| | starting | ending |
| Transcript name | position | position |
| HSHCGI_PEA_3_T2 (SEQ ID NO: 1189) | 1 | 28 |

[3749] Segment cluster HSHCGI_PEA_{—}3_node_{—}6 (SEQ ID NO:1228) according to the present invention is supported by 3 libraries. The number of libraries was determined as previously described. This segment can be found in the following transcript(s): HSHCGI_PEA_{—}3_T1 (SEQ ID NO:1188), HSHCGI_PEA_{—}3_T3 (SEQ ID NO:1190), HSHCGI_PEA_{—}3_T4 (SEQ ID NO:1191), HSHCGI_PEA_{—}3_T5 (SEQ ID NO:1192), HSHCGI_PEA_{—}3_T7 (SEQ ID NO:1194), HSHCGI_PEA_{—}3_T8 (SEQ ID NO:1195), HSHCGI_PEA_{—}3_T9 (SEQ ID NO:1196), HSHCGI_PEA_{—}3_T10 (SEQ ID NO:1197), HSHCGI_PEA_{—}3_T12 (SEQ ID NO:1199), HSHCGI_PEA_{—}3_T18 (SEQ ID NO:1204) and HSHCGI_PEA_{—}3_T23 (SEQ ID NO:1209). Table 61 below describes the starting and ending position of this segment on each transcript.

TABLE 61
Segment location on transcripts

| | Segment | Segment |
|---|---|---|
| | starting | ending |
| Transcript name | position | position |
| HSHCGI_PEA_3_T1 (SEQ ID NO: 1188) | 1 | 55 |
| HSHCGI_PEA_3_T3 (SEQ ID NO: 1190) | 1 | 55 |
| HSHCGI_PEA_3_T4 (SEQ ID NO: 1191) | 1 | 55 |
| HSHCGI_PEA_3_T5 (SEQ ID NO: 1192) | 1 | 55 |
| HSHCGI_PEA_3_T7 (SEQ ID NO: 1194) | 1 | 55 |
| HSHCGI_PEA_3_T8 (SEQ ID NO: 1195) | 1 | 55 |
| HSHCGI_PEA_3_T9 (SEQ ID NO: 1196) | 1 | 55 |
| HSHCGI_PEA_3_T10 (SEQ ID NO: 1197) | 1 | 55 |
| HSHCGI_PEA_3_T12 (SEQ ID NO: 1199) | 1 | 55 |
| HSHCGI_PEA_3_T18 (SEQ ID NO: 1204) | 1 | 55 |
| HSHCGI_PEA_3_T23 (SEQ ID NO: 1209) | 1 | 55 |

[3750] Segment cluster HSHCGI_PEA_{—}3_node_{—}9 (SEQ ID NO:1229) according to the present invention is supported by 32 libraries. The number of libraries was determined as previously described. This segment can be found in the following transcript(s): HSHCGI_PEA_{—}3_T0 (SEQ ID NO:1187), HSHCGI_PEA_{—}3_T1 (SEQ ID NO:1188), HSHCGI_PEA_{—}3_T2 (SEQ ID NO:1189), HSHCGI_PEA_{—}3_T3 (SEQ ID NO:1190), HSHCGI_PEA_{—}3_T4 (SEQ ID NO:1191), HSHCGI_PEA_{—}3_T5 (SEQ ID NO:1192), HSHCGI_PEA_{—}3_T7 (SEQ ID NO:1194), HSHCGI_PEA_{—}3_T8 (SEQ ID NO:1195), HSHCGI_PEA_{—}3_T9 (SEQ ID NO:1196), HSHCGI_PEA_{—}3_T10 (SEQ ID NO:1197), HSHCGI_PEA_{—}3_T11 (SEQ ID NO:1198), HSHCGI_PEA_{—}3_T12 (SEQ ID NO:1199), HSHCGI_PEA_{—}3_T13 (SEQ ID NO:1200), HSHCGI_PEA_{—}3_T18 (SEQ ID NO:1204) and HSHCGI_PEA_{—}3_T23 (SEQ ID NO:1209). Table 62 below describes the starting and ending position of this segment on each transcript.

TABLE 62
Segment location on transcripts

| | Segment | Segment |
|---|---|---|
| | starting | ending |
| Transcript name | position | position |
| HSHCGI_PEA_3_T0 (SEQ ID NO: 1187) | 444 | 527 |
| HSHCGI_PEA_3_T1 (SEQ ID NO: 1188) | 472 | 555 |
| HSHCGI_PEA_3_T2 (SEQ ID NO: 1189) | 445 | 528 |
| HSHCGI_PEA_3_T3 (SEQ ID NO: 1190) | 472 | 555 |
| HSHCGI_PEA_3_T4 (SEQ ID NO: 1191) | 336 | 419 |
| HSHCGI_PEA_3_T5 (SEQ ID NO: 1192) | 472 | 555 |
| HSHCGI_PEA_3_T7 (SEQ ID NO: 1194) | 472 | 555 |
| HSHCGI_PEA_3_T8 (SEQ ID NO: 1195) | 472 | 555 |
| HSHCGI_PEA_3_T9 (SEQ ID NO: 1196) | 472 | 555 |
| HSHCGI_PEA_3_T10 (SEQ ID NO: 1197) | 472 | 555 |
| HSHCGI_PEA_3_T11 (SEQ ID NO: 1198) | 444 | 527 |
| HSHCGI_PEA_3_T12 (SEQ ID NO: 1199) | 472 | 555 |
| HSHCGI_PEA_3_T13 (SEQ ID NO: 1200) | 444 | 527 |
| HSHCGI_PEA_3_T18 (SEQ ID NO: 1204) | 472 | 555 |
| HSHCGI_PEA_3_T23 (SEQ ID NO: 1209) | 472 | 555 |

[3751] Segment cluster HSHCGI_PEA_{—}3_node_{—}11 (SEQ ID NO:1230) according to the present invention is supported by 1 libraries. The number of libraries was determined as previously described. This segment can be found in the following transcript(s): HSHCGI_PEA_{—}3_T6 (SEQ ID NO:1193). Table 63 below describes the starting and ending position of this segment on each transcript.

TABLE 63
Segment location on transcripts

| | Segment | Segment |
|---|---|---|
| | starting | ending |
| Transcript name | position | position |
| HSHCGI_PEA_3_T6 (SEQ ID NO: 1193) | 1 | 109 |

[3752] Segment cluster HSHCGI_PEA_{—}3_node_{—}13 (SEQ ID NO:1231) according to the present invention is supported by 35 libraries. The number of libraries was determined as previously described. This segment can be found in the following transcript(s): HSHCGI_PEA_{—}3_T0 (SEQ ID NO:1187), HSHCGI_PEA_{—}3_T1 (SEQ ID NO:1188), HSHCGI_PEA_{—}3_T2 (SEQ ID NO:1189), HSHCGI_PEA_{—}3_T3 (SEQ ID NO:1190), HSHCGI_PEA_{—}3_T4 (SEQ ID NO:1191), HSHCGI_PEA_{—}3_T5 (SEQ ID NO:1192), HSHCGI_PEA_{—}3_T6 (SEQ ID NO:1193), HSHCGI_PEA_{—}3_T7 (SEQ ID NO:1194), HSHCGI_PEA_{—}3_T8 (SEQ ID NO:1195), HSHCGI_PEA_{—}3_T9 (SEQ ID NO:1196), HSHCGI_PEA_{—}3_T10 (SEQ ID NO:1197), HSHCGI_PEA_{—}3_T11 (SEQ ID NO:1198), HSHCGI_PEA_{—}3_T12 (SEQ ID NO:1199), HSHCGI_PEA_{—}3_T13 (SEQ ID NO:1200), HSHCGI_PEA_{—}3_T18 (SEQ ID NO:1204) and HSHCGI_PEA_{—}3_T23 (SEQ ID NO:1209). Table 64 below describes the starting and ending position of this segment on each transcript.

TABLE 64
Segment location on transcripts

| | Segment | Segment |
|---|---|---|
| | starting | ending |
| Transcript name | position | position |
| HSHCGI_PEA_3_T0 (SEQ ID NO: 1187) | 528 | 623 |
| HSHCGI_PEA_3_T1 (SEQ ID NO: 1188) | 556 | 651 |
| HSHCGI_PEA_3_T2 (SEQ ID NO: 1189) | 529 | 624 |
| HSHCGI_PEA_3_T3 (SEQ ID NO: 1190) | 556 | 651 |
| HSHCGI_PEA_3_T4 (SEQ ID NO: 1191) | 420 | 515 |
| HSHCGI_PEA_3_T5 (SEQ ID NO: 1192) | 556 | 651 |
| HSHCGI_PEA_3_T6 (SEQ ID NO: 1193) | 110 | 205 |
| HSHCGI_PEA_3_T7 (SEQ ID NO: 1194) | 556 | 651 |
| HSHCGI_PEA_3_T8 (SEQ ID NO: 1195) | 556 | 651 |
| HSHCGI_PEA_3_T9 (SEQ ID NO: 1196) | 556 | 651 |
| HSHCGI_PEA_3_T10 (SEQ ID NO: 1197) | 556 | 651 |
| HSHCGI_PEA_3_T11 (SEQ ID NO: 1198) | 528 | 623 |
| HSHCGI_PEA_3_T12 (SEQ ID NO: 1199) | 556 | 651 |
| HSHCGI_PEA_3_T13 (SEQ ID NO: 1200) | 528 | 623 |
| HSHCGI_PEA_3_T18 (SEQ ID NO: 1204) | 556 | 651 |
| HSHCGI_PEA_3_T23 (SEQ ID NO: 1209) | 556 | 651 |

[3753] Segment cluster HSHCGI_PEA_{—}3_node_{—}19 (SEQ ID NO:1232) according to the present invention can be found in the following transcript(s): HSHCGI_PEA_{—}3_T0 (SEQ ID NO:1187), HSHCGI_PEA_{—}3_T1 (SEQ ID NO:1188), HSHCGI_PEA_{—}3_T2 (SEQ ID NO:1189), HSHCGI_PEA_{—}3_T3 (SEQ ID NO:1190), HSHCGI_PEA_{—}3_T4 (SEQ ID NO:1191), HSHCGI_PEA_{—}3_T5 (SEQ ID NO:1192), HSHCGI_PEA_{—}3_T6 (SEQ ID NO:1193), HSHCGI_PEA_{—}3_T7 (SEQ ID NO:1194), HSHCGI_PEA_{—}3_T8 (SEQ ID NO:1195), HSHCGI_PEA_{—}3_T9 (SEQ ID NO:1196), HSHCGI_PEA_{—}3_T10 (SEQ ID NO:1197), HSHCGI_PEA_{—}3_T12 (SEQ ID NO:1199), HSHCGI_PEA_{—}3_T14 (SEQ ID NO:1201) and HSHCGI_PEA_{—}3_T18 (SEQ ID NO:1204). Table 65 below describes the starting and ending position of this segment on each transcript.

TABLE 65
Segment location on transcripts

| | Segment | Segment |
|---|---|---|
| | starting | ending |
| Transcript name | position | position |
| HSHCGI_PEA_3_T0 (SEQ ID NO: 1187) | 855 | 877 |
| HSHCGI_PEA_3_T1 (SEQ ID NO: 1188) | 883 | 905 |
| HSHCGI_PEA_3_T2 (SEQ ID NO: 1189) | 856 | 878 |
| HSHCGI_PEA_3_T3 (SEQ ID NO: 1190) | 883 | 905 |
| HSHCGI_PEA_3_T4 (SEQ ID NO: 1191) | 747 | 769 |
| HSHCGI_PEA_3_T5 (SEQ ID NO: 1192) | 883 | 905 |
| HSHCGI_PEA_3_T6 (SEQ ID NO: 1193) | 437 | 459 |
| HSHCGI_PEA_3_T7 (SEQ ID NO: 1194) | 883 | 905 |
| HSHCGI_PEA_3_T8 (SEQ ID NO: 1195) | 883 | 905 |
| HSHCGI_PEA_3_T9 (SEQ ID NO: 1196) | 883 | 905 |
| HSHCGI_PEA_3_T10 (SEQ ID NO: 1197) | 883 | 905 |
| HSHCGI_PEA_3_T12 (SEQ ID NO: 1199) | 883 | 905 |
| HSHCGI_PEA_3_T14 (SEQ ID NO: 1201) | 753 | 775 |
| HSHCGI_PEA_3_T18 (SEQ ID NO: 1204) | 883 | 905 |

[3754] Segment cluster HSHCGI_PEA_{—}3_node_{—}21 (SEQ ID NO:1233) according to the present invention can be found in the following transcript(s): HSHCGI_PEA_{—}3_T13 (SEQ ID NO:1200). Table 66 below describes the starting and ending position of this segment on each transcript.

TABLE 66
Segment location on transcripts

| | Segment | Segment |
|---|---|---|
| | starting | ending |
| Transcript name | position | position |
| HSHCGI_PEA_3_T13 (SEQ ID NO: 1200) | 855 | 878 |

[3755] Segment cluster HSHCGI_PEA_{—}3_node_{—}22 (SEQ ID NO:1234) according to the present invention is supported by 6 libraries. The number of libraries was determined as previously described. This segment can be found in the following transcript(s): HSHCGI_PEA_{—}3_T5 (SEQ ID NO:1192), HSHCGI_PEA_{—}3_T8 (SEQ ID NO:1195), HSHCGI_PEA_{—}3_T12 (SEQ ID NO:1199) and HSHCGI_PEA_{—}3_T14 (SEQ ID NO:1201). Table 67 below describes the starting and ending position of this segment on each transcript.

TABLE 67
Segment location on transcripts

| | Segment | Segment |
|---|---|---|
| | starting | ending |
| Transcript name | position | position |
| HSHCGI_PEA_3_T5 (SEQ ID NO: 1192) | 1697 | 1758 |
| HSHCGI_PEA_3_T8 (SEQ ID NO: 1195) | 906 | 967 |
| HSHCGI_PEA_3_T12 (SEQ ID NO: 1199) | 1697 | 1758 |
| HSHCGI_PEA_3_T14 (SEQ ID NO: 1201) | 1567 | 1628 |

[3756] Segment cluster HSHCGI_PEA_{—}3_node_{—}23 (SEQ ID NO:1235) according to the present invention is supported by 30 libraries. The number of libraries was determined as previously described. This segment can be found in the following transcript(s): HSHCGI_PEA_{—}3_T0 (SEQ ID NO:1187), HSHCGI_PEA_{—}3_T1 (SEQ ID NO:1188), HSHCGI_PEA_{—}3_T2 (SEQ ID NO:1189), HSHCGI_PEA_{—}3_T3 (SEQ ID NO:1190), HSHCGI_PEA_{—}3_T4 (SEQ ID NO:1191), HSHCGI_PEA_{—}3_T5 (SEQ ID NO:1192), HSHCGI_PEA_{—}3_T6 (SEQ ID NO:1193), HSHCGI_PEA_{—}3_T8 (SEQ ID NO:1195), HSHCGI_PEA_{—}3_T9 (SEQ ID NO:1196), HSHCGI_PEA_{—}3_T12 (SEQ ID NO:1199), HSHCGI_PEA_{—}3_T13 (SEQ ID NO:1200), HSHCGI_PEA_{—}3_T14 (SEQ ID NO:1201) and HSHCGI_PEA_{—}3_T18 (SEQ ID NO:1204). Table 68 below describes the starting and ending position of this segment on each transcript.

TABLE 68
Segment location on transcripts

| | Segment | Segment |
|---|---|---|
| | starting | ending |
| Transcript name | position | position |
| HSHCGI_PEA_3_T0 (SEQ ID NO: 1187) | 878 | 921 |
| HSHCGI_PEA_3_T1 (SEQ ID NO: 1188) | 906 | 949 |
| HSHCGI_PEA_3_T2 (SEQ ID NO: 1189) | 879 | 922 |
| HSHCGI_PEA_3_T3 (SEQ ID NO: 1190) | 906 | 949 |
| HSHCGI_PEA_3_T4 (SEQ ID NO: 1191) | 770 | 813 |
| HSHCGI_PEA_3_T5 (SEQ ID NO: 1192) | 1759 | 1802 |
| HSHCGI_PEA_3_T6 (SEQ ID NO: 1193) | 460 | 503 |
| HSHCGI_PEA_3_T8 (SEQ ID NO: 1195) | 968 | 1011 |
| HSHCGI_PEA_3_T9 (SEQ ID NO: 1196) | 906 | 949 |
| HSHCGI_PEA_3_T12 (SEQ ID NO: 1199) | 1759 | 1802 |
| HSHCGI_PEA_3_T13 (SEQ ID NO: 1200) | 879 | 922 |
| HSHCGI_PEA_3_T14 (SEQ ID NO: 1201) | 1629 | 1672 |
| HSHCGI_PEA_3_T18 (SEQ ID NO: 1204) | 906 | 949 |

[3757] Segment cluster HSHCGI_PEA_{—}3_node_{—}24 (SEQ ID NO:1236) according to the present invention is supported by 38 libraries. The number of libraries was determined as previously described. This segment can be found in the following transcript(s): HSHCGI_PEA_{—}3_T0 (SEQ ID NO:1187), HSHCGI_PEA_{—}3_T1 (SEQ ID NO:1188), HSHCGI_PEA_{—}3_T2 (SEQ ID NO:1189), HSHCGI_PEA_{—}3_T3 (SEQ ID NO:1190), HSHCGI_PEA_{—}3_T4 (SEQ ID NO:1191), HSHCGI_PEA_{—}3_T5 (SEQ ID NO:1192), HSHCGI_PEA_{—}3_T6 (SEQ ID NO:1193), HSHCGI_PEA_{—}3_T8 (SEQ ID NO:1195), HSHCGI_PEA_{—}3_T9 (SEQ ID NO:1196), HSHCGI_PEA_{—}3_T10 (SEQ ID NO:1197), HSHCGI_PEA_{—}3_T11 (SEQ ID NO:1198), HSHCGI_PEA_{—}3_T12 (SEQ ID NO:1199), HSHCGI_PEA_{—}3_T13 (SEQ ID NO:1200), HSHCGI_PEA_{—}3_T14 (SEQ ID NO:1201) and HSHCGI_PEA_{—}3_T18 (SEQ ID NO:1204). Table 69 below describes the starting and ending position of this segment on each transcript.

TABLE 69
Segment location on transcripts

| | Segment | Segment |
|---|---|---|
| | starting | ending |
| Transcript name | position | position |
| HSHCGI_PEA_3_T0 (SEQ ID NO: 1187) | 922 | 993 |
| HSHCGI_PEA_3_T1 (SEQ ID NO: 1188) | 950 | 1021 |
| HSHCGI_PEA_3_T2 (SEQ ID NO: 1189) | 923 | 994 |
| HSHCGI_PEA_3_T3 (SEQ ID NO: 1190) | 950 | 1021 |
| HSHCGI_PEA_3_T4 (SEQ ID NO: 1191) | 814 | 885 |
| HSHCGI_PEA_3_T5 (SEQ ID NO: 1192) | 1803 | 1874 |
| HSHCGI_PEA_3_T6 (SEQ ID NO: 1193) | 504 | 575 |
| HSHCGI_PEA_3_T8 (SEQ ID NO: 1195) | 1012 | 1083 |
| HSHCGI_PEA_3_T9 (SEQ ID NO: 1196) | 950 | 1021 |
| HSHCGI_PEA_3_T10 (SEQ ID NO: 1197) | 906 | 977 |
| HSHCGI_PEA_3_T11 (SEQ ID NO: 1198) | 855 | 926 |
| HSHCGI_PEA_3_T12 (SEQ ID NO: 1199) | 1803 | 1874 |
| HSHCGI_PEA_3_T13 (SEQ ID NO: 1200) | 923 | 994 |
| HSHCGI_PEA_3_T14 (SEQ ID NO: 1201) | 1673 | 1744 |
| HSHCGI_PEA_3_T18 (SEQ ID NO: 1204) | 950 | 1021 |

[3758] Segment cluster HSHCGI_PEA_{—}3_node_{—}27 (SEQ ID NO:1237) according to the present invention is supported by 43 libraries. The number of libraries was determined as previously described. This segment can be found in the following transcript(s): HSHCGI_PEA_{—}3_T0 (SEQ ID NO:1187), HSHCGI_PEA_{—}3_T1 (SEQ ID NO:1188), HSHCGI_PEA_{—}3_T2 (SEQ ID NO:1189), HSHCGI_PEA_{—}3_T3 (SEQ ID NO:1190), HSHCGI_PEA_{—}3_T4 (SEQ ID NO:1191), HSHCGI_PEA_{—}3_T5 (SEQ ID NO:1192), HSHCGI_PEA_{—}3_T6 (SEQ ID NO:1193), HSHCGI_PEA_{—}3_T7 (SEQ ID NO:1194), HSHCGI_PEA_{—}3_T8 (SEQ ID NO:1195), HSHCGI_PEA_{—}3_T9 (SEQ ID NO:1196), HSHCGI_PEA_{—}3_T10 (SEQ ID NO:1197), HSHCGI_PEA_{—}3_T11 (SEQ ID NO:1198), HSHCGI_PEA_{—}3_T12 (SEQ ID NO:1199), HSHCGI_PEA_{—}3_T13 (SEQ ID NO:1200), HSHCGI_PEA_{—}3_T14 (SEQ ID NO:1201), HSHCGI_PEA_{—}3_T15 (SEQ ID NO:1202), HSHCGI_PEA_{—}3_T18 (SEQ ID NO:1204), HSHCGI_PEA_{—}3_T19 (SEQ ID NO:1205), HSHCGI_PEA_{—}3_T20 (SEQ ID NO:1206) and HSHCGI_PEA_{—}3_T24 (SEQ ID NO:1210). Table 70 below describes the starting and ending position of this segment on each transcript.

TABLE 70
Segment location on transcripts

| | Segment | Segment |
|---|---|---|
| | starting | ending |
| Transcript name | position | position |
| HSHCGI_PEA_3_T0 (SEQ ID NO: 1187) | 994 | 1068 |
| HSHCGI_PEA_3_T1 (SEQ ID NO: 1188) | 1022 | 1096 |
| HSHCGI_PEA_3_T2 (SEQ ID NO: 1189) | 995 | 1069 |
| HSHCGI_PEA_3_T3 (SEQ ID NO: 1190) | 1022 | 1096 |
| HSHCGI_PEA_3_T4 (SEQ ID NO: 1191) | 886 | 960 |
| HSHCGI_PEA_3_T5 (SEQ ID NO: 1192) | 1875 | 1949 |
| HSHCGI_PEA_3_T6 (SEQ ID NO: 1193) | 576 | 650 |
| HSHCGI_PEA_3_T7 (SEQ ID NO: 1194) | 906 | 980 |
| HSHCGI_PEA_3_T8 (SEQ ID NO: 1195) | 1084 | 1158 |
| HSHCGI_PEA_3_T9 (SEQ ID NO: 1196) | 1022 | 1096 |
| HSHCGI_PEA_3_T10 (SEQ ID NO: 1197) | 978 | 1052 |
| HSHCGI_PEA_3_T11 (SEQ ID NO: 1198) | 927 | 1001 |
| HSHCGI_PEA_3_T12 (SEQ ID NO: 1199) | 1875 | 1949 |
| HSHCGI_PEA_3_T13 (SEQ ID NO: 1200) | 995 | 1069 |
| HSHCGI_PEA_3_T14 (SEQ ID NO: 1201) | 1745 | 1819 |
| HSHCGI_PEA_3_T15 (SEQ ID NO: 1202) | 421 | 495 |
| HSHCGI_PEA_3_T18 (SEQ ID NO: 1204) | 1022 | 1096 |
| HSHCGI_PEA_3_T19 (SEQ ID NO: 1205) | 421 | 495 |
| HSHCGI_PEA_3_T20 (SEQ ID NO: 1206) | 421 | 495 |
| HSHCGI_PEA_3_T24 (SEQ ID NO: 1210) | 421 | 495 |

[3759] Segment cluster HSHCGI_PEA_{—}3_node_{—}31 (SEQ ID NO:1238) according to the present invention is supported by 34 libraries. The number of libraries was determined as previously described. This segment can be found in the following transcript(s): HSHCGI_PEA_{—}3_T0 (SEQ ID NO:1187), HSHCGI_PEA_{—}3_T1 (SEQ ID NO:1188), HSHCGI_PEA_{—}3_T2 (SEQ ID NO:1189), HSHCGI_PEA_{—}3_T3 (SEQ ID NO:1190), HSHCGI_PEA_{—}3_T4 (SEQ ID NO:1191), HSHCGI_PEA_{—}3_T5 (SEQ ID NO:1192), HSHCGI_PEA_{—}3_T6 (SEQ ID NO:1193), HSHCGI_PEA_{—}3_T7 (SEQ ID NO:1194), HSHCGI_PEA_{—}3_T8 (SEQ ID NO:1195), HSHCGI_PEA_{—}3_T9 (SEQ ID NO:1196), HSHCGI_PEA_{—}3_T10 (SEQ ID NO:1197), HSHCGI_PEA_{—}3_T11 (SEQ ID NO:1198), HSHCGI_PEA_{—}3_T12 (SEQ ID NO:1199), HSHCGI_PEA_{—}3_T13 (SEQ ID NO:1200), HSHCGI_PEA_{—}3_T14 (SEQ ID NO:1201), HSHCGI_PEA_{—}3_T15 (SEQ ID NO:1202), HSHCGI_PEA_{—}3_T17 (SEQ ID NO:1203), HSHCGI_PEA_{—}3_T19 (SEQ ID NO:1205) and HSHCGI_PEA_{—}3_T20 (SEQ ID NO:1206). Table 71 below describes the starting and ending position of this segment on each transcript.

TABLE 71
Segment location on transcripts

| | Segment | Segment |
|---|---|---|
| | starting | ending |
| Transcript name | position | position |
| HSHCGI_PEA_3_T0 (SEQ ID NO: 1187) | 1069 | 1134 |
| HSHCGI_PEA_3_T1 (SEQ ID NO: 1188) | 1097 | 1162 |
| HSHCGI_PEA_3_T2 (SEQ ID NO: 1189) | 1070 | 1135 |
| HSHCGI_PEA_3_T3 (SEQ ID NO: 1190) | 1097 | 1162 |
| HSHCGI_PEA_3_T4 (SEQ ID NO: 1191) | 961 | 1026 |
| HSHCGI_PEA_3_T5 (SEQ ID NO: 1192) | 1950 | 2015 |
| HSHCGI_PEA_3_T6 (SEQ ID NO: 1193) | 651 | 716 |
| HSHCGI_PEA_3_T7 (SEQ ID NO: 1194) | 981 | 1046 |
| HSHCGI_PEA_3_T8 (SEQ ID NO: 1195) | 1159 | 1224 |
| HSHCGI_PEA_3_T9 (SEQ ID NO: 1196) | 1097 | 1162 |
| HSHCGI_PEA_3_T10 (SEQ ID NO: 1197) | 1053 | 1118 |
| HSHCGI_PEA_3_T11 (SEQ ID NO: 1198) | 1002 | 1067 |
| HSHCGI_PEA_3_T12 (SEQ ID NO: 1199) | 1950 | 2015 |
| HSHCGI_PEA_3_T13 (SEQ ID NO: 1200) | 1070 | 1135 |
| HSHCGI_PEA_3_T14 (SEQ ID NO: 1201) | 1820 | 1885 |
| HSHCGI_PEA_3_T15 (SEQ ID NO: 1202) | 496 | 561 |
| HSHCGI_PEA_3_T17 (SEQ ID NO: 1203) | 422 | 487 |
| HSHCGI_PEA_3_T19 (SEQ ID NO: 1205) | 496 | 561 |
| HSHCGI_PEA_3_T20 (SEQ ID NO: 1206) | 496 | 561 |

[3760] Segment cluster HSHCGI_PEA_{—}3_node_{—}35 (SEQ ID NO:1239) according to the present invention is supported by 38 libraries. The number of libraries was determined as previously described. This segment can be found in the following transcript(s): HSHCGI_PEA_{—}3_T0 (SEQ ID NO:1187), HSHCGI_PEA_{—}3_T1 (SEQ ID NO:1188), HSHCGI_PEA_{—}3_T2 (SEQ ID NO:1189), HSHCGI_PEA_{—}3_T3 (SEQ ID NO:1190), HSHCGI_PEA_{—}3_T4 (SEQ ID NO:1191), HSHCGI_PEA_{—}3_T5 (SEQ ID NO:1192), HSHCGI_PEA_{—}3_T6 (SEQ ID NO:1193), HSHCGI_PEA_{—}3_T7 (SEQ ID NO:1194), HSHCGI_PEA_{—}3_T8 (SEQ ID NO:1195), HSHCGI_PEA_{—}3_T9 (SEQ ID NO:1196), HSHCGI_PEA_{—}3_T10 (SEQ ID NO:1197), HSHCGI_PEA_{—}3_T11 (SEQ ID NO:1198), HSHCGI_PEA_{—}3_T12 (SEQ ID NO:1199), HSHCGI_PEA_{—}3_T13 (SEQ ID NO:1200), HSHCGI_PEA_{—}3_T14 (SEQ ID NO:1201), HSHCGI_PEA_{—}3_T15 (SEQ ID NO:1202), HSHCGI_PEA_{—}3_T17 (SEQ ID NO:1203), HSHCGI_PEA_{—}3_T19 (SEQ ID NO:1205) and HSHCGI_PEA_{—}3_T20 (SEQ ID NO:1206). Table 72 below describes the starting and ending position of this segment on each transcript.

TABLE 72
Segment location on transcripts

| | Segment | Segment |
|---|---|---|
| | starting | ending |
| Transcript name | position | position |
| HSHCGI_PEA_3_T0 (SEQ ID NO: 1187) | 1679 | 1791 |
| HSHCGI_PEA_3_T1 (SEQ ID NO: 1188) | 1707 | 1819 |
| HSHCGI_PEA_3_T2 (SEQ ID NO: 1189) | 1680 | 1792 |
| HSHCGI_PEA_3_T3 (SEQ ID NO: 1190) | 1481 | 1593 |
| HSHCGI_PEA_3_T4 (SEQ ID NO: 1191) | 1571 | 1683 |
| HSHCGI_PEA_3_T5 (SEQ ID NO: 1192) | 2560 | 2672 |
| HSHCGI_PEA_3_T6 (SEQ ID NO: 1193) | 1261 | 1373 |
| HSHCGI_PEA_3_T7 (SEQ ID NO: 1194) | 1591 | 1703 |
| HSHCGI_PEA_3_T8 (SEQ ID NO: 1195) | 1769 | 1881 |
| HSHCGI_PEA_3_T9 (SEQ ID NO: 1196) | 2019 | 2131 |
| HSHCGI_PEA_3_T10 (SEQ ID NO: 1197) | 1663 | 1775 |
| HSHCGI_PEA_3_T11 (SEQ ID NO: 1198) | 1612 | 1724 |
| HSHCGI_PEA_3_T12 (SEQ ID NO: 1199) | 2872 | 2984 |
| HSHCGI_PEA_3_T13 (SEQ ID NO: 1200) | 1680 | 1792 |
| HSHCGI_PEA_3_T14 (SEQ ID NO: 1201) | 2430 | 2542 |
| HSHCGI_PEA_3_T15 (SEQ ID NO: 1202) | 1106 | 1218 |
| HSHCGI_PEA_3_T17 (SEQ ID NO: 1203) | 1344 | 1456 |
| HSHCGI_PEA_3_T19 (SEQ ID NO: 1205) | 1418 | 1530 |
| HSHCGI_PEA_3_T20 (SEQ ID NO: 1206) | 880 | 992 |

### Variant Protein Alignment to the Previously Known Protein:

[chemical structure]

[chemical structure]

[chemical structure]

[chemical structure]

[chemical structure]

[chemical structure]

[chemical structure]

[chemical structure]

[chemical structure]

[chemical structure]

[chemical structure]

[chemical structure]

[chemical structure]

[chemical structure]

[chemical structure]

[chemical structure]

[chemical structure]

[chemical structure]

[chemical structure]

[chemical structure]

[chemical structure]

[chemical structure]

[chemical structure]

[chemical structure]

[chemical structure]

[chemical structure]

[chemical structure]

[chemical structure]

[chemical structure]

[chemical structure]

[chemical structure]

[chemical structure]

[chemical structure]

[chemical structure]

[chemical structure]

[chemical structure]

[chemical structure]

[chemical structure]

[chemical structure]

[chemical structure]

[chemical structure]

[chemical structure]

[chemical structure]

[chemical structure]

[chemical structure]

[chemical structure]

[chemical structure]

[chemical structure]

[chemical structure]

[chemical structure]

[chemical structure]

[chemical structure]

[chemical structure]

[chemical structure]

[chemical structure]

[chemical structure]

[chemical structure]

[chemical structure]

[chemical structure]

[chemical structure]

[chemical structure]

[chemical structure]

[chemical structure]

[chemical structure]

[chemical structure]

[chemical structure]

### Expression of TRIM31 Tripartite Motif HSHCGI Transcripts which are Detectable by Amplicon as Depicted in Sequence Name HSHCGI Seg20 (SEQ ID NO:1378) in Normal and Cancerous Colon Tissues

[3762] Expression of TRIM31 tripartite motif transcripts detectable by or according to seg20, HSHCGIseg20 amplicon (SEQ ID NO: 1378) and HSHCGIseg20F (SEQ ID NO: 1376) HSHCGIseg20R (SEQ ID NO: 1377) primers was measured by real time PCR. In parallel the expression of four housekeeping genes —PBGD (GenBank Accession No. BC019323 (SEQ ID NO:1576); amplicon—PBGD-amplicon, SEQ ID NO:531), HPRT1 (GenBank Accession No. NM_{—}000194 (SEQ ID NO:1577); amplicon—HPRT1-amplicon, SEQ ID NO:612), G6PD (GenBank Accession No. NM_{—}000402 (SEQ ID NO:1578); G6PD amplicon, SEQ ID NO:615), RPS27A (GenBank Accession No. NM_{—}002954 (SEQ ID NO:1579); RPS27A amplicon, SEQ ID NO:1261), was measured similarly. For each RT sample, the expression of the above amplicon was normalized to the geometric mean of the quantities of the housekeeping genes. The normalized quantity of each RT sample was then divided by the median of the quantities of the normal post-mortem (PM) samples (Sample Nos. 41, 52, 62-67, 69-71, Table 1, above, “Tissue samples in testing samples”), to obtain a value of fold up-regulation for each sample relative to median of the normal PM samples.

[3763] FIG. 69 is a histogram showing over expression of the above-indicated TRIM31 tripartite motif transcripts in cancerous colon samples relative to the normal samples. The number and percentage of samples that exhibit at least 3 fold over-expression, out of the total number of samples tested is indicated in the bottom.

[3764] FIG. 70 is a histogram showing over expression of the above-indicated TRIM31 tripartite motif transcripts in cancerous colon samples relative to the normal samples. The number and percentage of samples that exhibit at least 3 fold over-expression, out of the total number of samples tested is indicated in the bottom.

[3765] As is evident from FIG. 70, the expression of TRIM31 tripartite motif transcripts detectable by the above amplicon in cancer samples was significantly higher than in the non-cancerous samples (Sample Nos. 41-45, 49-52, 62-67, 69-71 Table 1, , “Tissue samples in testing samples”). Notably an over-expression of at least 3 fold was found in 8 out of 37 adenocarcinoma samples,

[3766] Statistical analysis was applied to verify the significance of these results, as described below.

[3767] The P value for the difference in the expression levels of TRIM31 tripartite motif transcripts detectable by the above amplicon in colon cancer samples versus the normal tissue samples was determined by T test as 7.56E-03.

[3768] Primer pairs are also optionally and preferably encompassed within the present invention; for example, for the above experiment, the following primer pair was used as a non-limiting illustrative example only of a suitable primer pair: HSHCGIseg35F forward primer (SEQ ID NO: 1379); and HSHCGIseg35R reverse primer (SEQ ID NO: 1380).

[3769] The present invention also preferably encompasses any amplicon obtained through the use of any suitable primer pair; for example, for the above experiment, the following amplicon was obtained as a non-limiting illustrative example only of a suitable amplicon: HSHCGIseg35 (SEQ ID NO: 1381).

Forward primer (SEQ ID NO: 1379):
TAAGTCTACAGGTGGTCAAAATGCTG
Reverse primer (SEQ ID NO: 1380):
GGAGCGCCCTCTGTTTCC
Amplicon (SEQ ID NO: 1381):
TAAGTCTACAGGTGGTCAAAATGCTGTATCCACCCAATTCCACTAAATGG
AATAAATGAATAAATGAATGAATTCATTTATTCCATTTCCTCAGTTCCTC
CCCAAATTACACCTCTGCCAGGAAACAGAGGGCGCTCC

[3770] It should be noted that for R30650_PEA_{—}2-seg73, no differential expression was observed in one Q-PCR experiment carried out with colon panel. For HUMCEA_PEA_{—}1 seg 6—no differential expression was observed in one Q-PCR experiment carried out with colon panel.

It is appreciated that certain features of the invention, which are, for clarity, described in the context of separate embodiments, may also be provided in combination in a single embodiment. Conversely, various features of the invention, which are, for brevity, described in the context of a single embodiment, may also be provided separately or in any suitable subcombination.

[3771] Although the invention has been described in conjunction with specific embodiments thereof, it is evident that many alternatives, modifications and variations will be apparent to those skilled in the art. Accordingly, it is intended to embrace all such alternatives, modifications and variations that fall within the spirit and broad scope of the appended claims. All publications, patents and patent applications mentioned in this specification are herein incorporated in their entirety by reference into the specification, to the same extent as if each individual publication, patent or patent application was specifically and individually indicated to be incorporated herein by reference. In addition, citation or identification of any reference in this application shall not be construed as an admission that such reference is available as prior art to the present invention.

[3772] As is evident from FIG. 69, the expression of TRIM31 tripartite motif transcripts detectable by the above amplicon in cancer samples was higher than in the non-cancerous samples (Sample Nos. 41, 52, 62-67, 69-71, Table 1, “Tissue samples in testing samples”). Notably an over-expression of at least 3 fold was found in 6 out of 37 adenocarcinoma samples,

[3773] Statistical analysis was applied to verify the significance of these results, as described below.

[3774] The P value for the difference in the expression levels of TRIM31 tripartite motif transcripts detectable by the above amplicon in colon cancer samples versus the normal tissue samples was determined by T test as 6.58E-02.

[3775] Primer pairs are also optionally and preferably encompassed within the present invention; for example, for the above experiment, the following primer pair was used as a non-limiting illustrative example only of a suitable primer pair: HSHCGIseg20F forward primer (SEQ ID NO: 1376); and HSHCGIseg20R reverse primer (SEQ ID NO: 1377).

[3776] The present invention also preferably encompasses any amplicon obtained through the use of any suitable primer pair; for example, for the above experiment, the following amplicon was obtained as a non-limiting illustrative example only of a suitable amplicon: HSHCGIseg20 (SEQ ID NO: 1378).

Forward primer (SEQ ID NO: 1376):
TGCCTACTGATTCATCCACATACA
Reverse primer (SEQ ID NO: 1377):
GCATTCCCCGGCTGC
Amplicon (SEQ ID NO: 1378):
TGCCTACTGATTCATCCACATACAATTCTCAGCGTATATCCAAATGCAGT
CAACATTCCTCTCTCAGAAATACCCACCCACCTCTAACTCTGCATTCATA
CATTTAGGCTGCAGCCGGGGAATGC

### Expression of TRIM31 Tripartite Motif HSHCGI Transcripts which are Detectable by Amplicon as Depicted in Sequence Name HSHCGI Seg35 (SEQ ID NO: 1381) in Normal and Cancerous Colon Tissues

[3777] Expression of TRIM31 tripartite motif transcripts detectable by or according to seg35, HSHCGIseg35 amplicon (SEQ ID NO: 1381) and HSHCGIseg35F (SEQ ID NO: 1379) HSHCGIseg35R (SEQ ID NO: 1380) primers was measured by real time PCR. In parallel the expression of four housekeeping genes —PBGD (GenBank Accession No. BC019323 (SEQ ID NO:1576); amplicon—PBGD-amplicon, SEQ ID NO:531), HPRT1 (GenBank Accession No. NM_{—}000194 (SEQ ID NO:1577); amplicon—HPRT1-amplicon, SEQ ID NO:612), G6PD (GenBank Accession No. NM_{—}000402 (SEQ ID NO:1578); G6PD amplicon, SEQ ID NO:615), RPS27A (GenBank Accession No. NM_{—}002954 (SEQ ID NO:1579); RPS27A amplicon, SEQ ID NO:1261), was measured similarly. For each RT sample, the expression of the above amplicon was normalized to the geometric mean of the quantities of the housekeeping genes. The normalized quantity of each RT sample was then divided by the median of the quantities of the normal post-mortem (PM) samples (Sample Nos. 41, 52, 62-67, 69-71, Table 1, above, “Tissue samples in testing samples”), to obtain a value of fold up-regulation for each sample relative to median of the normal PM samples.

What is claimed is:

1. An isolated polynucleotide comprising the polynucleotide sequence set forth in a member selected from the group consisting of SEQ ID NOs: 1-522, 643-678, 693-702, 705-789, 806-862, 871-921, 929-985, 998-1061, 1081-1140, 1157-1182, 1187-1239, 1276, 1279, 1282, 1285, 1288, 1291, 1294, 1297, 1300, 1303, 1306, 1309, 1312, 1315, 1318, 1321, 1331-1334, 1337-1339, 1342, 1345, 1348, 1351, 1354, 1357, 1360, 1363, 1366, 1369, 1372, 1375, 1378, 1381, 1398-1441, 1586, 1589 and 1592, or a sequence at least about 95% identical thereto.

2. An isolated polypeptide comprising the polypeptide sequence set forth in a member selected from the group consisting of SEQ ID NOs: 524-528, 534-611, 683-692, 703-704, 792-805, 864-870, 923-928, 991-997, 1063-1080, 1151-1156, 1183-1186, 1243-1259, and 1442-1575.

3. An expression vector comprising the polynucleotide sequence according to claim 1.

4. A host cell comprising the vector of claim 3.

5. A process for producing a polypeptide comprising:
culturing the host cell according to claim 4 under conditions suitable to produce the polypeptide encoded by said polynucleotide; and recovering said polypeptide.

6. An isolated primer pair, comprising the pair of nucleic acid sequences selected from the group consisting of: SEQ NOs: 1274-1275, 1277-1278, 1280-1281, 1283-1284, 1286-1287, 1289-1290, 1292-1293, 1298-1299, 1301-1302, 1304-1305, 1307-1308, 1310-1311, 1313-1314, 1316-1317, 1319-1320, 1335-1336, 1340-1341, 1343-1344, 1346-1347, 1349-1350, 1352-1353, 1355-1356, 1358-1359, 1361-1362, 1364-1365, 1367-1368, 1370-1371, 1373-1374, 1376-1377, 1379-1380, 1584-1585, 1587-1588, and 1590-1591.

7. An antibody to specifically bind to the polypeptide of claim 2.

8. A kit for detecting colon cancer, comprising at least one primer pair of claim 6.

9. A kit for detecting colon cancer, comprising the antibody of claim 7.

10. The kit of claim 9, wherein said immunoassay is selected from the group consisting of an enzyme linked immunosorbent assay (ELISA), an immunoprecipitation assay, an immunofluorescence analysis, an enzyme immunoassay (EIA), a radioimmunoassay (RIA), or a Western blot analysis.

11. A method for detecting colon cancer, comprising detecting overexpression of the polynucleotide sequence set forth in a member selected from the group consisting of SEQ ID NOs: 1-522, 643-678, 693-702, 705-789, 806-862, 871-921, 929-985, 998-1061, 1081-1140, 1157-1182, 1187-1239, 1276, 1279, 1282, 1285, 1288, 1291, 1294, 1297, 1300, 1303, 1306, 1309, 1312, 1315, 1318, 1321, 1331-1334, 1337-1339, 1342, 1345, 1348, 1351, 1354, 1357, 1360, 1363, 1366, 1369, 1372, 1375, 1378, 1381, 1398-1441, 1586, 1589 and 1592, or a sequence at least about 95% identical thereto in a sample from a patient.

12. The method of claim 11, wherein said detecting overexpression comprises performing nucleic acid amplification.

13. A method for detecting colon cancer, comprising detecting overexpression of the polypeptide comprising the polypeptide sequence set forth in a member selected from the group consisting of SEQ ID NOs: 524-528, 534-611, 683-692, 703-704, 792-805, 864-870, 923-928, 991-997, 1063-1080, 1151-1156, 1183-1186, 1243-1259, and 1442-1575 in a sample from a patient.

14. The method of claim 13, wherein said detecting comprises detecting binding of the antibody of claim 7 to the polypeptide comprising the polypeptide sequence set forth in a member selected from the group consisting of SEQ ID NOs: 524-528, 534-611, 683-692, 703-704, 792-805, 864-870, 923-928, 991-997, 1063-1080, 1151-1156, 1183-1186, 1243-1259, and 1442-1575 in a sample from a patient.

15. A biomarker for detecting colon cancer, comprising an amino acid sequence of claim 2, marked with a label.

16. A method to screen for or to diagnose colon cancer, comprising detecting the disease with the biomarker of claim 15.

17. A method for monitoring disease progression, treatment efficacy or relapse of colon cancer, comprising detecting the disease with the biomarker of claim 15.

18. A method of selecting a therapy for colon cancer, comprising detecting the disease with the biomarker of claim 15 and selecting a therapy according to said detection.

19. A biomarker for detecting colon cancer, comprising a nucleotide acid sequence set forth in a member selected from the group consisting of SEQ ID NOs: 1-522, 643-678, 693-702, 705-789, 806-862, 871-921, 929-985, 998-1061, 1081-1140, 1157-1182, 1187-1239, 1276, 1279, 1282, 1285, 1288, 1291, 1294, 1297, 1300, 1303, 1306, 1309, 1312, 1315, 1318, 1321, 1331-1334, 1337-1339, 1342, 1345, 1348, 1351, 1354, 1357, 1360, 1363, 1366, 1369, 1372, 1375, 1378, 1381, 1398-1441, 1586, 1589 and 1592, or a sequence at least about 95% identical thereto.

20. A method to screen for or to diagnose colon cancer, comprising detecting the disease with the biomarker of claim 19.

21. A method for monitoring disease progression, treatment efficacy or relapse of colon cancer, comprising detecting the disease with the biomarker of claim 19.

22. A method of selecting a therapy for colon cancer, comprising detecting the disease with the biomarker of claim 19 and selecting a therapy according to said detection.

The application's sequence listing, which the Patent Office published only in electronic form, follows.

SEQUENCE LISTING (1592 sequences)

SEQ ID NO: 1 - DNA, 2875 bp, Homo sapiens
tctgctggctgcgcggtggcggcggctgtgtgtgcgccgcgccttgccgccccccctggccccccgagcccggggcgcgcgctcccgcccgggccgtccgggccccgcggcgccgcggcccgaggccccgggaagcgcagccatggctctgcggaggctgggggccgcgctgctgctgctgccgctgctcgccgccgtggaagaaacgctaatggactccactacagcgactgctgagctgggctggatggtgcatcctccatcagggtgggaagaggtgagtggctacgatgagaacatgaacacgatccgcacgtaccaggtgtgcaacgtgtttgagtcaagccagaacaactggctacggaccaagtttatccggcgccgtggcgcccaccgcatccacgtggagatgaagttttcggtgcgtgactgcagcagcatccccagcgtgcctggctcctgcaaggagaccttcaacctctattactatgaggctgactttgactcggccaccaagaccttccccaactggatggagaatccatgggtgaaggtggataccattgcagccgacgagagcttctcccaggtggacctgggtggccgcgtcatgaaaatcaacaccgaggtgcggagcttcggacctgtgtcccgcagcggcttctacctggccttccaggactatggcggctgcatgtccctcatcgccgtgcgtgtcttctaccgcaagtgcccccgcatcatccagaatggcgccatcttccaggaaaccctgtcgggggctgagagcacatcgctggtggctgcccggggcagctgcatcgccaatgcggaagaggtggatgtacccatcaagctctactgtaacggggacggcgagtggctggtgcccatcgggcgctgcatgtgcaaagcaggcttcgaggccgttgagaatggcaccgtctgccgaggttgtccatctgggactttcaaggccaaccaaggggatgaggcctgtacccactgtcccatcaacagccggaccacttctgaaggggccaccaactgtgtctgccgcaatggctactacagagcagacctggaccccctggacatgccctgcacaaccatcccctccgcgccccaggctgtgatttccagtgtcaatgagacctccctcatgctggagtggacccctccccgcgactccggaggccgagaggacctcgtctacaacatcatctgcaagagctgtggctcgggccggggtgcctgcacccgctgcggggacaatgtacagtacgcaccacgccagctaggcctgaccgagccacgcatttacatcagtgacctgctggcccacacccagtacaccttcgagatccaggctgtgaacggcgttactgaccagagccccttctcgcctcagttcgcctctgtgaacatcaccaccaaccaggcagctccatcggcagtgtccatcatgcatcaggtgagccgcaccgtggacagcattaccctgtcgtggtcccagccagaccagcccaatggcgtgatcctggactatgagctgcagtactatgagaaggtacctattggctgggtgctgtccccatcacccacctccctgagggcccctctcccaggctgaggcctgggagttctgccccaccgcaagatgagacgcactggtgcagcagaaagagcactggccttggagtcaggctgcctggctcccaatccagctccgctccttcccactgtgagacctcaggcaggtgccttgacctctctggatctcacttttctggtctggaggatacacccagcaatctcagtgaaatgcaacagtcacatccctttccctaccacgaccctttcatcttgacctcagtggcttgatgttgggaaaaactgggtttccaaaaagctgcacttatgaagtgataattagtcactcacctcttcttcgacagagatttgaaacagctcaagagagcttccgcctgccctgctctgagtcctgctaaaacacccactttcactcgcctgcatgccctttgcatggggagaggtgatttcactttgagcttttaaatcagaccttaattactccctttgggtggaagcccctgggatggtagaaggatcactggactaagagtgagaagccgtaggttcaaatcccagctccgtccttcaccagctatgtgaccttgggcaggcgtctttctccctctgaacctcagtttccacctgtgtcgagtgtgggtgagacccctcgcggggagctatgcaggttacggagaaaaggcagcacagcacccagaatgggacctggccctcagcagaggccatgtgtgtccctggccttcctcctctgccctgcctgctgcacagtgggcaatggtgacaggatgggaggccaagtggatgtggggtctgcacagtacaggggccaggaggtagacagcacaattgcccacccacatggctggacatcagaggccccaggaagcctctcctttgaatgatcacttctcttacctgctccaggaggcaacaaacagccacagaggctgcaagggcacctgggaaaggcatcgcggggcttccattcagactaggtgtcaatgactgacagggaggcctttggttgagggcaagcccacggggaactgcagatggatggaagggctctccctgaaggctgagaggaagagtgcagtcaattgcagccagtcctgctggagcccaactttctagagcccagcccggccttcccactctgttaactgctggatcggctaaccaggccggtctccagggcctttcaaacacttacccagcctttgccggccgtcttaccattgcttgcgtgcgtgttcatccc

SEQ ID NO: 2 - DNA, 1182 bp, Homo sapiens
tctgctggctgcgcggtggcggcggctgtgtgtgcgccgcgccttgccgccccccctggccccccgagcccggggcgcgcgctcccgcccgggccgtccgggccccgcggcgccgcggcccgaggccccgggaagcgcagccatggctctgcggaggctgggggccgcgctgctgctgctgccgctgctcgccgccgtggaagaaacgctaatggactccactacagcgactgctgagctgggctggatggtgcatcctccatcagggtgggaagaggtgagtggctacgatgagaacatgaacacgatccgcacgtaccaggtgtgcaacgtgtttgagtcaagccagaacaactggctacggaccaagtttatccggcgccgtggcgcccaccgcatccacgtggagatgaagttttcggtgcgtgactgcagcagcatccccagcgtgcctggctcctgcaaggagaccttcaacctctattactatgaggctgactttgactcggccaccaagaccttccccaactggatggagaatccatgggtgaaggtggataccattgcagccgacgagagcttctcccaggtggacctgggtggccgcgtcatgaaaatcaacaccgaggtgcggagcttcggacctgtgtcccgcagcggcttctacctggccttccaggactatggcggctgcatgtccctcatcgccgtgcgtgtcttctaccgcaagtgcccccgcatcatccagaatggcgccatcttccaggaaaccctgtcgggggctgagagcacatcgctggtggctgcccggggcagctgcatcgccaatgcggaagaggtggatgtacccatcaagctctactgtaacggggacggcgagtggctggtgcccatcgggcgctgcatgtgcaaagcaggcttcgaggccgttgagaatggcaccgtctgccgagagagacaggatctcactatgttgtccaggctggtcttgaactcgtggccacaaatgatcctcccacctcagcctcccaaagtgttggaattataggcatgaaccaccatgcccaggaggagaatttttgataataatattttgtggacatctttgcatatcatgtcagagctataacatcattgtggagaagctcttaggatcccatagaataaatgtaccgtaattta

SEQ ID NO: 3 - DNA, 2518 bp, Homo sapiens
tgaccctgggaaatgcttctatccctgagaggaggctcagcacagaaggaggaaggacagcagggccaacagtcacagcagccctgaccagagcattcctggagctcaagctcctctacaaagaggtggacagagaagacagcagagaccatgggacccccctcagcccctccctgcagattgcatgtcccctggaaggaggtcctgctcacagcctcacttctaaccttctggaacccacccaccactgccaagctcactattgaatccacgccgttcaatgtcgcagaggggaaggaggttcttctactcgcccacaacctgccccagaatcgtattggttacagctggtacaaaggcgaaagagtggatggcaacagtctaattgtaggatatgtaataggaactcaacaagctaccccagggcccgcatacagtggtcgagagacaatataccccaatgcatccctgctgatccagaacgtcacccagaatgacacaggattctataccctacaagtcataaagtcagatcttgtgaatgaagaagcaaccggacagttccatgtatacccggagctgcccaagccctccatctccagcaacaactccaaccccgtggaggacaaggatgctgtggccttcacctgtgaacctgaggttcagaacacaacctacctgtggtgggtaaatggtcagagcctcccggtcagtcccaggctgcagctgtccaatggcaacatgaccctcactctactcagcgtcaaaaggaacgatgcaggatcctatgaatgtgaaatacagaacccagcgagtgccaaccgcagtgacccagtcaccctgaatgtcctctatggcccagatgtccccaccatttccccctcaaaggccaattaccgtccaggggaaaatctgaacctctcctgccacgcagcctctaacccacctgcacagtactcttggtttatcaatgggacgttccagcaatccacacaagagctctttatccccaacatcactgtgaataatagcggatcctatatgtgccaagcccataactcagccactggcctcaataggaccacagtcacgatgatcacagtctctgattggaccagaccctgaattcttctagctcctccaatcccattttatcccatggaaccactaaaaacaaggtctgctctgctcctgaagccctatatgctggagatggacaactcaatgaaaatttaaagggaaaaccctcaggcctgaggtgtgtgccactcagagacttcacctaactagagacaggcaaactgcaaaccatggtgagaaattgacgacttcacactatggacagcttttcccaagatgtcaaaacaagactcctcatcatgataaggctcttacccccttttaatttgtccttgcttatgcctgcctctttcgcttggcaggatgatgctgtcattagtatttcacaagaagtagcttcagagggtaacttaacagagtatcagatctatcttgtcaatcccaacgttttacataaaataagagatcctttagtgcacccagtgactgacattagcagcatctttaacacagccgtgtgttcaaatgtacagtggtccttttcagagttggacttctagactcacctgttctcactccctgttttaattcaacccagccatgcaatgccaaataatagaattgctccctaccagctgaacagggaggagtctgtgcagtttctgacacttgttgttgaacatggctaaatacaatgggtatcgctgagactaagttgtagaaattaacaaatgtgctgcttggttaaaatggctacactcatctgactcattctttattctattttagttggtttgtatcttgcctaaggtgcgtagtccaactcttggtattaccctcctaatagtcatactagtagtcatactccctggtgtagtgtattctctaaaagctttaaatgtctgcatgcagccagccatcaaatagtgaatggtctctctttggctggaattacaaaactcagagaaatgtgtcatcaggagaacatcataacccatgaaggataaaagccccaaatggtggtaactgataatagcactaatgctttaagatttggtcacactctcacctaggtgagcgcattgagccagtggtgctaaatgctacatactccaactgaaatgttaaggaagaagatagatccaattaaaaaaaattaaaaccaatttaaaaaaaaaaagaacacaggagattccagtctacttgagttagcataatacagaagtcccctctactttaacttttacaaaaaagtaacctgaactaatctgatgttaaccaatgtatttatttctgtggttctgtttccttgttccaatttgacaaaacccactgttcttgtattgtattgcccagggggagctatcactgtacttgtagagtggtgctgctttaattcataaatcacaaataaaagccaattagctctataactaaa

SEQ ID NO: 4 - DNA, 2376 bp, Homo sapiens
tgaccctgggaaatgcttctatccctgagaggaggctcagcacagaaggaggaaggacagcagggccaacagtcacagcagccctgaccagagcattcctggagctcaagctcctctacaaagaggtggacagagaagacagcagagaccatgggacccccctcagcccctccctgcagattgcatgtcccctggaaggaggtcctgctcacagcctcacttctaaccttctggaacccacccaccactgccaagctcactattgaatccacgccgttcaatgtcgcagaggggaaggaggttcttctactcgcccacaacctgccccagaatcgtattggttacagctggtacaaaggcgaaagagtggatggcaacagtctaattgtaggatatgtaataggaactcaacaagctaccccagggcccgcatacagtggtcgagagacaatataccccaatgcatccctgctgatccagaacgtcacccagaatgacacaggattctataccctacaagtcataaagtcagatcttgtgaatgaagaagcaaccggacagttccatgtatacccggagctgcccaagccctccatctccagcaacaactccaaccccgtggaggacaaggatgctgtggccttcacctgtgaacctgaggttcagaacacaacctacctgtggtgggtaaatggtcagagcctcccggtcagtcccaggctgcagctgtccaatggcaacatgaccctcactctactcagcgtcaaaaggaacgatgcaggatcctatgaatgtgaaatacagaacccagcgagtgccaaccgcagtgacccagtcaccctgaatgtcctcttgctcctgtcctctcagctgtggccaccgtcggcatcacgattggagtgctggccagggtggctctgatatagcagccctggtgtattttcgatatttcaggaagactggcagattggaccagaccctgaattcttctagctcctccaatcccattttatcccatggaaccactaaaaacaaggtctgctctgctcctgaagccctatatgctggagatggacaactcaatgaaaatttaaagggaaaaccctcaggcctgaggtgtgtgccactcagagacttcacctaactagagacaggcaaactgcaaaccatggtgagaaattgacgacttcacactatggacagcttttcccaagatgtcaaaacaagactcctcatcatgataaggctcttacccccttttaatttgtccttgcttatgcctgcctctttcgcttggcaggatgatgctgtcattagtatttcacaagaagtagcttcagagggtaacttaacagagtatcagatctatcttgtcaatcccaacgttttacataaaataagagatcctttagtgcacccagtgactgacattagcagcatctttaacacagccgtgtgttcaaatgtacagtggtccttttcagagttggacttctagactcacctgttctcactccctgttttaattcaacccagccatgcaatgccaaataatagaattgctccctaccagctgaacagggaggagtctgtgcagtttctgacacttgttgttgaacatggctaaatacaatgggtatcgctgagactaagttgtagaaattaacaaatgtgctgcttggttaaaatggctacactcatctgactcattctttattctattttagttggtttgtatcttgcctaaggtgcgtagtccaactcttggtattaccctcctaatagtcatactagtagtcatactccctggtgtagtgtattctctaaaagctttaaatgtctgcatgcagccagccatcaaatagtgaatggtctctctttggctggaattacaaaactcagagaaatgtgtcatcaggagaacatcataacccatgaaggataaaagccccaaatggtggtaactgataatagcactaatgctttaagatttggtcacactctcacctaggtgagcgcattgagccagtggtgctaaatgctacatactccaactgaaatgttaaggaagaagatagatccaattaaaaaaaattaaaaccaatttaaaaaaaaaaagaacacaggagattccagtctacttgagttagcataatacagaagtcccctctactttaacttttacaaaaaagtaacctgaactaatctgatgttaaccaatgtatttatttctgtggttctgtttccttgttccaatttgacaaaacccactgttcttgtattgtattgcccagggggagctatcactgtacttgtagagtggtgctgctttaattcataaatcacaaataaaagccaattagctctataactaaa

SEQ ID NO: 5 - DNA, 3004 bp, Homo sapiens
tgaccctgggaaatgcttctatccctgagaggaggctcagcacagaaggaggaaggacagcagggccaacagtcacagcagccctgaccagagcattcctggagctcaagctcctctacaaagaggtggacagagaagacagcagagaccatgggacccccctcagcccctccctgcagattgcatgtcccctggaaggaggtcctgctcacagcctcacttctaaccttctggaacccacccaccactgccaagctcactattgaatccacgccgttcaatgtcgcagaggggaaggaggttcttctactcgcccacaacctgccccagaatcgtattggttacagctggtacaaaggcgaaagagtggatggcaacagtctaattgtaggatatgtaataggaactcaacaagctaccccagggcccgcatacagtggtcgagagacaatataccccaatgcatccctgctgatccagaacgtcacccagaatgacacaggattctataccctacaagtcataaagtcagatcttgtgaatgaagaagcaaccggacagttccatgtatacccggagctgcccaagccctccatctccagcaacaactccaaccccgtggaggacaaggatgctgtggccttcacctgtgaacctgaggttcagaacacaacctacctgtggtgggtaaatggtcagagcctcccggtcagtcccaggctgcagctgtccaatggcaacatgaccctcactctactcagcgtcaaaaggaacgatgcaggatcctatgaatgtgaaatacagaacccagcgagtgccaaccgcagtgacccagtcaccctgaatgtcctctatggcccagatgtccccaccatttccccctcaaaggccaattaccgtccaggggaaaatctgaacctctcctgccacgcagcctctaacccacctgcacagtactcttggtttatcaatgggacgttccagcaatccacacaagagctctttatccccaacatcactgtgaataatagcggatcctatatgtgccaagcccataactcagccactggcctcaataggaccacagtcacgatgatcacagtctctggtaagtggatccatgaagcactagcatcacattttcaggtggagtctggctctcagagaagagccaggaagaaattttctttcccaacctgtgtccaaggggcacacgcaaatcccaaattctcccctgaaccctcccaattcacctctgcagactcttttccccttgtttttttgttttttgttgttttttgttttttgatttctcatgtctgactttgggtccatcctggaatgagaggagggggctccctcagcactgagccctgtgtagtgaaaggggcttcacagagaaaaaaggaggaagggtcctcagggtcaagttcctgctctctgtcaccaacaattccctttctgtcacttctttgtgttcttttacctactccataagctacaagggacaaggaggttttgaaatgagctcacactttttccttaaatgagaagaggaagccccttgggtgatggaggagcagctcagactctgcccccatctctgctcccagcacccccagtgactgactgaccccaccctgaagccacctaaggtggaaccagggcatatggagaaggtgcccaggtgtctgtcctgaatcaggctaaatcaagatgctaatcaacaccaaagcctcccctggatcaggccgcaggaaaatgggaagacatggagcctcatgacagactgctgagctgtgtcctggctctgaagtcactggctgtataagactgtgggcacagcacatgggacacagcacagaggacagcaagtgacgcacacttggagacatagggagattcagccatggggactctgcatggcagggaaggggcagtgccaaaaagtgtgtatttatagagaggataagactaccagccactatgtatctaatataggacttaccttttcaacccttccacgtgtgcaggtccgtagtattaaacacattcccgttgttctgctaccatcaccaccacccacccacagaactctcttcttcctcccaaaatgaaactctgttcccatcaaactcctgggcagagctgcccacctgtgacccacagcctgacccctgaactcacctctagacttgcttctggtctcccgctcaaacccccatccccatcatcacccatctccaggatgtccttaaatagcaaagcctcagaaaaaacacaccttggctgggtggtgtgggactgtgcagctgaaagaaacagcacctgcatgttccaggtgagtaccccaaaagaccaggcagtcagccagtcagggaagaaacaggagaggtgccagaggctgtggctgtcagtcctgtatctgcccaagactcaatgcttctgccctattcacatttgagaaagtctgtacttctcccacacaaagcaggtggcctcgatctccgagccctcagatcgttgtgcatccgtcttctgacacacacacctgccctgggctcttaaggacttgggtggactgaggggtgggagatgccaactctgactgaacgatgcctgcagaggaatcaaaggtgccacacacggcaatcttctctctgttttctgcacagcggagctgcccaagccctcggtcaccagcaacaactccaaccctgtagagttttctacatataagtttaagttatctgtgaacagagataattttacttctttccgatttggatgtctgtttatttgtttgtttgctgcctaatttctccagctaggacttaaaatactatgttgaagagaagtggggcaagcaggcatccttgtcttgctcctggtcttacagggaaagctttcagtctttctccattgagtatccctctattatgttgaggtggtttccttccattcacagagtgtttttatttataaaagaatgttgaattttgtc

SEQ ID NO: 6 - DNA, 1410 bp, Homo sapiens
tgaccctgggaaatgcttctatccctgagaggaggctcagcacagaaggaggaaggacagcagggccaacagtcacagcagccctgaccagagcattcctggagctcaagctcctctacaaagaggtggacagagaagacagcagagaccatgggacccccctcagcccctccctgcagattgcatgtcccctggaaggaggtcctgctcacagcctcacttctaaccttctggaacccacccaccactgccaagctcactattgaatccacgccgttcaatgtcgcagaggggaaggaggttcttctactcgcccacaacctgccccagaatcgtattggttacagctggtacaaaggcgaaagagtggatggcaacagtctaattgtaggatatgtaataggaactcaacaagctaccccagggcccgcatacagtggtcgagagacaatataccccaatgcatccctgctgatccagaacgtcacccagaatgacacaggattctataccctacaagtcataaagtcagatcttgtgaatgaagaagcaaccggacagttccatgtataccgtgagtatttccacatgacctctgggtgttgggggtcagttctacttcccacatacgggattgtcaggcctgggttgtgcctgtggccctctctgcattacatcctgtatcagggtttggacatttagtgcaggacacacacgggggagacaaacttccacagatcagaattcctttcctggatccagaccctgcagacactcgctgcagaggaaggacagtctgatggggggactcagcagggcgaggtcagtgtcagacaagcaccccatggtctccccatggacctgaccctgagaaagaccctggagaactggatcagggcctggcctgaggggtccccctagggacccctcagagagaagctcaactcttccctgaactgagcccctgtacaaagccctgtccctggttcctgattccaggtgatcctggggagtctgtgccagggctgtgtggtggcctcttgggcagggctggctgggagcaaggatgtgagctatccaagggccatgactcctggagttggtcaccagccaggtccgagcacccagagcctcatctagctgaggatagggcctcctccttcacttgaggctcagcatggaaaggacagatggaaaaaattactagtgcatgagcccactgccctgggggacacaggttactccctgggaagttcagagtccccaaggggaggaacagagaagagaggatgctcctggcagctccatgtccaccagggatcaggcccagggccctctgtcttggaagcaaataatcatagataactgttcacttgggcagctcctctgtgcagagctgagatcaagtaa

SEQ ID NO: 7 - DNA, 1745 bp, Homo sapiens
ttatgctcccgcggaggccaagcggactccctgacaggacagaatctgaacgtgagagtgaaggtcttgcctgtccagaaactcttgtagccagcacaggtttaaacaagaagccaaattgttctggagagattgctgggggctttctttgtgcctcaagcttcttcagtgccctgagcacaggaaacactcaagcagagaagcagagccaaacccaggatacgggaggtcgaggctcttccgtagacctgcagcattggggtgggatgatgttcattctgtgtgtgttctggaccaagcccctctccagggacctatgggcagccccctttaagcaagatgcccggtggagtgggcatccaccatcacttaccctgggcttgggtgaatagattttccgtgccttaaatgggcagggagggggtaaacatggacggtccattggtacaaataaaagcctttggtgggttttgatcaattgcaaggatcgaaggagacctgtggacctgaggtcaactggcagcagagaagagtctgggttcgtgaaggcgccgccgcggtgccgcgccacgtatttgcataaaaaaggccaagaaaactctggctgtgccccagcaacggctcattctgctcccccgggtcggagccccccggagctgcgcgcgggcttgcagcgcctcgcccgcgctgtcctcccggtgtcccgcttctccgcgccccagccgccggctgccagcttttcggggccccgagtcgcacccagcgaagagagcgggcccgggacaagctcgaactccggccgcctcgcccttccccggctccgctccctctgccccctcggggtcgcgcgcccacgatgctgcagggccctggctcgctgctgctgctcttcctcgcctcgcactgctgcctgggctcggcgcgcgggctcttcctctttggccagcccgacttctcctacaagcgcagcaattgcaagcccatcccggccaacctgcagctgtgccacggcatcgaataccagaacatgcggctgcccaacctgctgggccacgagaccatgaaggaggtgctggagcaggccggcgcttggatcccgctggtcatgaagcagtgccacccggacaccaagaagttcctgtgctcgctcttcgcccccgtctgcctcgatgacctagacgagaccatccagccatgccactcgctctgcgtgcaggtgaaggaccgctgcgccccggtcatgtccgccttcggcttcccctggcccgacatgcttgagtgcgaccgtttcccccaggacaacgacctttgcatccccctcgctagcagcgaccacctcctgccagccaccgaggaaggtaagccttccctcttgcttccccactccctgctgggctgagacgctcccaggagatcccgcccctgccacgcatcccagtgcatccctgcttggggtgccagtagcgggaagggcagaagttctgcctgacctggtctgtcatcacaacaagcctgtatcaaatttgaggcacccctcccacgccgcccaagtctcgcgcattctcctcccgagttgtaccagctatacttaagggcagtttaaaaataaaacaaacaaacaaaaacaacaaaactaaaaaaacgaagaactgaacggcggtttaaaaaaaaatagatacacgattattgttaaagatgctagcactggagctgcgcagagcgttggaagtggtgtttggtggagg

SEQ ID NO: 8 - DNA, 3322 bp, Homo sapiens
gtccggacaggccgagatgacgccgagccccctgttgctgctcctgctgccgccgctgctgctgggggccttcccgccggccgccgccgcccgaggccccccaaagatggcggacaaggtggtcccacggcaggtggcccggctgggccgcactgtgcggctgcagtgcccagtggagggggacccgccgccgctgaccatgtggaccaaggatggccgcaccatccacagcggctggagccgcttccgcgtgctgccgcaggggctgaaggtgaagcaggtggagcgggaggatgccggcgtgtacgtgtgcaaggccaccaacggcttcggcagcctgagcgtcaactacaccctcgtcgtgctggatgacattagcccagggaaggagagcctggggcccgacagctcctctgggggtcaagaggaccccgccagccagcagtgggcacgaccgcgcttcacacagccctccaagatgaggcgccgggtgatcgcacggcccgtgggtagctccgtgcggctcaagtgcgtggccagcgggcaccctcggcccgacatcacgtggatgaaggacgaccaggccttgacgcgcccagaggccgctgagcccaggaagaagaagtggacactgagcctgaagaacctgcggccggaggacagcggcaaatacacctgccgcgtgtcgaaccgcgcgggcgccatcaacgccacctacaaggtggatgtgatccagcggacccgttccaagcccgtgctcacaggcacgcaccccgtgaacacgacggtggacttcggggggaccacgtccttccagtgcaaggtgcgcagcgacgtgaagccggtgatccagtggctgaagcgcgtggagtacggcgccgagggccgccacaactccaccatcgatgtgggcggccagaagtttgtggtgctgcccacgggtgacgtgtggtcgcggcccgacggctcctacctcaataagctgctcatcacccgtgcccgccaggacgatgcgggcatgtacatctgccttggcgccaacaccatgggctacagcttccgcagcgccttcctcaccgtgctgccaggtgcgcggctgccacgccacgccacaccatgctggtgcccggacccgccccctgggcccggcgtcccacccaccgggtggggccccacccttccctcccgggccgtgctggccaggtcatctgccgagggagggcagcccaggggcaccgtctccacagcccctgggatgggtctggggtgctctcctggtctttgtgtcggcgttcccctccctacctcctttcctctcgctcttgcagacccaaaaccgccagggccacctgtggcctcctcgtcctcggccactagcctgccgtggcccgtggtcatcggcatcccagccggcgctgtcttcatcctgggcaccctgctcctgtggctttgccaggcccagaagaagccgtgcacccccgcgcctgcccctcccctgcctgggcaccgcccgccggggacggcccgcgaccgcagcggagacaaggaccttccctcgttggccgccctcagcgctggccctggtgtggggctgtgtgaggagcatgggtctccggcagccccccagcacttactgggcccaggcccagttgctggccctaagttgtaccccaaactctacacagacatccacacacacacacacacacactctcacacacactcacacgtggagggcaaggtccaccagcacatccactatcagtgctagacggcaccgtatctgcagtgggcacgggggggccggccagacaggcagactgggaggatggaggacggagctgcagacgaaggcaggggacccatggcgaggaggaatggccagcaccccaggcagtctgtgtgtgaggcatagcccctggacacacacacacagacacacacactacctggatgcatgtatgcacacacatgcgcgcacacgtgctccctgaaggcacacgtacgcacacacgcacatgcacagatatgccgcctgggcacacagataagctgcccaaatgcacgcacacgcacagagacatgccagaacatacaaggacatgctgcctgaacatacacacgcacacccatgcgcagatgtgctgcctggacacacacacacacacggatatgctgtctggacgcacacacgtgcagatatggtatccggacacacacgtgcacagatatgctgcctggacacacagataatgctgccttgacacacacatgcacggatattgcctggacacacacacacacacgcgtgcacagatatgctgtctggacacgcacacacatgcagatatgctgcctggacacacacttccagacacacgtgcacaggcgcagatatgctgcctggacacacgcagatatgctgtctagtcacacacacacgcagacatgctgtccggacacacacacgcatgcacagatatgctgtccggacacacacacgcacgcagatatgctgcctggacacacacacagataatgctgcctcaacactcacacacgtgcagatattgcctggacacacacatgtgcacagatatgctgtctggacatgcacacacgtgcagatatgctgtccggatacacacgcacgcacacatgcagatatgctgcctgggcacacacttccggacacacatgcacacacaggtgcagatatgctgcctggacacacgcagactgacgtgcttttgggagggtgtgccgtgaagcctgcagtacgtgtgccgtgaggctcatagttgatgagggactttccctgctccaccgtcactcccccaactctgcccgcctctgtccccgcctcagtccccgcctccatccccgcctctgtcccctggccttggcggctatttttgccacctgccttgggtgcccaggagtcccctactgctgtgggctggggttgggggcacagcagccccaagcctgagaggctggagcccatggctagtggctcatccccactgcattctccccctgacacagagaaggggccttggtatttatatttaagaaatgaagataatattaataatgatggaaggaagactgggttgcagggactgtggtctctcctggggcccgggacccgcctggtctttcagccatgctgatgaccacaccccgtccaggccagacaccaccccccaccccactgtcgtggtggccccagatctctgtaattttatgtagagtttgagctgaagccccgtatatttaatttattttgttaaacatgaaagtgcatcctttccctcca

SEQ ID NO: 9 - DNA, 2817 bp, Homo sapiens
gtccggacaggccgagatgacgccgagccccctgttgctgctcctgctgccgccgctgctgctgggggccttcccgccggccgccgccgcccgaggccccccaaagatggcggacaaggtggtcccacggcaggtggcccggctgggccgcactgtgcggctgcagtgcccagtggagggggacccgccgccgctgaccatgtggaccaaggatggccgcaccatccacagcggctggagccgcttccgcgtgctgccgcaggggctgaaggtgaagcaggtggagcgggaggatgccggcgtgtacgtgtgcaaggccaccaacggcttcggcagcctgagcgtcaactacaccctcgtcgtgctggatgacattagcccagggaaggagagcctggggcccgacagctcctctgggggtcaagaggaccccgccagccagcagtgggcacgaccgcgcttcacacagccctccaagatgaggcgccgggtgatcgcacggcccgtgggtagctccgtgcggctcaagtgcgtggccagcgggcaccctcggcccgacatcacgtggatgaaggacgaccaggccttgacgcgcccagaggccgctgagcccaggaagaagaagtggacactgagcctgaagaacctgcggccggaggacagcggcaaatacacctgccgcgtgtcgaaccgcgcgggcgccatcaacgccacctacaaggtggatgtgatccagcggacccgttccaagcccgtgctcacaggcacgcaccccgtgaacacgacggtggacttcggggggaccacgtccttccagtgcaagacccaaaaccgccagggccacctgtggcctcctcgtcctcggccactagcctgccgtggcccgtggtcatcggcatcccagccggcgctgtcttcatcctgggcaccctgctcctgtggctttgccaggcccagaagaagccgtgcacccccgcgcctgcccctcccctgcctgggcaccgcccgccggggacggcccgcgaccgcagcggagacaaggaccttccctcgttggccgccctcagcgctggccctggtgtggggctgtgtgaggagcatgggtctccggcagccccccagcacttactgggcccaggcccagttgctggccctaagttgtaccccaaactctacacagacatccacacacacacacacacacactctcacacacactcacacgtggagggcaaggtccaccagcacatccactatcagtgctagacggcaccgtatctgcagtgggcacgggggggccggccagacaggcagactgggaggatggaggacggagctgcagacgaaggcaggggacccatggcgaggaggaatggccagcaccccaggcagtctgtgtgtgaggcatagcccctggacacacacacacagacacacacactacctggatgcatgtatgcacacacatgcgcgcacacgtgctccctgaaggcacacgtacgcacacacgcacatgcacagatatgccgcctgggcacacagataagctgcccaaatgcacgcacacgcacagagacatgccagaacatacaaggacatgctgcctgaacatacacacgcacacccatgcgcagatgtgctgcctggacacacacacacacacggatatgctgtctggacgcacacacgtgcagatatggtatccggacacacacgtgcacagatatgctgcctggacacacagataatgctgccttgacacacacatgcacggatattgcctggacacacacacacacacgcgtgcacagatatgctgtctggacacgcacacacatgcagatatgctgcctggacacacacttccagacacacgtgcacaggcgcagatatgctgcctggacacacgcagatatgctgtctagtcacacacacacgcagacatgctgtccggacacacacacgcatgcacagatatgctgtccggacacacacacgcacgcagatatgctgcctggacacacacacagataatgctgcctcaacactcacacacgtgcagatattgcctggacacacacatgtgcacagatatgctgtctggacatgcacacacgtgcagatatgctgtccggatacacacgcacgcacacatgcagatatgctgcctgggcacacacttccggacacacatgcacacacaggtgcagatatgctgcctggacacacgcagactgacgtgcttttgggagggtgtgccgtgaagcctgcagtacgtgtgccgtgaggctcatagttgatgagggactttccctgctccaccgtcactcccccaactctgcccgcctctgtccccgcctcagtccccgcctccatccccgcctctgtcccctggccttggcggctatttttgccacctgccttgggtgcccaggagtcccctactgctgtgggctggggttgggggcacagcagccccaagcctgagaggctggagcccatggctagtggctcatccccactgcattctccccctgacacagagaaggggccttggtatttatatttaagaaatgaagataatattaataatgatggaaggaagactgggttgcagggactgtggtctctcctggggcccgggacccgcctggtctttcagccatgctgatgaccacaccccgtccaggccagacaccaccccccaccccactgtcgtggtggccccagatctctgtaattttatgtagagtttgagctgaagccccgtatatttaatttattttgttaaacatgaaagtgcatcctttccctcca

SEQ ID NO: 10 - DNA, 2546 bp, Homo sapiens
agtggggagagatgagtgtagataaaaggagtgcagaaggcacgaggaagccacagtgctccggatcctccaatcttcgctcctccaatctccgctcctccacccagttcaggaacccgcgaccgctcgcagcgctctcttgaccactatgagcctcctgtccagccgcgcggcccgtgtccccggtccttcgagctccttgtgcgcgctgttggtgctgctgctgctgctgacgcagccagggcccatcgccagcgctggtcctgccgctgctgtgttgagagagctgcgttgcgtttgtttacagaccacgcagggagttcatcccaaaatgatcagtaatctgcaagtgttcgccataggcccacagtgctccaaggtggaagtggtgtaagttctgtgctgctgtgtccgctgtgaccttggcaagagagaaatcccgcagcctgggtcttcaaccttggtatctcatgagtgtatcttctttttctttccttcagagcctccctgaagaacgggaaggaaatttgtcttgatccagaagccccttttctaaagaaagtcatccagaaaattttggacggtggaaacaaggaaaactgattaagagaaatgagcacgcatggaaaagtttcccagtcttcagcagagaagttttctggaggtctctgaacccagggaagacaagaaggaaagattttgttgttgtttgtttatttgtttttccagtagttagctttcttcctggattcctcactttgaagagtgtgaggaaaacctatgtttgccgcttaagctttcagctcagctaatgaagtgtttagcatagtacctctgctatttgctgttattttatctgctatgctattgaagttttggcaattgactatagtgtgagccaggaatcactggctgttaatctttcaaagtgtcttgaattgtaggtgactattatatttccaagaaatattccttaagatattaactgagaaggctgtggatttaatgtggaaatgatgtttcataagaattctgttgatggaaatacactgttatcttcacttttataagaaataggaaatattttaatgtttcttggggaatatgttagagaatttccttactcttgattgtgggatactatttaattatttcactttagaaagctgagtgtttcacaccttatctatgtagaatatatttccttattcagaatttctaaaagtttaagttctatgagggctaatatcttatcttcctataattttagacattctttatctttttagtatggcaaactgccatcatttacttttaaactttgattttatatgctatttattaagtattttattaggagtaccataattctggtagctaaatatatattttagatagatgaagaagctagaaaacaggcaaattcctgactgctagtttatatagaaatgtattcttttagtttttaaagtaaaggcaaacttaacaatgacttgtactctgaaagttttggaaacgtattcaaacaatttgaatataaatttatcatttagttataaaaatatatagcgacatcctcgaggccctagcatttctccttggataggggaccagagagagcttggaatgttaaaaacaaaacaaaacaaaaaaaaacaaggagaagttgtccaagggatgtcaattttttatccctctgtatgggttagattttccaaaatcataatttgaagaaggccagcatttatggtagaatatataattatatataaggtggccacgctggggcaagttccctccccactcacagctttggcccctttcacagagtagaacctgggttagaggattgcagaagacgagcggcagcggggagggcagggaagatgcctgtcgggtttttagcacagttcatttcactgggattttgaagcatttctgtctgaatgtaaagcctgttctagtcctggtgggacacactggggttgggggtgggggaagatgcggtaatgaaaccggttagtcagtgttgtcttaatatccttgataatgctgtaaagtttatttttacaaatatttctgtttaagctatttcacctttgtttggaaatccttcccttttaaagagaaaatgtgacacttgtgaaaaggcttgtaggaaagctcctccctttttttctttaaacctttaaatgacaaacctaggtaattaatggttgtgaatttctatttttgctttgtttttaatgaacatttgtctttcagaataggattctgtgataatatttaaatggcaaaaacaaaacataattttgtgcaattaacaaagctactgcaagaaaaataaaacatttcttggtaaaaacgtatgtatttatatattatatatttatatataatatatattatatatttagcattgctgagctttttagatgcctattgtgtatcttttaaaggttttgaccattttgttatgagtaattacatatatattacattcactatattaaaattgtacttttttactatgtgtctcattggtt

SEQ ID NO: 11 - DNA, 2131 bp, Homo sapiens
tcgccttccttcgggactccggatcgatctggagctccgggaatttccctggcccggccgctccgggctttccagtctcaaccatgcataaaaagggttcgccgatcttggggagccacacagcccgggtcgcaggcacctccccgccagctctcccgcttctcgcacagcttcccgacgcgtctgctgagccccatggcccacgccacgctctccgccgcccccagcaatccccggctcctgcgggtggcgctgctgctcctgctcctggtggccgccagccggcgcgcagcaggagcgtccgtggtcactgaactgcgctgccagtgcttgcagacactgcagggaattcacctcaagaacatccaaagtgtgaatgtaaggtcccccggaccccactgcgcccaaaccgaagtcatgtaagtcccgccccgcgcttccgctgccaccgctggggtccccgactctcccgctgccccaaccctgtccccagcccgacctcctgtctcacggaattcccttctctctgcagagccacactcaagaatgggaagaaagcttgtctcaaccccgcatcccccatggttcagaaaatcatcgaaaagatactgaacaagtgagttgtaatttccatatacacaggcgactggagccgttggtcagaaatactggcatctgccccctaaaaataaaatcagggaaccccaagagttagctgaaggactagaaattgtgattattattttcacaattaaagttgccattaaggttattaatctgctctggtgccagaggatatttcagtatttcagtgtcttccatttccaggcctaacccctgggagggtaaatgtgggtttctagaatactaagtaaatttgactaacaatgccaaaatgccccctgcctgttttgggacgtttacctcagtccctaatgggcttcagacctgaaaaatgcaatgtctggtttgggcactttgggcctgtaagccttcttggtgaagagcagaaactttgcagtaacaccttcagtgagttcaaggctaggatccctgtcaacattatttaatctctttgagctttagcaaaatagggtagataatggtagttatttcatagggttgtgtgcagcttaagggagatcatgaatggacatttctaacccaatgtgacaatcagtgaccaatatgttttggctttttcaaaccaagaatctagttgagtccacagccacttctttcttgaaaaaaaaaaaaaaaaagcattcaggagtgcaagttttctgctatagaaggcagtgggtacagacagaccttccctgagtggagggctgggagagagtctgcatggggacatccctccaagcaacttcagagtgacagaagagcagccttccttagcacctgcaacagtaacccttttctcatcacagggggagcaccaactgacaggagagaagtaagaagcttatcagcgtatcattgacacttcctgcagggtggtccctgcccttaccagagctgaaaatgaaaaagagaacagcagctttctagggacagctggaaaggacttaatgtgtttgactatttcttacgagggttctacttatttatgtatttatttttgaaagcttgtattttaatattttacatgctgttatttaaagatgtgagtgtgtttcatcaaacatagctcagtcctgattatttaattggaatatgatgggttttaaatgtgtcattaaactaatatttagtgggagaccataatgtgtcagccaccttgataaatgacagggtggggaactggagggtggggggattgaaatgcaagcaattagtggatcactgttagggtaagggaatgtatgtacacatctattttttatactttttttttaaaaaaagaatgtcagttgttatttattcaaattatctcacattatgtgttcaacatttttatgctgaagtttcccttagacattttatgtcttgcttgtagggcataatgccttgtttaatgtccattctgcagcgtttctctttcccttggaaaagagaatttatcattactgttacatttgtacaaatgacatgataataaaagttttatgaaaaaaaaggcttatgt

SEQ ID NO: 12 - DNA, 2018 bp, Homo sapiens
tcgccttccttcgggactccggatcgatctggagctccgggaatttccctggcccggccgctccgggctttccagtctcaaccatgcataaaaagggttcgccgatcttggggagccacacagcccgggtcgcaggcacctccccgccagctctcccgcttctcgcacagcttcccgacgcgtctgctgagccccatggcccacgccacgctctccgccgcccccagcaatccccggctcctgcgggtggcgctgctgctcctgctcctggtggccgccagccggcgcgcagcaggagcgtccgtggtcactgaactgcgctgccagtgcttgcagacactgcagggaattcacctcaagaacatccaaagtgtgaatgtaaggtcccccggaccccactgcgcccaaaccgaagtcatagccacactcaagaatgggaagaaagcttgtctcaaccccgcatcccccatggttcagaaaatcatcgaaaagatactgaacaagtgagttgtaatttccatatacacaggcgactggagccgttggtcagaaatactggcatctgccccctaaaaataaaatcagggaaccccaagagttagctgaaggactagaaattgtgattattattttcacaattaaagttgccattaaggttattaatctgctctggtgccagaggatatttcagtatttcagtgtcttccatttccaggcctaacccctgggagggtaaatgtgggtttctagaatactaagtaaatttgactaacaatgccaaaatgccccctgcctgttttgggacgtttacctcagtccctaatgggcttcagacctgaaaaatgcaatgtctggtttgggcactttgggcctgtaagccttcttggtgaagagcagaaactttgcagtaacaccttcagtgagttcaaggctaggatccctgtcaacattatttaatctctttgagctttagcaaaatagggtagataatggtagttatttcatagggttgtgtgcagcttaagggagatcatgaatggacatttctaacccaatgtgacaatcagtgaccaatatgttttggctttttcaaaccaagaatctagttgagtccacagccacttctttcttgaaaaaaaaaaaaaaaaagcattcaggagtgcaagttttctgctatagaaggcagtgggtacagacagaccttccctgagtggagggctgggagagagtctgcatggggacatccctccaagcaacttcagagtgacagaagagcagccttccttagcacctgcaacagtaacccttttctcatcacagggggagcaccaactgacaggagagaagtaagaagcttatcagcgtatcattgacacttcctgcagggtggtccctgcccttaccagagctgaaaatgaaaaagagaacagcagctttctagggacagctggaaaggacttaatgtgtttgactatttcttacgagggttctacttatttatgtatttatttttgaaagcttgtattttaatattttacatgctgttatttaaagatgtgagtgtgtttcatcaaacatagctcagtcctgattatttaattggaatatgatgggttttaaatgtgtcattaaactaatatttagtgggagaccataatgtgtcagccaccttgataaatgacagggtggggaactggagggtggggggattgaaatgcaagcaattagtggatcactgttagggtaagggaatgtatgtacacatctattttttatactttttttttaaaaaaagaatgtcagttgttatttattcaaattatctcacattatgtgttcaacatttttatgctgaagtttcccttagacattttatgtcttgcttgtagggcataatgccttgtttaatgtccattctgcagcgtttctctttcccttggaaaagagaatttatcattactgttacatttgtacaaatgacatgataataaaagttttatgaaaaaaaaggcttatgt

SEQ ID NO: 13 - DNA, 1299 bp, Homo sapiens
tcgccttccttcgggactccggatcgatctggagctccgggaatttccctggcccggccgctccgggctttccagtctcaaccatgcataaaaagggttcgccgatcttggggagccacacagcccgggtcgcaggcacctccccgccagctctcccgcttctcgcacagcttcccgacgcgtctgctgagccccatggcccacgccacgctctccgccgcccccagcaatccccggctcctgcgggtggcgctgctgctcctgctcctggtggccgccagccggcgcgcagcaggtgggtcccggcgccctggggtccccgggccggacgcggctggggtgggcgccccgcgccgacagccccgctcaatcagcgagtctattcttccctaggagcgtccgtggtcactgaactgcgctgccagtgcttgcagacactgcagggaattcacctcaagaacatccaaagtgtgaatgtaaggtcccccggaccccactgcgcccaaaccgaagtcatagccacactcaagaatgggaagaaagcttgtctcaaccccgcatcccccatggttcagaaaatcatcgaaaagatactgaacaaggggagcaccaactgacaggagagaagtaagaagcttatcagcgtatcattgacacttcctgcagggtggtccctgcccttaccagagctgaaaatgaaaaagagaacagcagctttctagggacagctggaaaggacttaatgtgtttgactatttcttacgagggttctacttatttatgtatttatttttgaaagcttgtattttaatattttacatgctgttatttaaagatgtgagtgtgtttcatcaaacatagctcagtcctgattatttaattggaatatgatgggttttaaatgtgtcattaaactaatatttagtgggagaccataatgtgtcagccaccttgataaatgacagggtggggaactggagggtggggggattgaaatgcaagcaattagtggatcactgttagggtaagggaatgtatgtacacatctattttttatactttttttttaaaaaaagaatgtcagttgttatttattcaaattatctcacattatgtgttcaacatttttatgctgaagtttcccttagacattttatgtcttgcttgtagggcataatgccttgtttaatgtccattctgcagcgtttctctttcccttggaaaagagaatttatcattactgttacatttgtacaaatgacatgataataaaagttttatgaaaaaaaaggcttatgt

SEQ ID NO: 14 - DNA, 1160 bp, Homo sapiens
tcgccttccttcgggactccggatcgatctggagctccgggaatttccctggcccggccgctccgggctttccagtctcaaccatgcataaaaagggttcgccgatcttggggagccacacagcccgggtcgcaggcacctccccgccagctctcccgcttctcgcacagcttcccgacgcgtctgctgagccccatggcccacgccacgctctccgccgcccccagcaatccccggctcctgcgggtggcgctgctgctcctgctcctggtggccgccagccggcgcgcagcaggagcgtccgtggtcactgaactgcgctgccagtgcttgcagacactgcagggaattcacctcaagaacatccaaagtgtgaatagccacactcaagaatgggaagaaagcttgtctcaaccccgcatcccccatggttcagaaaatcatcgaaaagatactgaacaaggggagcaccaactgacaggagagaagtaagaagcttatcagcgtatcattgacacttcctgcagggtggtccctgcccttaccagagctgaaaatgaaaaagagaacagcagctttctagggacagctggaaaggacttaatgtgtttgactatttcttacgagggttctacttatttatgtatttatttttgaaagcttgtattttaatattttacatgctgttatttaaagatgtgagtgtgtttcatcaaacatagctcagtcctgattatttaattggaatatgatgggttttaaatgtgtcattaaactaatatttagtgggagaccataatgtgtcagccaccttgataaatgacagggtggggaactggagggtggggggattgaaatgcaagcaattagtggatcactgttagggtaagggaatgtatgtacacatctattttttatactttttttttaaaaaaagaatgtcagttgttatttattcaaattatctcacattatgtgttcaacatttttatgctgaagtttcccttagacattttatgtcttgcttgtagggcataatgccttgtttaatgtccattctgcagcgtttctctttcccttggaaaagagaatttatcattactgttacatttgtacaaatgacatgataataaaagttttatgaaaaaaaaggcttatgt

SEQ ID NO: 15 - DNA, 1893 bp, Homo sapiens
gacgtcggcccgccggcgccccaccagctccgcgcgggcccgggttggccaccgccgggcccccgcccctcccccggcggtgtcccggccggaaccgatcgtggctggtttgagctggtgcgtctccatggcgacccgccggtgctataagtagggagcggcgtgccgtggggctttgtcagtccctcctgtagccgccgccgccgccgcccgccgcccctctgccagcagctccggcgccacctcgggccggcgtctccggcgggcgggagccaggcgctgacgggcgcggcgggggcggccgagcgctcctgcggctgcgactcaggctccggcgtctgcgcttccccatggggctggcctgcggcgcctgggcgctctgagattgtcactgctgttccaagggcacacgcagagggatttggaattcctggagagttgcctttgtgagaagctggaaatatttctttcaattccatctcttagttttccataggaacatcaagaaatcatgaacaactttggtaatgaagagtttgactgccacttcctcgatgaaggttttactgccaaggacattctggaccagaaaattaatgaagtttcttcttctgttggttttgcggattgccactgatgattccaaagcagtctgtcgtctcagtgtgaaattcggtgccacgctcagaaccagcaggctccttttggaacgggcgaaagagctaaatatcgatgttgttggtgtcagcttccatgtaggaagcggctgtaccgatcctgagaccttcgtgcaggcaatctctgatgcccgctgtgtttttgacatgggggctgaggttggtttcagcatgtatctgcttgatattggcggtggctttcctggatctgaggatgtgaaacttaaatttgaagagatcaccggcgtaatcaacccagcgttggacaaatactttccgtcagactctggagtgagaatcatagctgagcccggcagatactatgttgcatcagctttcacgcttgcagttaatatcattgccaagaaaattgtattaaaggaacagacgggctctgatgacgaagatgagtcgagtgagcagacctttatgtattatgtgaatgatggcgtctatggatcatttaattgcatactctatgaccacgcacatgtaaagccccttctgcaaaagagacctaaaccagatgagaagtattattcatccagcatatggggaccaacatgtgatggcctcgatcggattgttgagcgctgtgacctgcctgaaatgcatgtgggtgattggatgctctttgaaaacatgggcgcttacactgttgctgctgcctctacgttcaatggcttccagaggccgacgatctactatgtgatgtcagggcctgcgtggcaactcatgcagcaattccagaaccccgacttcccacccgaagtagaggaacaggatgccagcaccctgcctgtgtcttgtgcctgggagagtgggatgaaacgccacagagcagcctgtgcttcggctagtattaatgtgtagatagcactctggtagctgttaactgcaagtttagcttgaattaagggatttggggggaccatgtaacttaattactgctagttttgaaatgtctttgtaagagtagggtcgccatgatgcagccatatggaagactaggatatgggtcacacttatctgtgttcctatggaaactatttgaatatttgttttatatggatttttattcactcttcagacacgctactcaagagtgcccctcagctgctgaacaagcatttgtagcttgtacaatggcagaatgggccaaaagcttagtgttgtgacctgtttttaaaataaagtatcttgaaataattaggca

SEQ ID NO: 16 - DNA, 1069 bp, Homo sapiens
gcggccgcagagcactttgcccggagcccagcgtcctcccctgagttcgctgagtctcccgggaccagcaaaggctgcgcgccccgcatcggcccggaggcggggagccctgggaggcctggccgagctgcccgcagggaaatggcggagaaagcgcttctctgcccgagttcagccgggctggggacttggccctgggtcctgaactcggcatggccagttctgcctctggctgtggaccagggtgtggactggagaccgcgggggccagtctcatcggatcagatcgagcagctccatcggagatttaagcagctgagtggagatcagcctaccattcgcaaggagaacttcaacaatgtcccggacctggagctcaaccccatccgatccaaaattgttcgtgccttcttcgacaacaggaacctgcgcaagggacccagtggcctggctgatgagatcaatttcgaggacttcctgaccatcatgtcctacttccggcccatcgacaccaccatggacgaggaacaggtggagctgtcccggaaggagaagctgagatttctgttccacatgtacgactcggacagcgacggccgcatcactctggaagaatatcgaaatgtggtcgaggagctgctgtcgggaaaccctcacatcgagaaggagtccgctcgctccatcgccgacggggccatgatggaggcggccagcgtgtgcatggggcagatggagcctgatcaggtgtacgaggggatcaccttcgaggacttcctgaagatctggcaggggatcgacattgagaccaagatgcacgtccgcttccttaacatggaaaccatggccctctgccactgacccaccgccacctccgcggagaaactgcactttgcaatggggccgcctccccgcgtagctggagcagcccaggcccggcggacagcctcttcctgcagcgccggtacatagccaaggctcgtctgcgcaccttgtgtcttgtagggtatggtatgtgggacttcgctgtttttatctccaataaaaaaaaaaaaaaggtttgttaattaat

SEQ ID NO: 17 - DNA, 1554 bp, Homo sapiens
gggaggagggggccgggccgactggcggccgaaagggaggtgggggcggggtctggcccccgcggcgggctggggggccggggtgcggggtccgggcggggcgggcccgcgctcacttcctcggggaggggttggggccgcgctcccactcgcccacacggtccgtctgcagtcggcagcctcgccggcagctcgctcggcccccgcttggcccggcccgcaggagctgttctatgaagaccgccatttccacgagggctgcttccgctgctgccgctgccagcgctcactagccgatgaacccttcacctgccaggacagtgagctgctctgcaatgactgctactgcagtgcgttttcctcgcagtgctccgcttgtggggagactgtcatgcctgggtcccggaagctggaatatggaggccagacatggcatgagcactgcttcctgtgcagtggctgtgaacagccactgggctcccgttcttttgtgcccgacaagggtgctcactactgcgtgccctgctatgagaacaagtttgctcctcgctgcgcccgctgcagcaagacgctgacacagggtggagtgacataccgtgatcagccgtggcatcgagaatgtctggtctgtaccggatgccagacgcccctggcagggcagcagttcacctcccgggatgaagatccctactgtgtggcctgttttggagaactctttgcacctaagtgcagcagctgcaagcgccccatcgtaggactcggtggaggcaagtatgtgtcctttgaagaccgacactggcaccacaactgcttctcctgcgcccgctgctctacctccctggtgggccagggcttcgtaccggatggagaccaagtgctctgccagggctgtagccaggcagggccctaagccagggctcctggacccaggctttcccataccacgggcccaggactgtggctccttttctaaaccacctctgggactcagctccccccgccaaaaaaaatgggtctccttctgggctccaggattgtctccccactccagcatccccaaactggtactccctgacccaggcccccaatcctgggctcttacagagcctccatgagtcaagccccctccccacacctggactccagaattcaccctctcccctgcagtctgggttcccagactgagtcctctccccaaatcagggctctagacccgagccctccaaacctggactctgggacttaggcccccttaaatctagacttctctttataggtttcaggtctcctatgggtgcctgggaagtccttgaaagtggactgttctcaggcttgacctgccccaccccatccccgcggttgaggctgtgggggcagcagatcaggagcccactgataaggggccctagggtacagggtgctgcccagcaggtcgccaccgagtgtcttctcattttatttcagctccattttgcccatagatgggcagaggggtgagattggctcatcccccttccagattctgcaataaagcggtgtgaggaagcaggggcc

SEQ ID NO: 18 - DNA, 1466 bp, Homo sapiens
gggaggagggggccgggccgactggcggccgaaagggaggtgggggcggggtctggcccccgcggcgggctggggggccggggtgcggggtccgggcggggcgggcccgcgctcacttcctcggggaggggttggggccgcgctcccactcgcccacacggtccgtctgcagtcggcagcctcgccggcagctcgctcggcccccgcttggcccggcccgcaggtaggagccgccgagggacgcggcgcccggttcccggccccgcctgcgccgcgcgctccccgctcccgccgcccgcttcgaggagctgttctatgaagaccgccatttccacgagggctgcttccgctgctgccgctgccagcgctcactagccgatgaacccttcacctgccaggacagtgagctgctctgcaatgactgctactgcagtgcgttttcctcgcagtgctccgcttgtggggagactgtcatgcctgacgctgacacagggtggagtgacataccgtgatcagccgtggcatcgagaatgtctggtctgtaccggatgccagacgcccctggcagggcagcagttcacctcccgggatgaagatccctactgtgtggcctgttttggagaactctttgcacctaagtgcagcagctgcaagcgccccatcgtaggactcggtggaggcaagtatgtgtcctttgaagaccgacactggcaccacaactgcttctcctgcgcccgctgctctacctccctggtgggccagggcttcgtaccggatggagaccaagtgctctgccagggctgtagccaggcagggccctaagccagggctcctggacccaggctttcccataccacgggcccaggactgtggctccttttctaaaccacctctgggactcagctccccccgccaaaaaaaatgggtctccttctgggctccaggattgtctccccactccagcatccccaaactggtactccctgacccaggcccccaatcctgggctcttacagagcctccatgagtcaagccccctccccacacctggactccagaattcaccctctcccctgcagtctgggttcccagactgagtcctctccccaaatcagggctctagacccgagccctccaaacctggactctgggacttaggcccccttaaatctagacttctctttataggtttcaggtctcctatgggtgcctgggaagtccttgaaagtggactgttctcaggcttgacctgccccaccccatccccgcggttgaggctgtgggggcagcagatcaggagcccactgataaggggccctagggtacagggtgctgcccagcaggtcgccaccgagtgtcttctcattttatttcagctccattttgcccatagatgggcagaggggtgagattggctcatcccccttccagattctgcaataaagcggtgtgaggaagcaggggcc

SEQ ID NO: 19 - DNA, 2110 bp, Homo sapiens
tctgcaggaggggagctgggaacgacctgagctaaagctcggagctgtgcgaagaaaccggaaaagcccagagcacttgcaggggcgggtggggagctagatggtggggtggggtggggacggaggagggccagcaggagacattccgcagggaggggcaagcacgtgtgaggcgggcggggcgcgaagggtcaggcttttgctcaaaacaggcagaggacaaggtcagctcagccgcagaccgagccgctggtgactgtctccgccaccaggcagtgagagtgaagggagagcgcgagctctgaagcccgctagactaagcttgcaatctgagctccattcaccccctcctatttcttgagaccttgtcagttcccctgtgagcctcggactcctcacttgtaaaacgaggacagatgcccgtgccagaagtcaaccagagctttccccggcgtgggcaccagcccaagggcgttttgcttttctagtctcatctctgctctgacgctaagctcaaagagggactgggggacgggaagatatccaccatggcatgcgccctagctctcgggctggtgttggctgcttccttctcagattccagagtgcctagaggccaggaaagggagaaggtcctaccagcctggggtagggactcgggggccaggcactggcgctgacgcaggctagcagggcgccactggctggtccccacccacctcggtgggttgggggatgggcgcaccagcccctcctgggtgagccctagcctggggcttcctatttcgggagccgggggcgtgggccacgtctcctcatgtgatgcgagggctatttaaagcggcagcccgggcagggagccgccgtcggagcccttgcacgcctgctctcttgtagcttctctcagcctagcccagcatcactatggtggacgctttcctgggcacctggaagctagtggacagcaagaatttcgatgactacatgaagtcactcggtgtgggttttgctaccaggcaggtggccagcatgaccaagcctaccacaatcatcgaaaagaatggggacattctcaccctaaaaacacacagcaccttcaagaacacagagatcagctttaagttgggggtggagttcgatgagacaacagcagatgacaggaaggtcaagtccattgtgacactggatggagggaaacttgttcacctgcagaaatgggacgggcaagagaccacacttgtgcgggagctaattgatggaaaactcatcctggtaagatgggcaactttggagctatatctgattggttattactactgctctttcagccaagcctgttctaaaaagccaagtcctcccctgagagctgtagaagctgggacaagagagtggttgtgggtcagggtggtatcaggtgggaattttctgtgtagtggctttggactcacacaggccggaactcaaatcttaccttataggctacatgactgtgggcaaatcaccttttccaagtgcaactgtaaaacgggtattaataataccaaccttgtagggctgctgggaagcctgtaagagacagtgtatgcacagcacaaagcatcactgattgaggaacacagcaggtgctccatgtcctttgtttgctcttcctgtgtttctaccttgcctcacctcaggaagaagtagaaaacagggccaaatctgatcccaggccctctaggaggggctcccattgcctatctcagcattccctttcctctcctccctaggactgcattgtcacttgcagggacaggctcgtgactggtggggacactgaatgacagtacagtcctttcttccccattctagtcctaccccattttcatgctttctatgtctggcctactgaaactacttgactactgcttgggtaggaagtaccacagccaggctggcagatctgttcaagcttggggacttcacttggagaatctagccttgactgaattccccccagacccagggagagcagccaactgtggattctgcctaaccacagggcctcaggttttcacctaggcatcttcactgcacaccttcttgggtcagcataacctgttaactgcat

SEQ ID NO: 20 - DNA, 1733 bp, Homo sapiens
tctgcaggaggggagctgggaacgacctgagctaaagctcggagctgtgcgaagaaaccggaaaagcccagagcacttgcaggggcgggtggggagctagatggtggggtggggtggggacggaggagggccagcaggagacattccgcagggaggggcaagcacgtgtgaggcgggcggggcgcgaagggtcaggcttttgctcaaaacaggcagaggacaaggtcagctcagccgcagaccgagccgctggtgactgtctccgccaccaggcagtgagagtgaagggagagcgcgagctctgaagcccgctagactaagcttgcaatctgagctccattcaccccctcctatttcttgagaccttgtcagttcccctgtgagcctcggactcctcacttgtaaaacgaggacagatgcccgtgccagaagtcaaccagagctttccccggcgtgggcaccagcccaagggcgttttgcttttctagtctcatctctgctctgacgctaagctcaaagagggactgggggacgggaagatatccaccatggcatgcgccctagctctcgggctggtgttggctgcttccttctcagattccagagtgcctagaggccaggaaagggagaaggtcctaccagcctggggtagggactcgggggccaggcactggcgctgacgcaggctagcagggcgccactggctggtccccacccacctcggtgggttgggggatgggcgcaccagcccctcctgggtgagccctagcctggggcttcctatttcgggagccgggggcgtgggccacgtctcctcatgtgatgcgagggctatttaaagcggcagcccgggcagggagccgccgtcggagcccttgcacgcctgctctcttgtagcttctctcagcctagcccagcatcactatggtggacgctttcctgggcacctggaagctagtggacagcaagaatttcgatgactacatgaagtcactcggtgtgggttttgctaccaggcaggtggccagcatgaccaagcctaccacaatcatcgaaaagaatggggacattctcaccctaaaaacacacagcaccttcaagaacacagagatcagctttaagttgggggtggagttcgatgagacaacagcagatgacaggaaggtcaagtccattgtgacactggatggagggaaacttgttcacctgcagaaatgggacgggcaagagaccacacttgtgcgggagctaattgatggaaaactcatcctggatgttctgacagcctggccaagcatctacaggagacaagtcaaagttttaagagaagatgaaataacaattcttccttggcatctccaatggagtagagagaaggcaacaaagcttctcagacccacattaccgagctataacaaccatggctgggaggagctgagagttggcaaatcaatagtttagctatgttgctgaaccttcctggatggcaagaccatggaagtccatcacaagatattatggggtcaggagcctcactgggttctgccccttatataggtgaatatcctgggaaagtaaaaatgaaaatacagagtctggcaccagttccctgcaagcctggtccagcctggataaagaagtgaggagagtaataatactgccttacacctaaacagtgctttagtttatcaagctttttgcatccttatcttacaataatagtctgtagagtc

SEQ ID NO: 21 - DNA, 1822 bp, Homo sapiens
tctgcaggaggggagctgggaacgacctgagctaaagctcggagctgtgcgaagaaaccggaaaagcccagagcacttgcaggggcgggtggggagctagatggtggggtggggtggggacggaggagggccagcaggagacattccgcagggaggggcaagcacgtgtgaggcgggcggggcgcgaagggtcaggcttttgctcaaaacaggcagaggacaaggtcagctcagccgcagaccgagccgctggtgactgtctccgccaccaggcagtgagagtgaagggagagcgcgagctctgaagcccgctagactaagcttgcaatctgagctccattcaccccctcctatttcttgagaccttgtcagttcccctgtgagcctcggactcctcacttgtaaaacgaggacagatgcccgtgccagaagtcaaccagagctttccccggcgtgggcaccagcccaagggcgttttgcttttctagtctcatctctgctctgacgctaagctcaaagagggactgggggacgggaagatatccaccatggcatgcgccctagctctcgggctggtgttggctgcttccttctcagattccagagtgcctagaggccaggaaagggagaaggtcctaccagcctggggtagggactcgggggccaggcactggcgctgacgcaggctagcagggcgccactggctggtccccacccacctcggtgggttgggggatgggcgcaccagcccctcctgggtgagccctagcctggggcttcctatttcgggagccgggggcgtgggccacgtctcctcatgtgatgcgagggctatttaaagcggcagcccgggcagggagccgccgtcggagcccttgcacgcctgctctcttgtagcttctctcagcctagcccagcatcactatggtggacgctttcctgggcacctggaagctagtggacagcaagaatttcgatgactacatgaagtcactcggtgtgggttttgctaccaggcaggtggccagcatgaccaagcctaccacaatcatcgaaaagaatggggacattctcaccctaaaaacacacagcaccttcaagaacacagagatcagctttaagttgggggtggagttcgatgagacaacagcagatgacaggaaggtcaagtccattgtgacactggatggagggaaacttgttcacctgcagaaatgggacgggcaagagaccacacttgtgcgggagctaattgatggaaaactcatcctgatggaaaaactgcaactcagaaatgtaaagtgagtcgaccaaggctaaagcggcaaaaccactatactttataacacagagtttggcactatttccactttgttctctctcaaagatgaaggctcaggaggagggaagataaaaacaaatcactggagagtcctggcatgctggaacatggactctagctagcaagaagggctcaaggaggtggccttctcctagacctcaactttgatgcaaaagctgttttgcagcctgaacaaagacaatccaatcctccagcaaatggcgtcattttccctacgtgtctagccttgagctacagaacaaaagaacaatcacatccgaagttgtagttcgcctggttgcggtggctcacgcctgtgatcccagcactttgggaggccaaggtgggtggatcacctgaggtcaggaggtcgagactagcctgaccaacatgaagaaaccccatctctactaaaaatacaaaattagctgggcgtggtggcacatgcctgtaatcccagctactcgggaggctgaggca

SEQ ID NO: 22 - DNA, 3531 bp, Homo sapiens
tctgcaggaggggagctgggaacgacctgagctaaagctcggagctgtgcgaagaaaccggaaaagcccagagcacttgcaggggcgggtggggagctagatggtggggtggggtggggacggaggagggccagcaggagacattccgcagggaggggcaagcacgtgtgaggcgggcggggcgcgaagggtcaggcttttgctcaaaacaggcagaggacaaggtcagctcagccgcagaccgagccgctggtgactgtctccgccaccaggcagtgagagtgaagggagagcgcgagctctgaagcccgctagactaagcttgcaatctgagctccattcaccccctcctatttcttgagaccttgtcagttcccctgtgagcctcggactcctcacttgtaaaacgaggacagatgcccgtgccagaagtcaaccagagctttccccggcgtgggcaccagcccaagggcgttttgcttttctagtctcatctctgctctgacgctaagctcaaagagggactgggggacgggaagatatccaccatggcatgcgccctagctctcgggctggtgttggctgcttccttctcagattccagagtgcctagaggccaggaaagggagaaggtcctaccagcctggggtagggactcgggggccaggcactggcgctgacgcaggctagcagggcgccactggctggtccccacccacctcggtgggttgggggatgggcgcaccagcccctcctgggtgagccctagcctggggcttcctatttcgggagccgggggcgtgggccacgtctcctcatgtgatgcgagggctatttaaagcggcagcccgggcagggagccgccgtcggagcccttgcacgcctgctctcttgtagcttctctcagcctagcccagcatcactatggtggacgctttcctgggcacctggaagctagtggacagcaagaatttcgatgactacatgaagtcactcgctcatatactcataaccttccccctaccctcaggtgtgggttttgctaccaggcaggtggccagcatgaccaagcctaccacaatcatcgaaaagaatggggacattctcaccctaaaaacacacagcaccttcaagaacacagagatcagctttaagttgggggtggagttcgatgagacaacagcagatgacaggaaggtcaagtccattgtgacactggatggagggaaacttgttcacctgcagaaatgggacgggcaagagaccacacttgtgcgggagctaattgatggaaaactcatcctgacactcacccacggcactgcagtttgcactcgcacttatgagaaagaggcatgacctgactgcactgttgctgactactactctgccaatcggctacccctcgactcagcaccacattgcctcatttcttcctctgcattttgtacaaatccacgaattcttctggggtcaggtgccactgaccgggatccagttccagttcccatggtgtatgtggttttttttttttttttttaactgcactcatagggtgctctgaggtcaataaagcagagccaaggccacccagttgcctttttgcctttggtaacataactctgggagtcttggtttatcctgtgtgtcagagagtgggcagaaataacggcctgaaggttactgaggaagaagcactggatgggagactgaaatggacagtctcggagcctgttaatcagctgatcaccttacacatttaataataaaagagctgtacctacacgttgcctttacactgccccccctccatggtcaaatgacctagttcagtcagtgatggggcttccccaggtttggctattgaactgtcacttcaggcccatcctacactgaaagctcttgggtctggctgttctctgtgaaatgctgtagtctctccctttccagaattcaggttcagggcacagaacccaggcttgtaccatggtggtgggagaaaatgaccactggccaagaggactgctgacctgtgcaccaggctagtacttatgactacaaattcttactgcttctctaatcaactctgagggaagagggcatctgatcattacaaaagggagggcttataagtgatctcccaagaaggcagtgatctgctagtgcctttggctctgtacctctgctgggcatctctccaaggtctaaggtaacatattaaatgtttttgtcagctaatgcaggctcagtgactttaagtctgtaagttacccaggaagaaggattataggaaaaataactcagtaagtttaaaaccaaacacatttccatttagtgacaggaatttaagcaaggacctgaagtagaatcaactgattcacacagtagtaaatacaaagtagaacaatgatcttggcttcgctgtctggttcagtggtctgctggaatgcaatacacaagttaagtcacactgcagactgttttctagctgtggccgctggatgccacttctagcatagtagaactatgttaggaggaatgggaaaagtgagcaccacttctcaccatgttcccccctcctgctgccagtctctgctcccatgttggatgcagcagagatcacccaccagttggcccaggacagaccaataggaagggtccaatcactctaactacagccgaactcacctccacaacagtctctgtggctctagcctggactcctttacaggaatccagctctggcagtggcagctggagagggtaatagggcctcctgctgaatgaaggaagttgggtgaatgaatgggtgagctgcagggttcacttgcaaagggaccaggagtgataaggaaacaacaactcattcaggcagctgcttttgacctctaactcccaaacctgcctgttgcatgaggggaagccatctcccatgggagcgaagttaatggggtgggaggctatattctcactattgagtctttccaggagtctcaaggcacaaggctcctggtttcttactctcaaccaccccctacactctttatactctcactccttgtgcttcttcttgtgcttcttcttctttttcttcttctttgctgccttgctgtcttttgatgtgtgccttgccctcttgcctgtatcactctcagagtctgagctgtcagagtcagatgacttcctatctctatgtttctttttcttcttctcctgaaaagaaaattttaaaaatcaacactgtatgtgtatatttgcttttaacaatcatagcacataattggccaggtgcagtggctcacacctgtaatcctagtactttgggaagccgaggtgggaggaatgcttgaggccaggagttcaagatcaacctggctaacatagcaagatctcatctctaaaaagagaaaaaaagaaaaattatagcacacaatcaataggggaccacttaattttcttttagacagtctcgctctgttgcccaggctagagtgcagtgcagtggcacgatcacagctcactgcaacctca

SEQ ID NO: 23 - DNA, 3429 bp, Homo sapiens
cctggaccctggggcgtgaggagggcgcggtgcgtcccgtggttgtgcttggaagccccccgagggtgcgcgcgcgtgggtatgagtgcgtgcgtgtgcctgggtgtgcgtgtgtgtaagtgtgcacgtgtgtgtgtgagagtgcgcgcggggaaggaggcacagagacagcccggacaggccactgcgcagccctggtggcccccgctccacctctcgctccgcagacccgcgccagggaggcctctgggccgcagcgggcaccggagcggagcgggcgcggcagcgggcgctgggaggtggggctgggggaggagagggggagggagagaggcgggcgggaggggaggatccgggaagctccggggtatttgacaggagcgagggcggacgcaaagaacgcggaggacctctgggtgcctgcaggggagctgctccagccgggccgccgggagcggtggggagagcatcgcggagccgcccctccacgcgcccgcccagccgcgctcgcccactgggctctcccggctgcagtgccagggcgcaggacgcggccgatctcccgctcccgccacctccgccaccatgctgctcccccagctctgctggctgccgctgctcgctgggctgctcccgccggtgcccgctcagaagttctcggcgctcacgtttttgagagtggatcaagataaagacaaggattgtagcttggactgtgcgggttcgccccagaaacctctctgcgcatctgacggaaggaccttcctttcccgttgtgaatttcaacgtgccaagtgcaaagatccccagctagagattgcatatcgaggaaactgcaaagacgtgtccaggtgtgtggccgaaaggaagtatacccaggagcaagcccggaaggagtttcagcaagtgttcattcctgagtgcaatgacgacggcacctacagtcaggtccagtgtcacagctacacgggatactgctggtgcgtcacgcccaacgggaggcccatcagcggcactgccgtggcccacaagacgccccggtgcccgggttccgtaaatgaaaagttaccccaacgcgaaggcacaggaaaaacagatattgcatcacgttaccctaccctttggactgaacaggttaaaagtcggcagaacaaaaccaataagaattcagtgtcatcctgtgaccaagagcaccagtctgccctggaggaagccaagcagcccaagaacgacaatgtggtgatccctgagtgtgcgcacggcggcctctacaagccagtgcagtgccacccctccacggggtactgctggtgcgtcctggtggacacggggcgccccattcccggcacatccacaaggtacgagcagccgaaatgtgacaacacggccagggcccacccagccaaagcccgggacctgtacaagggccgccagctacaaggttgtccgggtgccaaaaagcatgagtttctgaccagcgttctggacgcgctgtccacggacatggtccacgccgcctccgacccctcctcctcgtcaggcaggctctcagaacccgaccccagccataccctagaggagcgggtggtgcactggtacttcaaactactggataaaaactccagtggagacatcggcaaaaaggaaatcaaacccttcaagaggttccttcgcaaaaaatcaaagcccaaaaaatgtgtgaagaagtttgttgaatactgtgacgtgaataatgacaaatccatctccgtacaagaactgatgggctgcctgggcgtggcgaaagaggacggcaaagcggacaccaagaaacgccacacccccagaggtcatgctgaaagtacgtctaatagacagccaaggaaacaaggataaatggctcataccccgaaggcagttcctagacacatgggaaatttccctcaccaaagagcaattaagaaaacaaaaacagaaacacatagtatttgcactttgtactttaaatgtaaattcactttgtagaaatgagctatttaaacagactgttttaatctgtgaaaatggagagctggcttcagaaaattaatcacatacaatgtatgtgtcctcttttgaccttggaaatctgtatgtggtggagaagtatttgaatgcatttaggcttaatttcttcgccttccatatgttaacagtagagctctatgcactccggctgcaatcgtatggctttctctaacccctgcagtcacttccagatgcctgtgcttacagcattgtggaatcatgttggaagctccacatgtccatggaagtttgtgatgtacggccgaccctacaggcagttaacatgcatgggctggtttgtttcttgggattttctgttagtttgtcttgttttgctttccagagatcttgctcatacaatgaatcacgcaaccactaaagctatccagttaagtgcaggtagttcccctggaggaaataatattttcaaactgtcgttggtgtgatactttggctcaaaggatctttgcttttccattttaagcttctgttttgagttttgccctggggcttgaatgagtcccagagagtcgttcggatggtgggaggctgcctaggaggcagtaaatccagtcacagtgcctgggaggggcccatccttccaaaatgtaaatccagtcgcggtgtgaccgagctggctaacaggcttgtctgcctggttttcctcctacacgtggacattattctcctgatcctcctacctggtccaccccagggctaccggaaggtaaaatcttcacctgaaccaattatgagcagtctccttactgaaggtacagccggatacgtggtgcccccggggctggtgttggcagccggggggaggtgcctgagggtccccacggttcctttctgcttttctgaatgcatcaagggtacgagaacttgccaatgggaaattcatccgagtggcactggcagagaaggataggagtggaatgcccacacagtgaccaacagaactggtctgcgtgcataaccagctgccaccctcaggcctgggccccagagctcagggcacccagtgtcttaaggaaccatttggaggacagtctgagagcaggaacttcaagctgtgattctatctcggctcagacttttggttggaaaaagatcttcatggccccaaatcccctgagacatgccttgtagaatgattttgtgatgttgtgatgcttgtggagcatcgcgtaaggcttcttgcttatttaaactgtgcaaggtaaaaatcaagcctttggagccacagaaccagctcaagtacatgccaatgttgtttaagaaacagttatgatcctaaactttttggataatcttttatatttctgacctttgaatttaatcattgttcttagattaaaataaaatatgctattgaaacta

SEQ ID NO: 24 - DNA, 5165 bp, Homo sapiens
cctggaccctggggcgtgaggagggcgcggtgcgtcccgtggttgtgcttggaagccccccgagggtgcgcgcgcgtgggtatgagtgcgtgcgtgtgcctgggtgtgcgtgtgtgtaagtgtgcacgtgtgtgtgtgagagtgcgcgcggggaaggaggcacagagacagcccggacaggccactgcgcagccctggtggcccccgctccacctctcgctccgcagacccgcgccagggaggcctctgggccgcagcgggcaccggagcggagcgggcgcggcagcgggcgctgggaggtggggctgggggaggagagggggagggagagaggcgggcgggaggggaggatccgggaagctccggggtatttgacaggagcgagggcggacgcaaagaacgcggaggacctctgggtgcctgcaggggagctgctccagccgggccgccgggagcggtggggagagcatcgcggagccgcccctccacgcgcccgcccagccgcgctcgcccactgggctctcccggctgcagtgccagggcgcaggacgcggccgatctcccgctcccgccacctccgccaccatgctgctcccccagctctgctggctgccgctgctcgctgggctgctcccgccggtgcccgctcagaagttctcggcgctcacgtttttgagagtggatcaagataaagacaaggattgtagcttggactgtgcgggttcgccccagaaacctctctgcgcatctgacggaaggaccttcctttcccgttgtgaatttcaacgtgccaagtgcaaagatccccagctagagattgcatatcgaggaaactgcaaagacgtgtccaggtgtgtggccgaaaggaagtatacccaggagcaagcccggaaggagtttcagcaagtgttcattcctgagtgcaatgacgacggcacctacagtcaggtccagtgtcacagctacacgggatactgctggtgcgtcacgcccaacgggaggcccatcagcggcactgccgtggcccacaagacgccccggtgcccgggttccgtaaatgaaaagttaccccaacgcgaaggcacaggaaaaacagatgatgccgcagctccagcgttggagactcagcctcaaggagatgaagaagatattgcatcacgttaccctaccctttggactgaacaggttaaaagtcggcagaacaaaaccaataagaattcagtgtcatcctgtgaccaagagcaccagtctgccctggaggaagccaagcagcccaagaacgacaatgtggtgatccctgagtgtgcgcacggcggcctctacaagccagtgcagtgccacccctccacggggtactgctggtgcgtcctggtggacacggggcgccccattcccggcacatccacaaggtacgagcagccgaaatgtgacaacacggccagggcccacccagccaaagcccgggacctgtacaagggccgccagctacaaggttgtccgggtgccaaaaagcatgagtttctgaccagcgttctggacgcgctgtccacggacatggtccacgccgcctccgacccctcctcctcgtcaggcaggctctcagaacccgaccccagccataccctagaggagcgggtggtgcactggtacttcaaactactggataaaaactccagtggagacatcggcaaaaaggaaatcaaacccttcaagaggttccttcgcaaaaaatcaaagcccaaaaaatgtgtgaagaagtttgttgaatactgtgacgtgaataatgacaaatccatctccgtacaagaactgatgggctgcctgggcgtggcgaaagaggacggcaaagcggacaccaagaaacgccacacccccagaggtcatgctgaaagtacgtctaatagacaggatgcaatggtggtgtcctccagacccaaagccacaacccatcgcaagtcaagaacactttccagaagataaacatgagtgggttcatgtctctctccttcaaagccaggacaaaatccccacttctttgctgccgcgagtcaatttgtgatttattttgtctgcacctgtttgatgccaggtcgacatttcctaaggcaagcccctgtatttgttgtggatttaagtggaggcggccagcacacaccttggatgtaatttaaaaccatttcctgaggaaagatgtgtgatatgctttcctttgtttagcaaatgtttatggttttaactttaaatctcaccgcaaatcacttacacttgaaaacagggctggtctgaaagtaattaccctccctgagtgccaagacctccagaagttgttttcattcccgaatggcaatcactgtactcatgcgctccacgcatcttaaataaactcagttcaaagcacatgcctcctgcttcagctcttttttccaaaaagagaaacagaagcaggttccccctccttttatagtgcctgcgtggacacgcggacctccatgcctttcatgctgtggctatgtcagcaaactacgatattgggatgatcctaacgggcaagccagctgcggctcctaccggccgtggccattgaaggccaccatgttgctttgaaacatctcaaagaataacatagtgccagccagcaagggtttcaccatatgcatgacccagacaggaactatcaaaagaagggatcacgggaaggtgcatgatgctaatgtggaatccagaggagctctttcctgatctcttcagcttccgctgccactccagaatcatcagagctgatattaaataagttaaaatgttagtccaccgtctcctcctgcaatcctaaccatcttttgagactgttagaatactttgacgggttgtctttctgtgcaactaatttaaacctcaagtttagtgtaggagatgggtttgtcttctcacctcttcagatctttatcaagggggaataaaagccaacccagaaacctaaactttaaaatttaattatttgaaataataaaacagaagaagggatcaacatttgtcggaattggcactcttggaaaactaagtctaggagatcatatattgctttttttttttcattctaaattacttttaattgaaagtcaagatgctgagttacagttgtttatcattataataagcaaactttttaagttggatttcttcttaaagaggtaaactagtgaacaaaaaagataaaaaggaaaattaagaatcaactatgcctttatcaaatttgaagcataagttatattattaaaattatttttgtataatcaaggtgataagacattctggaaaacatttaatgtatttagtacttagaatatttacagtggatgttacttttttgaaacgatatatttttcccaatttttctatcatgtcaaggaaggaaactgttaagaagttaccagtgtccaaaatgtcttcattgtttcttactcatacttacacctcacatgacctgcccagccctctttggttcagttcattcccagaagccaagccttagtcttcacagatgagcgacacacacctctgaatataatgtctcttttttgttttttccttttcagccaaggaaacaaggataaatggctcataccccgaaggcagttcctagacacatgggaaatttccctcaccaaagagcaattaagaaaacaaaaacagaaacacatagtatttgcactttgtactttaaatgtaaattcactttgtagaaatgagctatttaaacagactgttttaatctgtgaaaatggagagctggcttcagaaaattaatcacatacaatgtatgtgtcctcttttgaccttggaaatctgtatgtggtggagaagtatttgaatgcatttaggcttaatttcttcgccttccatatgttaacagtagagctctatgcactccggctgcaatcgtatggctttctctaacccctgcagtcacttccagatgcctgtgcttacagcattgtggaatcatgttggaagctccacatgtccatggaagtttgtgatgtacggccgaccctacaggcagttaacatgcatgggctggtttgtttcttgggattttctgttagtttgtcttgttttgctttccagagatcttgctcatacaatgaatcacgcaaccactaaagctatccagttaagtgcaggtagttcccctggaggaaataatattttcaaactgtcgttggtgtgatactttggctcaaaggatctttgcttttccattttaagcttctgttttgagttttgccctggggcttgaatgagtcccagagagtcgttcggatggtgggaggctgcctaggaggcagtaaatccagtcacagtgcctgggaggggcccatccttccaaaatgtaaatccagtcgcggtgtgaccgagctggctaacaggcttgtctgcctggttttcctcctacacgtggacattattctcctgatcctcctacctggtccaccccagggctaccggaaggtaaaatcttcacctgaaccaattatgagcagtctccttactgaaggtacagccggatacgtggtgcccccggggctggtgttggcagccggggggaggtgcctgagggtccccacggttcctttctgcttttctgaatgcatcaagggtacgagaacttgccaatgggaaattcatccgagtggcactggcagagaaggataggagtggaatgcccacacagtgaccaacagaactggtctgcgtgcataaccagctgccaccctcaggcctgggccccagagctcagggcacccagtgtcttaaggaaccatttggaggacagtctgagagcaggaacttcaagctgtgattctatctcggctcagacttttggttggaaaaagatcttcatggccccaaatcccctgagacatgccttgtagaatgattttgtgatgttgtgatgcttgtggagcatcgcgtaaggcttcttgcttatttaaactgtgcaaggtaaaaatcaagcctttggagccacagaaccagctcaagtacatgccaatgttgtttaagaaacagttatgatcctaaactttttggataatcttttatatttctgacctttgaatttaatcattgttcttagattaaaataaaatatgctattgaaacta

SEQ ID NO: 25 - DNA, 3575 bp, Homo sapiens
cctggaccctggggcgtgaggagggcgcggtgcgtcccgtggttgtgcttggaagccccccgagggtgcgcgcgcgtgggtatgagtgcgtgcgtgtgcctgggtgtgcgtgtgtgtaagtgtgcacgtgtgtgtgtgagagtgcgcgcggggaaggaggcacagagacagcccggacaggccactgcgcagccctggtggcccccgctccacctctcgctccgcagacccgcgccagggaggcctctgggccgcagcgggcaccggagcggagcgggcgcggcagcgggcgctgggaggtggggctgggggaggagagggggagggagagaggcgggcgggaggggaggatccgggaagctccggggtatttgacaggagcgagggcggacgcaaagaacgcggaggacctctgggtgcctgcaggggagctgctccagccgggccgccgggagcggtggggagagcatcgcggagccgcccctccacgcgcccgcccagccgcgctcgcccactgggctctcccggctgcagtgccagggcgcaggacgcggccgatctcccgctcccgccacctccgccaccatgctgctcccccagctctgctggctgccgctgctcgctgggctgctcccgccggtgcccgctcagaagttctcggcgctcacgtttttgagagtggatcaagataaagacaaggattgtagcttggactgtgcgggttcgccccagaaacctctctgcgcatctgacggaaggaccttcctttcccgttgtgaatttcaacgtgccaagtgcaaagatccccagctagagattgcatatcgaggaaactgcaaagacgtgtccaggtgtgtggccgaaaggaagtatacccaggagcaagcccggaaggagtttcagcaagtgttcattcctgagtgcaatgacgacggcacctacagtcaggtccagtgtcacagctacacgggatactgctggtgcgtcacgcccaacgggaggcccatcagcggcactgccgtggcccacaagacgccccggtgcccgggttccgtaaatgaaaagttaccccaacgcgaaggcacaggaaaaacagatgatgccgcagctccagcgttggagactcagcctcaaggagatgaagaagatattgcatcacgttaccctaccctttggactgaacaggttaaaagtcggcagaacaaaaccaataagaattcagtgtcatcctgtgaccaagagcaccagtctgccctggaggaagccaagcagcccaagaacgacaatgtggtgatccctgagtgtgcgcacggcggcctctacaagccagtgcagtgccacccctccacggggtactgctggtgcgtcctggtggacacggggcgccccattcccggcacatccacaaggtacgagcagccgaaatgtgacaacacggccagggcccacccagccaaagcccgggacctgtacaagggccgccagctacaaggttgtccgggtgccaaaaagcatgagtttctgaccagcgttctggacgcgctgtccacggacatggtccacgccgcctccgacccctcctcctcgtcaggcaggctctcagaacccgaccccagccataccctagaggagcgggtggtgcactggtacttcaaactactggataaaaactccagtggagacatcggcaaaaaggaaatcaaacccttcaagaggttccttcgcaaaaaatcaaagcccaaaaaatgtgtgaagaagtttgttgaatactgtgacgtgaataatgacaaatccatctccgtacaagaactgatgggctgcctgggcgtggcgaaagaggacggcaaagcggacaccaagaaacgccacagaagtaagagaaacctgtgatggccagagcccagatgttcttaggaggcaagccaggagaagccgggtctgacttttcagctcagagacagcactcccccagaggtcatgctgaaagtacgtctaatagacagccaaggaaacaaggataaatggctcataccccgaaggcagttcctagacacatgggaaatttccctcaccaaagagcaattaagaaaacaaaaacagaaacacatagtatttgcactttgtactttaaatgtaaattcactttgtagaaatgagctatttaaacagactgttttaatctgtgaaaatggagagctggcttcagaaaattaatcacatacaatgtatgtgtcctcttttgaccttggaaatctgtatgtggtggagaagtatttgaatgcatttaggcttaatttcttcgccttccatatgttaacagtagagctctatgcactccggctgcaatcgtatggctttctctaacccctgcagtcacttccagatgcctgtgcttacagcattgtggaatcatgttggaagctccacatgtccatggaagtttgtgatgtacggccgaccctacaggcagttaacatgcatgggctggtttgtttcttgggattttctgttagtttgtcttgttttgctttccagagatcttgctcatacaatgaatcacgcaaccactaaagctatccagttaagtgcaggtagttcccctggaggaaataatattttcaaactgtcgttggtgtgatactttggctcaaaggatctttgcttttccattttaagcttctgttttgagttttgccctggggcttgaatgagtcccagagagtcgttcggatggtgggaggctgcctaggaggcagtaaatccagtcacagtgcctgggaggggcccatccttccaaaatgtaaatccagtcgcggtgtgaccgagctggctaacaggcttgtctgcctggttttcctcctacacgtggacattattctcctgatcctcctacctggtccaccccagggctaccggaaggtaaaatcttcacctgaaccaattatgagcagtctccttactgaaggtacagccggatacgtggtgcccccggggctggtgttggcagccggggggaggtgcctgagggtccccacggttcctttctgcttttctgaatgcatcaagggtacgagaacttgccaatgggaaattcatccgagtggcactggcagagaaggataggagtggaatgcccacacagtgaccaacagaactggtctgcgtgcataaccagctgccaccctcaggcctgggccccagagctcagggcacccagtgtcttaaggaaccatttggaggacagtctgagagcaggaacttcaagctgtgattctatctcggctcagacttttggttggaaaaagatcttcatggccccaaatcccctgagacatgccttgtagaatgattttgtgatgttgtgatgcttgtggagcatcgcgtaaggcttcttgcttatttaaactgtgcaaggtaaaaatcaagcctttggagccacagaaccagctcaagtacatgccaatgttgtttaagaaacagttatgatcctaaactttttggataatcttttatatttctgacctttgaatttaatcattgttcttagattaaaataaaatatgctattgaaacta

SEQ ID NO: 26 - DNA, 2397 bp, Homo sapiens
cctggaccctggggcgtgaggagggcgcggtgcgtcccgtggttgtgcttggaagccccccgagggtgcgcgcgcgtgggtatgagtgcgtgcgtgtgcctgggtgtgcgtgtgtgtaagtgtgcacgtgtgtgtgtgagagtgcgcgcggggaaggaggcacagagacagcccggacaggccactgcgcagccctggtggcccccgctccacctctcgctccgcagacccgcgccagggaggcctctgggccgcagcgggcaccggagcggagcgggcgcggcagcgggcgctgggaggtggggctgggggaggagagggggagggagagaggcgggcgggaggggaggatccgggaagctccggggtatttgacaggagcgagggcggacgcaaagaacgcggaggacctctgggtgcctgcaggggagctgctccagccgggccgccgggagcggtggggagagcatcgcggagccgcccctccacgcgcccgcccagccgcgctcgcccactgggctctcccggctgcagtgccagggcgcaggacgcggccgatctcccgctcccgccacctccgccaccatgctgctcccccagctctgctggctgccgctgctcgctgggctgctcccgccggtgcccgctcagaagttctcggcgctcacgtttttgagagtggatcaagataaagacaaggattgtagcttggactgtgcgggttcgccccagaaacctctctgcgcatctgacggaaggaccttcctttcccgttgtgaatttcaacgtgccaagtgcaaagatccccagctagagattgcatatcgaggaaactgcaaagacgtgtccaggtgtgtggccgaaaggaagtatacccaggagcaagcccggaaggagtttcagcaagtgttcattcctgagtgcaatgacgacggcacctacagtcaggtccagtgtcacagctacacgggatactgctggtgcgtcacgcccaacgggaggcccatcagcggcactgccgtggcccacaagacgccccggtgcccgggttccgtaaatgaaaagttaccccaacgcgaaggcacaggaaaaacagatgatgccgcagctccagcgttggagactcagcctcaaggagatgaagaagatattgcatcacgttaccctaccctttggactgaacaggttaaaagtcggcagaacaaaaccaataagaattcagtgtcatcctgtgaccaagagcaccagtctgccctggaggaagccaagcagcccaagaacgacaatgtggtgatccctgagtgtgcgcacggcggcctctacaagccagtgcagtgccacccctccacggggtactgctggtgcgtcctggtggacacggggcgccccattcccggcacatccacaaggtacgagcagccgaaatgtgacaacacggccagggcccacccagccaaagcccgggacctgtacaagggccgccagctacaaggttgtccgggtgccaaaaagcatgagtttctgaccagcgttctggacgcgctgtccacggacatggtccacgccgcctccgacccctcctcctcgtcaggcaggctctcagaacccgaccccagccataccctagaggagcgggtggtgcactggtacttcaaactactggataaaaactccagtggagacatcggcaaaaaggaaatcaaacccttcaagaggttccttcgcaaaaaatcaaagcccaaaaaatgtgtgaagaagtttgttgaatactgtgacgtgaataatgacaaatccatctccgtacaagaactgatgggctgcctgggcgtggcgaaagaggacggcaaagcggacaccaagaaacgccacacccccagaggtcatgctgaaagtacgtctaatagacaggatgcaatggtggtgtcctccagacccaaagccacaacccatcgcaagtcaagaacactttccagaagataaacatgagtgggttcatgtctctctccttcaaagccaggacaaaatccccacttctttgctgccgcgagtcaatttgtgatttattttgtctgcacctgtttgatgccaggtcgacatttcctaaggcaagcccctgtatttgttgtggatttaagtggaggcggccagcacacaccttggatgtaatttaaaaccatttcctgaggaaagatgtgtgatatgctttcctttgtttagcaaatgtttatggttttaactttaaatctcaccgcaaatcacttacacttgaaaacagggctggtctgaaagtaattaccctccctgagtgccaagacctccagaagttgttttcattcccgaatggcaatcactgtactcatgcgctccacgcatcttaaataaactcagttcaaagca

SEQ ID NO: 27 - DNA, 2206 bp, Homo sapiens
cctggaccctggggcgtgaggagggcgcggtgcgtcccgtggttgtgcttggaagccccccgagggtgcgcgcgcgtgggtatgagtgcgtgcgtgtgcctgggtgtgcgtgtgtgtaagtgtgcacgtgtgtgtgtgagagtgcgcgcggggaaggaggcacagagacagcccggacaggccactgcgcagccctggtggcccccgctccacctctcgctccgcagacccgcgccagggaggcctctgggccgcagcgggcaccggagcggagcgggcgcggcagcgggcgctgggaggtggggctgggggaggagagggggagggagagaggcgggcgggaggggaggatccgggaagctccggggtatttgacaggagcgagggcggacgcaaagaacgcggaggacctctgggtgcctgcaggggagctgctccagccgggccgccgggagcggtggggagagcatcgcggagccgcccctccacgcgcccgcccagccgcgctcgcccactgggctctcccggctgcagtgccagggcgcaggacgcggccgatctcccgctcccgccacctccgccaccatgctgctcccccagctctgctggctgccgctgctcgctgggctgctcccgccggtgcccgctcagaagttctcggcgctcacgtttttgagagtggatcaagataaagacaaggattgtagcttggactgtgcgggttcgccccagaaacctctctgcgcatctgacggaaggaccttcctttcccgttgtgaatttcaacgtgccaagtgcaaagatccccagctagagattgcatatcgaggaaactgcaaagacgtgtccaggtgtgtggccgaaaggaagtatacccaggagcaagcccggaaggagtttcagcaagtgttcattcctgagtgcaatgacgacggcacctacagtcaggtccagtgtcacagctacacgggatactgctggtgcgtcacgcccaacgggaggcccatcagcggcactgccgtggcccacaagacgccccggtgcccgggttccgtaaatgaaaagttaccccaacgcgaaggcacaggaaaaacagatgatgccgcagctccagcgttggagactcagcctcaaggagatgaagaagatattgcatcacgttaccctaccctttggactgaacaggttaaaagtcggcagaacaaaaccaataagaattcagtgtcatcctgtgaccaagagcaccagtctgccctggaggaagccaagcagcccaagaacgacaatgtggtgatccctgagtgtgcgcacggcggcctctacaagccagtgcagtgccacccctccacggggtactgctggtgcgtcctggtggacacggggcgccccattcccggcacatccacaaggtacgagcagccgaaatgtgacaacacggccagggcccacccagccaaagcccgggacctgtacaagggccgccagctacaaggttgtccgggtgccaaaaagcatgagtttctgaccagcgttctggacgcgctgtccacggacatggtccacgccgcctccgacccctcctcctcgtcaggcaggctctcagaacccgaccccagccataccctagaggagcgggtggtgcactggtacttcaaactactggataaaaactccagtggagacatcggcaaaaaggaaatcaaacccttcaagaggttccttcgcaaaaaatcaaagcccaaaaaatgtgtgaagaagtttgttgaatactgtgacgtgaataatgacaaatccatctccgtacaagaactgatgggctgcctgggcgtggcgaaagaggacggcaaagcggacaccaagaaacgccacacccccagaggtcatgctgaaagtacgtctaatagacagctactgtggttgagaggaaaggtgtctttttattgcttctagagacgttgaaagtgtgacctgagcacctcataatcatgtgaaaaagacactcaaaaactaccatttgaatggatggatgaaaataacctccgtatattctacgaagatgtttaataataaataggtttcgttataagagaatgtgtgtcacttcgtctcttccctcacccccgagacttagtgacagttatttttgacttttccaactatactatttgcctagaaaatgtgtctattaaatagcgtattgagaaat

SEQ ID NO: 28 - DNA, 1292 bp, Homo sapiens
gtttcctgcttatgcaatagtagctgggagaggccgaaagaattctggtggggccacacccactggtgaaagaataaatagtgaggtttggcattggccatcagagtcactcctgccttcaccatgaagtccagcggcctcttccccttcctggtgctgcttgccctgggaactctggcaccttgggctgtggaaggctctggaaagtccttcaaagctggagtctgtcctcctaagaaatctgcccagtgccttagatacaagaaacctgagtgccagagtgactggcagtgtccagggaagaagagatgttgtcctgacacttgtggcatcaaatgcctggatcctgttgacaccccaaacccaacaaggaggaagcctgggaagtgcccagtgacttatggccaatgtttgatgcttaacccccccaatttctgtgagatggatggccagtgcaagcgtgacttgaagtgttgcatgggcatgtgtgggaaatcctgcgtttcccctgtgaaaggtaagcaggggatgagggcacactgagctccctccagccctctcagcctcaaccctctggaggcccaggcatatgggcagggggactcctgaaccctactccaagcacagcctctgtctgactcccttgtccttcaagagaactgttctccaggtctcagggccaggatttccataggatcgcctgtggctttgattctattctagtgtctctgggtgggggtcctgggcaagtgtctttctgagtctcagtttctttatcggtaaaatgtacataatgagattgaaagtgctctgcaaagcactatgtgcactaagaatttattattcaggttgtttccatcatgttttctgaggtgaaatcacaaaggatcagtggagtttgaggattatctagttcaatgctttgagtttagagttttacggtgaaaatgagacttgtctcctgacactaagtctctctcaactatagcgctatcttgctattttctctatctcagaaggatccttgggcaggaggaaggatgtggatatgatttggctggtttctatgctgaagctcttatctgattttctctcacagcttgattcctgccatatggaggaggctctggagtcctgctctgtgtggtccaggtcctttccaccctgagacttggctccaccactgatatcctcctttggggaaaggcttggcacacagcaggctttcaagaagtgccagttgatcaatgaataaataaacgagcctatttctctttgcaaaacctgcttct

SEQ ID NO: 29 - DNA, 886 bp, Homo sapiens
gtttcctgcttatgcaatagtagctgggagaggccgaaagaattctggtggggccacacccactggtgaaagaataaatagtgaggtttggcattggccatcagagtcactcctgccttcaccatgaagtccagcggcctcttccccttcctggtgctgcttgccctgggaactctggcaccttgggctgtggaaggctctggaaagtccttcaaagctggagtctgtcctcctaagaaatctgcccagtgccttagatacaagaaacctgagtgccagagtgactggcagtgtccagggaagaagagatgttgtcctgacacttgtggcatcaaatgcctggatcctgttgacaccccaaacccaacaaggaggaagcctgggaagtgcccagtgacttatggccaatgtttgatgcttaacccccccaatttctgtgagatggatggccagtgcaagcgtgacttgaagtgttgcatgggcatgtgtgggaaatcctgcgtttcccctgtgaaaggtgaaaagagacatcacaagcaattgagggaccaggaagtggatcctctagagatgaggaggcattctgctggatgacttttaaaaatgttttctccagagtcatctctctcattaacaatgttttttgtcttagaaatttcttgttgatttttaaacttacatgatttcttgttttggtatgaatacaggctgcttcagtccttcaataagcccatcacactttttcaccatgtcatctatcagcactttttctgcagtgttacgaacatcagcttcatcactgtcagcctgcgttttgcctgcaacccatcaaatgaggtcaggagaggagttttccacttttggcttcatgttggtgctcaaaact

SEQ ID NO: 30 - DNA, 696 bp, Homo sapiens
gtttcctgcttatgcaatagtagctgggagaggccgaaagaattctggtggggccacacccactggtgaaagaataaatagtgaggtttggcattggccatcagagtcactcctgccttcaccatgaagtccagcggcctcttccccttcctggtgctgcttgccctgggaactctggcaccttgggctgtggaaggctctggaaagtccttcaaagctggagtctgtcctcctaagaaatctgcccagtgccttagatacaagaaacctgagtgccagagtgactggcagtgtccagggaagaagagatgttgtcctgacacttgtggcatcaaatgcctggatcctgttgacaccccaaacccaacaaggaggaagcctgggaagtgcccagtgacttatggccaatgtttgatgcttaacccccccaatttctgtgagatggatggccagtgcaagcgtgacttgaagtgttgcatgggcatgtgtgggaaatcctgcgtttcccctgtgaaaggctgcttcagtccttcaataagcccatcacactttttcaccatgtcatctatcagcactttttctgcagtgttacgaacatcagcttcatcactgtcagcctgcgttttgcctgcaacccatcaaatgaggtcaggagaggagttttccacttttggcttcatgttggtgctcaaaact

SEQ ID NO: 31 - DNA, 706 bp, Homo sapiens
gtttcctgcttatgcaatagtagctgggagaggccgaaagaattctggtggggccacacccactggtgaaagaataaatagtgaggtttggcattggccatcagagtcactcctgccttcaccatgaagtccagcggcctcttccccttcctggtgctgcttgccctgggaactctggcaccttgggctgtggaaggctctggaaagtccttcaaagctggagtctgtcctcctaagaaatctgcccagtgccttagatacaagaaacctgagtgccagagtgactggcagtgtccagggaagaagagatgttgtcctgacacttgtggcatcaaatgcctggatcctgttgacaccccaaacccaagaggaagcctgggaagtgcccagtgacttatggccaatgtttgatgcttaacccccccaatttctgtgagatggatggccagtgcaagcgtgacttgaagtgttgcatgggcatgtgtgggaaatcctgcgtttcccctgtgaaagcttgattcctgccatatggaggaggctctggagtcctgctctgtgtggtccaggtcctttccaccctgagacttggctccaccactgatatcctcctttggggaaaggcttggcacacagcaggctttcaagaagtgccagttgatcaatgaataaataaacgagcctatttctctttgcaaaacctgcttct

SEQ ID NO: 32 - DNA, 560 bp, Homo sapiens
gtttcctgcttatgcaatagtagctgggagaggccgaaagaattctggtggggccacacccactggtgaaagaataaatagtgaggtttggcattggccatcagagtcactcctgccttcaccatgaagtccagcggcctcttccccttcctggtgctgcttgccctgggaactctggcaccttgggctgtggaaggctctggaaagtccttcaaagctggagtctgtcctcctaagaaatctgcccagtgccttagatacaagaaacctgagtgccagagtgactggcagtgtccagggaagaagagatgttgtcctgacacttgtggcatcaaatgcctggatcctgttgacaccccaaacccaacttgattcctgccatatggaggaggctctggagtcctgctctgtgtggtccaggtcctttccaccctgagacttggctccaccactgatatcctcctttggggaaaggcttggcacacagcaggctttcaagaagtgccagttgatcaatgaataaataaacgagcctatttctctttgcaaaacctgcttct

SEQ ID NO: 33 - DNA, 6951 bp, Homo sapiens
cggagggagtgagagccagaggctgctgctgccgtttgcaagaactgcaggggaggaggacgctgccacccacagcctctagagctcattgcagctgggacagcccggagtgtggttagcagctcggcaagcgctgcccaggtcctggggtggtggcagccagcgggagcaggaaaggaagcatgttcccaggctgcccacgcctctgggtcctggtggtcttgggcaccagctgggtaggctgggggagccaagggacagaagcggcacagctaaggcagttctacgtggctgctcagggcatcagttggagctaccgacctgagcccacaaactcaagtttgaatctttctgtaacttcctttaagaaaattgtctacagagagtatgaaccatattttaagaaagaaaaaccacaatctaccatttcaggacttcttgggcctactttatatgctgaagtcggagacatcataaaagttcactttaaaaataaggcagataagcccttgagcatccatcctcaaggaattaggtacagtaaattatcagaaggtgcttcttaccttgaccacacattccctgcggagaagatggacgacgctgtggctccaggccgagaatacacctatgaatggagtatcagtgaggacagtggacccacccatgatgaccctccatgcctcacacacatctattactcccatgaaaatctgatcgaggatttcaactcggggctgattgggcccctgcttatctgtaaaaaagggaccctaactgagggtgggacacagaagacgtttgacaagcaaatcgtgctactatttgctgtgtttgatgaaagcaagagctggagccagtcatcatccctaatgtacacagtcaatggatatgtgaatgggacaatgccagatataacagtttgtgcccatgaccacatcagctggcatctgctgggaatgagctcggggccagaattattctccattcatttcaacggccaggtcctggagcagaaccatcataaggtctcagccatcacccttgtcagtgctacatccactaccgcaaatatgactgtgggcccagagggaaagtggatcatatcttctctcaccccaaaacatttgcaagctgggatgcaggcttacattgacattaaaaactgcccaaagaaaaccaggaatcttaagaaaataactcgtgagcagaggcggcacatgaagaggtgggaatacttcattgctgcagaggaagtcatttgggactatgcacctgtaataccagcgaatatggacaaaaaatacaggtctcagcatttggataatttctcaaaccaaattggaaaacattataagaaagttatgtacacacagtacgaagatgagtccttcaccaaacatacagtgaatcccaatatgaaagaagatgggattttgggtcctattatcagagcccaggtcagagacacactcaaaatcgtgttcaaaaatatggccagccgcccctatagcatttaccctcatggagtgaccttctcgccttatgaagatgaagtcaactcttctttcacctcaggcaggaacaacaccatgatcagagcagttcaaccaggggaaacctatacttataagtggaacatcttagagtttgatgaacccacagaaaatgatgcccagtgcttaacaagaccatactacagtgacgtggacatcatgagagacatcgcctctgggctaataggactacttctaatctgtaagagcagatccctggacaggcgaggaatacagagggcagcagacatcgaacagcaggctgtgtttgctgtgtttgatgagaacaaaagctggtaccttgaggacaacatcaacaagttttgtgaaaatcctgatgaggtgaaacgtgatgaccccaagttttatgaatcaaacatcatgagcactatcaatggctatgtgcctgagagcataactactcttggattctgctttgatgacactgtccagtggcacttctgtagtgtggggacccagaatgaaattttgaccatccacttcactgggcactcattcatctatggaaagaggcatgaggacaccttgaccctcttccccatgcgtggagaatctgtgacggtcacaatggataatgttggaacttggatgttaacttccatgaattctagtccaagaagcaaaaagctgaggctgaaattcagggatgttaaatgtatcccagatgatgatgaagactcatatgagatttttgaacctccagaatctacagtcatggctacacggaaaatgcatgatcgtttagaacctgaagatgaagagagtgatgctgactatgattaccagaacagactggctgcagcattaggaattaggtcattccgaaactcatcattgaaccaggaagaagaagagttcaatcttactgccctagctctggagaatggcactgaattcgtttcttcgaacacagatataattgttggttcaaattattcttccccaagtaatattagtaagttcactgtcaataaccttgcagaacctcagaaagccccttctcaccaacaagccaccacagctggttccccactgagacacctcattggcaagaactcagttctcaattcttccacagcagagcattccagcccatattctgaagaccctatagaggatcctctacagccagatgtcacagggatacgtctactttcacttggtgctggagaattcagaagtcaagaacatgctaagcgtaagggacccaaggtagaaagagatcaagcagcaaagcacaggttctcctggatgaaattactagcacataaagttgggagacacctaagccaagacactggttctccttccggaatgaggccctgggaggaccttcctagccaagacactggttctccttccagaatgaggccctggaaggaccctcctagtgatctgttactcttaaaacaaagtaactcatctaagattttggttgggagatggcatttggcttctgagaaaggtagctatgaaataatccaagatactgatgaagacacagctgttaacaattggctgatcagcccccagaatgcctcacgtgcttggggagaaagcacccctcttgccaacaagcctggaaagcagagtggccacccaaagtttcctagagttagacataaatctctacaagtaagacaggatggaggaaagagtagactgaagaaaagccagtttctcattaagacacgaaaaaagaaaaaagagaagcacacacaccatgctcctttatctccgaggacctttcaccctctaagaagtgaagcctacaacacattttcagaaagaagacttaagcattcgttggtgcttcataaatccaatgaaacatctcttcccacagacctcaatcagacattgccctctatggattttggctggatagcctcacttcctgaccataatcagaattcctcaaatgacactggtcaggcaagctgtcctccaggtctttatcagacagtgcccccagaggaacactatcaaacattccccattcaagaccctgatcaaatgcactctacttcagaccccagtcacagatcctcttctccagagctcagtgaaatgcttgagtatgaccgaagtcacaagtccttccccacagatataagtcaaatgtccccttcctcagaacatgaagtctggcagacagtcatctctccagacctcagccaggtgaccctctctccagaactcagccagacaaacctctctccagacctcagccacacgactctctctccagaactcattcagagaaacctttccccagccctcggtcagatgcccatttctccagacctcagccatacaaccctttctccagacctcagccatacaaccctttctttagacctcagccagacaaacctctctccagaactcagtcagacaaacctttctccagccctcggtcagatgcccctttctccagacctcagccatacaaccctttctctagacttcagccagacaaacctctctccagaactcagccatatgactctctctccagaactcagtcagacaaacctttccccagccctcggtcagatgcccatttctccagacctcagccatacaaccctttctctagacttcagccagacaaacctctctccagaactcagtcaaacaaacctttccccagccctcggtcagatgcccctttctccagaccccagccatacaaccctttctctagacctcagccagacaaacctctctccagaactcagtcagacaaacctttccccagacctcagtgagatgcccctctttgcagatctcagtcaaattccccttaccccagacctcgaccagatgacactttctccagaccttggtgagacagatctttccccaaactttggtcagatgtccctttccccagacctcagccaggtgactctctctccagacatcagtgacaccacccttctcccggatctcagccagatatcacctcctccagaccttgatcagatattctacccttctgaatctagtcagtcattgcttcttcaagaatttaatgagtcttttccttatccagaccttggtcagatgccatctccttcatctcctactctcaatgatacttttctatcaaaggaatttaatccactggttatagtgggcctcagtaaagatggtacagattacattgagatcattccaaaggaagaggtccagagcagtgaagatgactatgctgaaattgattatgtgccctatgatgacccctacaaaactgatgttaggacaaacatcaactcctccagagatcctgacaacattgcagcatggtacctccgcagcaacaatggaaacagaagaaattattacattgctgctgaagaaatatcctgggattattcagaatttgtacaaagggaaacagatattgaagactctgatgatattccagaagataccacatataagaaagggagtatgaagagcatctcggaattcttggtcctattatcagagctgaagtggatgatgttatccaagttcgttttaaaaatttagcatccagaccgtattctctacatgcccatggactttcctatgaaaaatcatcagagggaaagacttatgaagatgactctcctgaatggtttaaggaagataatgctgttcagccaaatagcagttatacctacgtatggcatgccactgagcgatcagggccagaaagtcctggctctgcctgtcgggcttgggcctactactcagctgtgaacccagaaaaagatattcactcaggcttgataggtcccctcctaatctgccaaaaaggaatactacataaggacagcaacatgcctgtggacatgagagaatttgtcttactatttatgacctttgatgaaaagaagagctggtactatgaaaagaagtcccgaagttcttggagactcacatcctcagaaatgaaaaaatcccatgagtttcacgccattaatgggatgatctacagcttgcctggcctgaaaatgtatgagcaagagtgggtgaggttacacctgctgaacataggcggctcccaagacattcacgtggttcactttcacggccagaccttgctggaaaatggcaataaacagcaccagttaggggtctggccccttctgcctggttcatttaaaactcttgaaatgaaggcatcaaaacctggctggtggctcctaaacacagaggttggagaaaaccagagagcagggatgcaaacgccatttcttatcatggacagagactgtaggatgccaatgggactaagcactggtatcatatctgattcacagatcaaggcttcagagtttctgggttactgggagcccagattagcaagattaaacaatggtggatcttataatgcttggagtgtagaaaaacttgcagcagaatttgcctctaaaccttggatccaggtggacatgcaaaaggaagtcataatcacagggatccagacccaaggtgccaaacactacctgaagtcctgctataccacagagttctatgtagcttacagttccaaccagatcaactggcagatcttcaaagggaacagcacaaggaatgtgatgtattttaatggcaattcagatgcctctacaataaaagagaatcagtttgacccacctattgtggctagatatattaggatctctccaactcgagcctataacagacctacccttcgattggaactgcaaggttgtgaggtaaatggatgttccacacccctgggtatggaaaatggaaagatagaaaacaagcaaatcacagcttcttcgtttaagaaatcttggtggggagattactgggaacccttccgtgcccgtctgaatgcccagggacgtgtgaatgcctggcaagccaaggcaaacaacaataagcagtggctagaaattgatctactcaagatcaagaagataacggcaattataacacagggctgcaagtctctgtcctctgaaatgtatgtaaagagctataccatccactacagtgagcagggagtggaatggaaaccatacaggctgaaatcctccatggtggacaagatttttgaaggaaatactaataccaaaggacatgtgaagaactttttcaaccccccaatcatttccaggtttatccgtgtcattcctaaaacatggaatcaaagtattgcacttcgcctggaactctttggctgtgatatttactagaattgaacattcaaaaacccctggaagagactctttaagacctcaaaccatttagaatgggcaatgtattttacgctgtgttaaatgttaacagttttccactatttctctttcttttctattagtgaataaaattttatacaaga

SEQ ID NO: 34 - DNA, 6996 bp, Homo sapiens
cggagggagtgagagccagaggctgctgctgccgtttgcaagaactgcaggggaggaggacgctgccacccacagcctctagagctcattgcagctgggacagcccggagtgtggttagcagctcggcaagcgctgcccaggtcctggggtggtggcagccagcgggagcaggaaaggaagcatgttcccaggctgcccacgcctctgggtcctggtggtcttgggcaccagctgggtaggctgggggagccaagggacagaagcggcacagctaaggcagttctacgtggctgctcagggcatcagttggagctaccgacctgagcccacaaactcaagtttgaatctttctgtaacttcctttaagaaaattgtctacagagagtatgaaccatattttaagaaagaaaaaccacaatctaccatttcaggacttcttgggcctactttatatgctgaagtcggagacatcataaaagttcactttaaaaataaggcagataagcccttgagcatccatcctcaaggaattaggtacagtaaattatcagaaggtgcttcttaccttgaccacacattccctgcggagaagatggacgacgctgtggctccaggccgagaatacacctatgaatggagtatcagtgaggacagtggacccacccatgatgaccctccatgcctcacacacatctattactcccatgaaaatctgatcgaggatttcaactcggggctgattgggcccctgcttatctgtaaaaaagggaccctaactgagggtgggacacagaagacgtttgacaagcaaatcgtgctactatttgctgtgtttgatgaaagcaagagctggagccagtcatcatccctaatgtacacagtcaatggatatgtgaatgggacaatgccagatataacagtttgtgcccatgaccacatcagctggcatctgctgggaatgagctcggggccagaattattctccattcatttcaacggccaggtcctggagcagaaccatcataaggtctcagccatcacccttgtcagtgctacatccactaccgcaaatatgactgtgggcccagagggaaagtggatcatatcttctctcaccccaaaacatttgcaagctgggatgcaggcttacattgacattaaaaactgcccaaagaaaaccaggaatcttaagaaaataactcgtgagcagaggcggcacatgaagaggtgggaatacttcattgctgcagaggaagtcatttgggactatgcacctgtaataccagcgaatatggacaaaaaatacaggtctcagcatttggataatttctcaaaccaaattggaaaacattataagaaagttatgtacacacagtacgaagatgagtccttcaccaaacatacagtgaatcccaatatgaaagaagatgggattttgggtcctattatcagagcccaggtcagagacacactcaaaatcgtgttcaaaaatatggccagccgcccctatagcatttaccctcatggagtgaccttctcgccttatgaagatgaagtcaactcttctttcacctcaggcaggaacaacaccatgatcagagcagttcaaccaggggaaacctatacttataagtggaacatcttagagtttgatgaacccacagaaaatgatgcccagtgcttaacaagaccatactacagtgacgtggacatcatgagagacatcgcctctgggctaataggactacttctaatctgtaagagcagatccctggacaggcgaggaatacagagggcagcagacatcgaacagcaggctgtgtttgctgtgtttgatgagaacaaaagctggtaccttgaggacaacatcaacaagttttgtgaaaatcctgatgaggtgaaacgtgatgaccccaagttttatgaatcaaacatcatgagcactatcaatggctatgtgcctgagagcataactactcttggattctgctttgatgacactgtccagtggcacttctgtagtgtggggacccagaatgaaattttgaccatccacttcactgggcactcattcatctatggaaagaggcatgaggacaccttgaccctcttccccatgcgtggagaatctgtgacggtcacaatggataatgttggaacttggatgttaacttccatgaattctagtccaagaagcaaaaagctgaggctgaaattcagggatgttaaatgtatcccagatgatgatgaagactcatatgagatttttgaacctccagaatctacagtcatggctacacggaaaatgcatgatcgtttagaacctgaagatgaagagagtgatgctgactatgattaccagaacagactggctgcagcattaggaattaggtcattccgaaactcatcattgaaccaggaagaagaagagttcaatcttactgccctagctctggagaatggcactgaattcgtttcttcgaacacagatataattgttggttcaaattattcttccccaagtaatattagtaagttcactgtcaataaccttgcagaacctcagaaagccccttctcaccaacaagccaccacagctggttccccactgagacacctcattggcaagaactcagttctcaattcttccacagcagagcattccagcccatattctgaagaccctatagaggatcctctacagccagatgtcacagggatacgtctactttcacttggtgctggagaattcagaagtcaagaacatgctaagcgtaagggacccaaggtagaaagagatcaagcagcaaagcacaggttctcctggatgaaattactagcacataaagttgggagacacctaagccaagacactggttctccttccggaatgaggccctgggaggaccttcctagccaagacactggttctccttccagaatgaggccctggaaggaccctcctagtgatctgttactcttaaaacaaagtaactcatctaagattttggttgggagatggcatttggcttctgagaaaggtagctatgaaataatccaagatactgatgaagacacagctgttaacaattggctgatcagcccccagaatgcctcacgtgcttggggagaaagcacccctcttgccaacaagcctggaaagcagagtggccacccaaagtttcctagagttagacataaatctctacaagtaagacaggatggaggaaagagtagactgaagaaaagccagtttctcattaagacacgaaaaaagaaaaaagagaagcacacacaccatgctcctttatctccgaggacctttcaccctctaagaagtgaagcctacaacacattttcagaaagaagacttaagcattcgttggtgcttcataaatccaatgaaacatctcttcccacagacctcaatcagacattgccctctatggattttggctggatagcctcacttcctgaccataatcagaattcctcaaatgacactggtcaggcaagctgtcctccaggtctttatcagacagtgcccccagaggaacactatcaaacattccccattcaagaccctgatcaaatgcactctacttcagaccccagtcacagatcctcttctccagagctcagtgaaatgcttgagtatgaccgaagtcacaagtccttccccacagatataagtcaaatgtccccttcctcagaacatgaagtctggcagacagtcatctctccagacctcagccaggtgaccctctctccagaactcagccagacaaacctctctccagacctcagccacacgactctctctccagaactcattcagagaaacctttccccagccctcggtcagatgcccatttctccagacctcagccatacaaccctttctccagacctcagccatacaaccctttctttagacctcagccagacaaacctctctccagaactcagtcagacaaacctttctccagccctcggtcagatgcccctttctccagacctcagccatacaaccctttctctagacttcagccagacaaacctctctccagaactcagccatatgactctctctccagaactcagtcagacaaacctttccccagccctcggtcagatgcccatttctccagacctcagccatacaaccctttctctagacttcagccagacaaacctctctccagaactcagtcaaacaaacctttccccagccctcggtcagatgcccctttctccagaccccagccatacaaccctttctctagacctcagccagacaaacctctctccagaactcagtcagacaaacctttccccagacctcagtgagatgcccctctttgcagatctcagtcaaattccccttaccccagacctcgaccagatgacactttctccagaccttggtgagacagatctttccccaaactttggtcagatgtccctttccccagacctcagccaggtgactctctctccagacatcagtgacaccacccttctcccggatctcagccagatatcacctcctccagaccttgatcagatattctacccttctgaatctagtcagtcattgcttcttcaagaatttaatgagtcttttccttatccagaccttggtcagatgccatctccttcatctcctactctcaatgatacttttctatcaaaggaatttaatccactggttatagtgggcctcagtaaagatggtacagattacattgagatcattccaaaggaagaggtccagagcagtgaagatgactatgctgaaattgattatgtgccctatgatgacccctacaaaactgatgttaggacaaacatcaactcctccagagatcctgacaacattgcagcatggtacctccgcagcaacaatggaaacagaagaaattattacattgctgctgaagaaatatcctgggattattcagaatttgtacaaagggaaacagatattgaagactctgatgatattccagaagataccacatataagaaagtagtttttcgaaagtacctcgacagcacttttaccaaacgtgatcctcgaggggagtatgaagagcatctcggaattcttggtcctattatcagagctgaagtggatgatgttatccaagttcgttttaaaaatttagcatccagaccgtattctctacatgcccatggactttcctatgaaaaatcatcagagggaaagacttatgaagatgactctcctgaatggtttaaggaagataatgctgttcagccaaatagcagttatacctacgtatggcatgccactgagcgatcagggccagaaagtcctggctctgcctgtcgggcttgggcctactactcagctgtgaacccagaaaaagatattcactcaggcttgataggtcccctcctaatctgccaaaaaggaatactacataaggacagcaacatgcctgtggacatgagagaatttgtcttactatttatgacctttgatgaaaagaagagctggtactatgaaaagaagtcccgaagttcttggagactcacatcctcagaaatgaaaaaatcccatgagtttcacgccattaatgggatgatctacagcttgcctggcctgaaaatgtatgagcaagagtgggtgaggttacacctgctgaacataggcggctcccaagacattcacgtggttcactttcacggccagaccttgctggaaaatggcaataaacagcaccagttaggggtctggccccttctgcctggttcatttaaaactcttgaaatgaaggcatcaaaacctggctggtggctcctaaacacagaggttggagaaaaccagagagcagggatgcaaacgccatttcttatcatggacagagactgtaggatgccaatgggactaagcactggtatcatatctgattcacagatcaaggcttcagagtttctgggttactgggagcccagattagcaagattaaacaatggtggatcttataatgcttggagtgtagaaaaacttgcagcagaatttgcctctaaaccttggatccaggtggacatgcaaaaggaagtcataatcacagggatccagacccaaggtgccaaacactacctgaagtcctgctataccacagagttctatgtagcttacagttccaaccagatcaactggcagatcttcaaagggaacagcacaaggaatgtgatgtattttaatggcaattcagatgcctctacaataaaagagaatcagtttgacccacctattgtggctagatatattaggatctctccaactcgagcctataacagacctacccttcgattggaactgcaaggttgtgaggatgttccacacccctgggtatggaaaatggaaagatagaaaacaagcaaatcacagcttcttcgtttaagaaatcttggtggggagattactgggaacccttccgtgcccgtctgaatgcccagggacgtgtgaatgcctggcaagccaaggcaaacaacaataagcagtggctagaaattgatctactcaagatcaagaagataacggcaattataacacagggctgcaagtctctgtcctctgaaatgtatgtaaagagctataccatccactacagtgagcagggagtggaatggaaaccatacaggctgaaatcctccatggtggacaagatttttgaaggaaatactaataccaaaggacatgtgaagaactttttcaaccccccaatcatttccaggtttatccgtgtcattcctaaaacatggaatcaaagtattgcacttcgcctggaactctttggctgtgatatttactagaattgaacattcaaaaacccctggaagagactctttaagacctcaaaccatttagaatgggcaatgtattttacgctgtgttaaatgttaacagttttccactatttctctttcttttctattagtgaataaaattttatacaaga

SEQ ID NO: 35 - DNA, 2097 bp, Homo sapiens
cggagggagtgagagccagaggctgctgctgccgtttgcaagaactgcaggggaggaggacgctgccacccacagcctctagagctcattgcagctgggacagcccggagtgtggttagcagctcggcaagcgctgcccaggtcctggggtggtggcagccagcgggagcaggaaaggaagcatgttcccaggctgcccacgcctctgggtcctggtggtcttgggcaccagctgggtaggctgggggagccaagggacagaagcggcacagctaaggcagttctacgtggctgctcagggcatcagttggagctaccgacctgagcccacaaactcaagtttgaatctttctgtaacttcctttaagaaaattgtctacagagagtatgaaccatattttaagaaagaaaaaccacaatctaccatttcaggacttcttgggcctactttatatgctgaagtcggagacatcataaaagttcactttaaaaataaggcagataagcccttgagcatccatcctcaaggaattaggtacagtaaattatcagaaggtgcttcttaccttgaccacacattccctgcggagaagatggacgacgctgtggctccaggccgagaatacacctatgaatggagtatcagtgaggacagtggacccacccatgatgaccctccatgcctcacacacatctattactcccatgaaaatctgatcgaggatttcaactcggggctgattgggcccctgcttatctgtaaaaaagggaccctaactgagggtgggacacagaagacgtttgacaagcaaatcgtgctactatttgctgtgtttgatgaaagcaagagctggagccagtcatcatccctaatgtacacagtcaatggatatgtgaatgggacaatgccagatataacagtttgtgcccatgaccacatcagctggcatctgctgggaatgagctcggggccagaattattctccattcatttcaacggccaggtcctggagcagaaccatcataaggtctcagccatcacccttgtcagtgctacatccactaccgcaaatatgactgtgggcccagagggaaagtggatcatatcttctctcaccccaaaacatttgcaagctgggatgcaggcttacattgacattaaaaactgcccaaagaaaaccaggaatcttaagaaaataactcgtgagcagaggcggcacatgaagaggtgggaatacttcattgctgcagaggaagtcatttgggactatgcacctgtaataccagcgaatatggacaaaaaatacaggtctcagcatttggataatttctcaaaccaaattggaaaacattataagaaagttatgtacacacagtacgaagatgagtccttcaccaaacatacagtgaatcccaatatgaaagaagatgggattttgggtcctattatcagagcccaggtcagagacacactcaaaatcgtgttcaaaaatatggccagccgcccctatagcatttaccctcatggagtgaccttctcgccttatgaagatgaagtcaactcttctttcacctcaggcaggaacaacaccatgatcagagcagttcaaccaggggaaacctatacttataagtggaacatcttagagtttgatgaacccacagaaaatgatgcccagtgcttaacaagaccatactacagtgacgtggacatcatgagagacatcgcctctgggctaataggactacttctaatctgtaagagcagatccctggacaggcgaggaatacagagggcagcagacatcgaacagcaggctgtgtttgctgtgtttgatgagaacaaaagctggtaccttgaggacaacatcaacaagttttgtgaaaatcctgatgaggtgaaacgtgatgaccccaagttttatgaatcaaacatcatgagcagtaagtcagagtactatttttgttcatcagtttttcattcctgtggttgaaatatgactgtgcctagagtcagagacatggattaaaatctactcgctaaggggcacctccaatcctcacttccagtccaaagacttggtgatgaaatccgtg

SEQ ID NO: 36 - DNA, 5100 bp, Homo sapiens
agcacacatgatcttaactgggtctcttctcctgaatccctggggaaagagaaagacgcctacagcacttttttccactgcccctctgtggtcagcctttggtgaggggaactggaagggccttctagatcacacatccaactccctcaattataaatgagggcactgtggaccagaggagccaagggctttctccagggtcacacagtggaccaatgtcagggaccaggagggtccagatccctcagttcccaagccctacatcctcacgtccagcatgcacgtgcaaggccagcatgcccagcctggaactggagacgccgatcagagggcctggcaggctgctgccggtgcccatctcacaggccccgagggctgataaggatgcccttgaaggtgattgatggtttgcaaagcacccacttattagtatttccactggacctctgaaaacagtgatggagatagagagattgcatgtaacttgggacttgggaggtggcctgaaatgactgtgacccagctgatttctctgaggacttaggaggaaatatctgaagttggactcttcttgactgggccaaaaccagatgcttccccggcttctttgcacatacttttccccgtgctttcttgttgaaataagcagcattgtggagtgagaggcatttggaatgtgactcctccgtttacttactcctccacctaggcagaatactttgcttctgtttcctttgtgtaaaatgggaagacgatagaacctccttggttaggactgtggtgaggtgtcagtgaattaatgcgaaatccacatagaaccatgcactatcacaagcgtttgccattatcattcatagtgttagcattcataagcggcatgattgtcccagcagccttgagaaagggtggggagagcactttaatccgtgcttcacagatgaggaaactgaggcacagagaaggtccccagccttcccaagaccccacagtaggtgagttgcagggttagtctgctgtgtcccagatctgtgttctttctgccatgctgcattgccactcagagaggaacaacctgatctagaaagtgaaattttttccagccgcagctgctgcggctacatttgtgaatcagctctgtaaatacaagtttaatacgcgttgttcctgctcagtgggcgttgatagcccagccctggaagagcctttaagaacaggccttaaatagacacaccagctccatgcttcagttttgggaggctgtaccccataaaggaagggtgcaagggcctgtgggctgacaggaattacagaccggcttccaggtggccccaccacctgtgctgggcccctgctgggctcacttgactgtccctgagcccatcactcacccttttggagcaatttttgaaacagaccgctaagtacccaggttattagctggtctcatccctaccatgccggggaacagcatttggatcaccgcagtagcagcccaaggagacacacaagtagctgctttctcggactgtattattttctgaaagtaagaaactttccctgggcagaactctttctagttcccatggggatgggcaggataggcgagaggccgagcccccacttccaggtctctgggcagggcggggttaggcagcagcgggtgtcactcacacagtgactttcacttgtgctttcagtgctcaggacatgggcacctgccggcttccttctagcccggttggacagctccggcagctggtttggggaggtaaaattataggagcgtgatgtcacccgggccactcagggcagagcctggctgctgggcagaagggcacttgggccgggctgcttcagccgagagggccattcggtgtcctgcccacagagagagaaacagtgagagaccaagagagcaaaccagagagatagggagggggaatgcaaggggtccctgggggactcaggagtcccagtggagaatgagaggcaggccccccgtggtggccggggccctggctgccagaggaccgggctggtgaggaggcgaggatgtggactttcgtcacccagctgttggtcacgctggtgctgctgagcttcttcctggtcagctgtcagaacgtgatgcacattgtcagggggtccctgtgctttgtgctaaagcacatccaccaggagctggacaaggagctgggggagagcgagggcctcagtgacgacgaggagaccatctccaccagggtggtccggcggcgggtcttcctgaaggggaatgagtttcagaatattccaggggagcaggtgacagaggagcaattcacggatgagcagggcaacattgtcaccaagaagatcattcgcaaggtggttcgacagatagacttgtccagcgccgatgccgcccaggagcacgaggaggtggagctgagagggagtggcctacagccggacctgatagagggcaggaagggggcgcagatagtgaagcgggccagcctgaaaagggggaaacagtgaccccgagccgctctccttggagtagcctctcgggaggatcacacctcgacacccaacccctgaaccccacacactctgccatgcacacaggaggagagctggacctgagggccaccgcagcggtgcacacattcctctgggctgacggcatgacctctgtaagggactcctgctagtcccctcttggcatgaatgactgactgtagacgcatgacctccaggcttcaatcctgcctcttgcaatgacagctgatctgtcggaaccaggacacaaaagcagcaagaagcggggagagagagggatagaaaacaagcgcaggagagcctgcgaacgcaaaagtgaatgagggctttttgtggctggggatgggttttggttttggggttttttttttaaattgttttgacttcgtacagggtactttttcccaacctcatctgtcagaaatccatgtgggcttcctggaaagaaaaaaaaaaaaaaagaaaactaggcatgaaatcagtttaacaccttaatcttaagccatgtcctcatctgcccaccctccccaacccacatacctccattccacttgtgacaccccctcgactccctggtgacgctcctcccagatcgctctacatgacattcaggacacacacacacacacacacacacacaccactcgcctccactgaatctacacacagattttactgtgacttctgaagctgtatagactctgctgtggataaattggaattttttatgttgtctctctctctgccaatttcaatacgaatcatcttccaatggaaaatcattaccttgaagagtgcattcggggttccttgtgttagggacttaagaatctgaggcgaggacccccaggcttacctgtaggactcaaagggagccaggaccccatctgaaagggtctcctctctcagttgggggacaggccggtggctgacccaggattgcaccagcatgtccatagagaagaggttttctatgtcttcaagcactatatcatagtccgtgttcaaagtgtaaactgtacagtaatcagccttgtgtatatgaaaaacaataaatactatgcaaaccaatagaaacatttagcagtacgtacagagcctgacagcgcagctcctgaggacttctgcggctgcaggagaaggagctgtggcctgtctttcagtgaaagaggaaggaaaggagtagggctagtgaatgtatctgccaggtcttagaagtcaggaccacccagggtctcccagagtgaacttggtgctctaagtccaggcagcctgcaggctggggaccctgggtgcaggtgccaggctcgaggctgttccctgtcctgcctcagtgcctcccctctgcccagcccctgtggcctcttggagaggcgagccagggggctccccggaccgcatggccggtgagagtagagtcggaggcggagagcctggacgcccagaggccggggccaggctctgggtcaaggcaggaaggagacagacagctggcagttcctcgcctcggtgccatcagggaggagccttaagttccactagagcctccggcccagggaggccagaatcagcacaatcccggccccgccctcgcggcgggcgcccccagggccaggagagagagacagggctggctcctctcgcccctggagccgcggtgtggacggcccggccccgtccgccccgccgctctgcgggagtgtcctcgggacacacttaaaccttccaagtagcacagaagccccctccacgtcagaggccccctggccgcggggcctgtgagcggagaggggccctgcttcccacacaaatccgccccggtgcacccccggccaggcaggccccggggcggcctaggcgccttgtcggccgggggtggggctgcttttgcttcctttagaggggcgggcagggagaggaagctctagctccgggcctgagtttccccgaggctgcgtcggaggagctgcagggcgagcccggacggctgccgtctccgccagaggccaccccggcccggcctccagggcgcagaggcgcccccctccatcctcccccatcccgggggccacggcaggggggccgcacagcgcggctgggaccgattcggtgacggcccaaggaagctgggcgcagggctcgcctctcccgcctcgatcctgcaccttcctctcccaggtcgctgctgcagccaacccagtagcccccttagcgcccccgcggaccccgcagctccagactccgctttggcacctctgctccggctggcatggctgcacgctccggctgctagtaggagccgttaggggaggagtttggggtctccacacgatgcctagagaatgctgcagtctgcacattagacgctttttagaagttttgaaattaccttgatttttttaattgttatgaaaatggatcttttcttgactctcccacatgctctgttatgggagagaatcccctaccctactctgatgtatagaccattctcccttcaccagccgaaccaatgtcaaaattaataaagaaatggactaatggcacagggctcta

SEQ ID NO: 37 - DNA, 5026 bp, Homo sapiens
agcacacatgatcttaactgggtctcttctcctgaatccctggggaaagagaaagacgcctacagcacttttttccactgcccctctgtggtcagcctttggtgaggggaactggaagggccttctagatcacacatccaactccctcaattataaatgagggcactgtggaccagaggagccaagggctttctccagggtcacacagtggaccaatgtcagggaccaggagggtccagatccctcagttcccaagccctacatcctcacgtccagcatgcacgtgcaaggccagcatgcccagcctggaactggagacgccgatcagagggcctggcaggctgctgccggtgcccatctcacaggccccgagggctgataaggatgcccttgaaggtgattgatggtttgcaaagcacccacttattagtatttccactggacctctgaaaacagtgatggagatagagagattgcatgtaacttgggacttgggaggtggcctgaaatgactgtgacccagctgatttctctgaggacttaggaggaaatatctgaagttggactcttcttgactgggccaaaaccagatgcttccccggcttctttgcacatacttttccccgtgctttcttgttgaaataagcagcattgtggagtgagaggcatttggaatgtgactcctccgtttacttactcctccacctaggcagaatactttgcttctgtttcctttgtgtaaaatgggaagacgatagaacctccttggttaggactgtggtgaggtgtcagtgaattaatgcgaaatccacatagaaccatgcactatcacaagcgtttgccattatcattcatagtgttagcattcataagcggcatgattgtcccagcagccttgagaaagggtggggagagcactttaatccgtgcttcacagatgaggaaactgaggcacagagaaggtccccagccttcccaagaccccacagtaggtgagttgcagggttagtctgctgtgtcccagatctgtgttctttctgccatgctgcattgccactcagagaggaacaacctgatctagaaagtgaaattttttccagccgcagctgctgcggctacatttgtgaatcagctctgtaaatacaagtttaatacgcgttgttcctgctcagtgggcgttgatagcccagccctggaagagcctttaagaacaggccttaaatagacacaccagctccatgcttcagttttgggaggctgtaccccataaaggaagggtgcaagggcctgtgggctgacaggaattacagaccggcttccaggtggccccaccacctgtgctgggcccctgctgggctcacttgactgtccctgagcccatcactcacccttttggagcaatttttgaaacagaccgctaagtacccaggttattagctggtctcatccctaccatgccggggaacagcatttggatcaccgcagtagcagcccaaggagacacacaagtagctgctttctcggactgtattattttctgaaagtaagaaactttccctgggcagaactctttctagttcccatggggatgggcaggataggcgagaggccgagcccccacttccaggtctctgggcagggcggggttaggcagcagcgggtgtcactcacacagtgactttcacttgtgctttcagtgctcaggacatgggcacctgccggcttccttctagcccggttggacagctccggcagctggtttggggaggtaaaattataggagcgtgatgtcacccgggccactcagggcagagcctggctgctgggcagaagggcacttgggccgggctgcttcagccgagagggccattcggtgtcctgcccacagagagagaaacagtgagagaccaagagagcaaaccagagagatagggagggggaatgcaaggggtccctgggggactcaggagtcccagtggagaatgagaggcaggccccccgtggtggccggggccctggctgccagaggaccgggctggtgaggaggcgaggatgtggactttcgtcacccagctgttggtcacgctggtgctgctgagcttcttcctggtcagctgtcagaacgtgatgcacattgtcagggggtccctgtgctttgtgctaaagcacatccaccaggagctggacaaggagctgggggagagcgagggcctcagtgacgacgaggagaccatctccaccagggtggtccggcggcgggtcttcctgaaggggaatgagtttcagaatattccaggggagcaggtgacagaggagcaattcacggatgagcagggcaacattgtcaccaagaagatcattcgcaaggtggttcgacagatagacttgtccagcgccgatgccgcccaggagcacgaggaggtgactgtagaggggcccctggaggatcccagtgagctggaggtcgatattgattactttatgaaacactccaaggatcacacctcgacacccaacccctgaaccccacacactctgccatgcacacaggaggagagctggacctgagggccaccgcagcggtgcacacattcctctgggctgacggcatgacctctgtaagggactcctgctagtcccctcttggcatgaatgactgactgtagacgcatgacctccaggcttcaatcctgcctcttgcaatgacagctgatctgtcggaaccaggacacaaaagcagcaagaagcggggagagagagggatagaaaacaagcgcaggagagcctgcgaacgcaaaagtgaatgagggctttttgtggctggggatgggttttggttttggggttttttttttaaattgttttgacttcgtacagggtactttttcccaacctcatctgtcagaaatccatgtgggcttcctggaaagaaaaaaaaaaaaaaagaaaactaggcatgaaatcagtttaacaccttaatcttaagccatgtcctcatctgcccaccctccccaacccacatacctccattccacttgtgacaccccctcgactccctggtgacgctcctcccagatcgctctacatgacattcaggacacacacacacacacacacacacacaccactcgcctccactgaatctacacacagattttactgtgacttctgaagctgtggataaattggaattttttatgttgtctctctctctgccaatttcaatacgaatcatcttccaatggaaaatcattaccttgaagagtgcattcggggttccttgtgttagggacttaagaatctgaggcgaggacccccaggcttacctgtaggactcaaagggagccaggaccccatctgaaagggtctcctctctcagttgggggacaggccggtggctgacccaggattgcaccagcatgtccatagagaagaggttttctatgtcttcaagcactatatcatagtccgtgttcaaagtgtaaactgtacagtaatcagccttgtgtatatgaaaaacaataaatactatgcaaaccaatagaaacatttagcagtacgtacagagcctgacagcgcagctcctgaggacttctgcggctgcaggagaaggagctgtggcctgtctttcagtgaaagaggaaggaaaggagtagggctagtgaatgtatctgccaggtcttagaagtcaggaccacccagggtctcccagagtgaacttggtgctctaagtccaggcagcctgcaggctggggaccctgggtgcaggtgccaggctcgaggctgttccctgtcctgcctcagtgcctcccctctgcccagcccctgtggcctcttggagaggcgagccagggggctccccggaccgcatggccggtgagagtagagtcggaggcggagagcctggacgcccagaggccggggccaggctctgggtcaaggcaggaaggagacagacagctggcagttcctcgcctcggtgccatcagggaggagccttaagttccactagagcctccggcccagggaggccagaatcagcacaatcccggccccgccctcgcggcgggcgcccccagggccaggagagagagacagggctggctcctctcgcccctggagccgcggtgtggacggcccggccccgtccgccccgccgctctgcgggagtgtcctcgggacacacttaaaccttccaagtagcacagaagccccctccacgtcagaggccccctggccgcggggcctgtgagcggagaggggccctgcttcccacacaaatccgccccggtgcacccccggccaggcaggccccggggcggcctaggcgccttgtcggccgggggtggggctgcttttgcttcctttagaggggcgggcagggagaggaagctctagctccgggcctgagtttccccgaggctgcgtcggaggagctgcagggcgagcccggacggctgccgtctccgccagaggccaccccggcccggcctccagggcgcagaggcgcccccctccatcctcccccatcccgggggccacggcaggggggccgcacagcgcggctgggaccgattcggtgacggcccaaggaagctgggcgcagggctcgcctctcccgcctcgatcctgcaccttcctctcccaggtcgctgctgcagccaacccagtagcccccttagcgcccccgcggaccccgcagctccagactccgctttggcacctctgctccggctggcatggctgcacgctccggctgctagtaggagccgttaggggaggagtttggggtctccacacgatgcctagagaatgctgcagtctgcacattagacgctttttagaagttttgaaattaccttgatttttttaattgttatgaaaatggatcttttcttgactctcccacatgctctgttatgggagagaatcccctaccctactctgatgtatagaccattctcccttcaccagccgaaccaatgtcaaaattaataaagaaatggactaatggcacagggctcta

SEQ ID NO: 38 - DNA, 4885 bp, Homo sapiens
agcacacatgatcttaactgggtctcttctcctgaatccctggggaaagagaaagacgcctacagcacttttttccactgcccctctgtggtcagcctttggtgaggggaactggaagggccttctagatcacacatccaactccctcaattataaatgagggcactgtggaccagaggagccaagggctttctccagggtcacacagtggaccaatgtcagggaccaggagggtccagatccctcagttcccaagccctacatcctcacgtccagcatgcacgtgcaaggccagcatgcccagcctggaactggagacgccgatcagagggcctggcaggctgctgccggtgcccatctcacaggccccgagggctgataaggatgcccttgaaggtgattgatggtttgcaaagcacccacttattagtatttccactggacctctgaaaacagtgatggagatagagagattgcatgtaacttgggacttgggaggtggcctgaaatgactgtgacccagctgatttctctgaggacttaggaggaaatatctgaagttggactcttcttgactgggccaaaaccagatgcttccccggcttctttgcacatacttttccccgtgctttcttgttgaaataagcagcattgtggagtgagaggcatttggaatgtgactcctccgtttacttactcctccacctaggcagaatactttgcttctgtttcctttgtgtaaaatgggaagacgatagaacctccttggttaggactgtggtgaggtgtcagtgaattaatgcgaaatccacatagaaccatgcactatcacaagcgtttgccattatcattcatagtgttagcattcataagcggcatgattgtcccagcagccttgagaaagggtggggagagcactttaatccgtgcttcacagatgaggaaactgaggcacagagaaggtccccagccttcccaagaccccacagtaggtgagttgcagggttagtctgctgtgtcccagatctgtgttctttctgccatgctgcattgccactcagagaggaacaacctgatctagaaagtgaaattttttccagccgcagctgctgcggctacatttgtgaatcagctctgtaaatacaagtttaatacgcgttgttcctgctcagtgggcgttgatagcccagccctggaagagcctttaagaacaggccttaaatagacacaccagctccatgcttcagttttgggaggctgtaccccataaaggaagggtgcaagggcctgtgggctgacaggaattacagaccggcttccaggtggccccaccacctgtgctgggcccctgctgggctcacttgactgtccctgagcccatcactcacccttttggagcaatttttgaaacagaccgctaagtacccaggttattagctggtctcatccctaccatgccggggaacagcatttggatcaccgcagtagcagcccaaggagacacacaagtagctgctttctcggactgtattattttctgaaagtaagaaactttccctgggcagaactctttctagttcccatggggatgggcaggataggcgagaggccgagcccccacttccaggtctctgggcagggcggggttaggcagcagcgggtgtcactcacacagtgactttcacttgtgctttcagtgctcaggacatgggcacctgccggcttccttctagcccggttggacagctccggcagctggtttggggaggtaaaattataggagcgtgatgtcacccgggccactcagggcagagcctggctgctgggcagaagggcacttgggccgggctgcttcagccgagagggccattcggtgtcctgcccacagagagagaaacagtgagagaccaagagagcaaaccagagagatagggagggggaatgcaaggggtccctgggggactcaggagtcccagtggagaatgagaggcaggccccccgtggtggccggggccctggctgccagaggaccgggctggtgaggaggcgaggatgtggactttcgtcacccagctgttggtcacgctggtgctgctgagcttcttcctggtcagctgtcagaacgtgatgcacattgtcagggggtccctgtgctttgtgctaaagcacatccaccaggagctggacaaggagctgggggagagcgagggcctcagtgacgacgaggagaccatctccaccagggtggtccggcggcgggtcttcctgaaggggaatgagtttcagaatattccaggggagcaggtgacagaggagcaattcacggatgagcagggcaacattgtcaccaagaaggatcacacctcgacacccaacccctgaaccccacacactctgccatgcacacaggaggagagctggacctgagggccaccgcagcggtgcacacattcctctgggctgacggcatgacctctgtaagggactcctgctagtcccctcttggcatgaatgactgactgtagacgcatgacctccaggcttcaatcctgcctcttgcaatgacagctgatctgtcggaaccaggacacaaaagcagcaagaagcggggagagagagggatagaaaacaagcgcaggagagcctgcgaacgcaaaagtgaatgagggctttttgtggctggggatgggttttggttttggggttttttttttaaattgttttgacttcgtacagggtactttttcccaacctcatctgtcagaaatccatgtgggcttcctggaaagaaaaaaaaaaaaaaagaaaactaggcatgaaatcagtttaacaccttaatcttaagccatgtcctcatctgcccaccctccccaacccacatacctccattccacttgtgacaccccctcgactccctggtgacgctcctcccagatcgctctacatgacattcaggacacacacacacacacacacacacacaccactcgcctccactgaatctacacacagattttactgtgacttctgaagctgtggataaattggaattttttatgttgtctctctctctgccaatttcaatacgaatcatcttccaatggaaaatcattaccttgaagagtgcattcggggttccttgtgttagggacttaagaatctgaggcgaggacccccaggcttacctgtaggactcaaagggagccaggaccccatctgaaagggtctcctctctcagttgggggacaggccggtggctgacccaggattgcaccagcatgtccatagagaagaggttttctatgtcttcaagcactatatcatagtccgtgttcaaagtgtaaactgtacagtaatcagccttgtgtatatgaaaaacaataaatactatgcaaaccaatagaaacatttagcagtacgtacagagcctgacagcgcagctcctgaggacttctgcggctgcaggagaaggagctgtggcctgtctttcagtgaaagaggaaggaaaggagtagggctagtgaatgtatctgccaggtcttagaagtcaggaccacccagggtctcccagagtgaacttggtgctctaagtccaggcagcctgcaggctggggaccctgggtgcaggtgccaggctcgaggctgttccctgtcctgcctcagtgcctcccctctgcccagcccctgtggcctcttggagaggcgagccagggggctccccggaccgcatggccggtgagagtagagtcggaggcggagagcctggacgcccagaggccggggccaggctctgggtcaaggcaggaaggagacagacagctggcagttcctcgcctcggtgccatcagggaggagccttaagttccactagagcctccggcccagggaggccagaatcagcacaatcccggccccgccctcgcggcgggcgcccccagggccaggagagagagacagggctggctcctctcgcccctggagccgcggtgtggacggcccggccccgtccgccccgccgctctgcgggagtgtcctcgggacacacttaaaccttccaagtagcacagaagccccctccacgtcagaggccccctggccgcggggcctgtgagcggagaggggccctgcttcccacacaaatccgccccggtgcacccccggccaggcaggccccggggcggcctaggcgccttgtcggccgggggtggggctgcttttgcttcctttagaggggcgggcagggagaggaagctctagctccgggcctgagtttccccgaggctgcgtcggaggagctgcagggcgagcccggacggctgccgtctccgccagaggccaccccggcccggcctccagggcgcagaggcgcccccctccatcctcccccatcccgggggccacggcaggggggccgcacagcgcggctgggaccgattcggtgacggcccaaggaagctgggcgcagggctcgcctctcccgcctcgatcctgcaccttcctctcccaggtcgctgctgcagccaacccagtagcccccttagcgcccccgcggaccccgcagctccagactccgctttggcacctctgctccggctggcatggctgcacgctccggctgctagtaggagccgttaggggaggagtttggggtctccacacgatgcctagagaatgctgcagtctgcacattagacgctttttagaagttttgaaattaccttgatttttttaattgttatgaaaatggatcttttcttgactctcccacatgctctgttatgggagagaatcccctaccctactctgatgtatagaccattctcccttcaccagccgaaccaatgtcaaaattaataaagaaatggactaatggcacagggctcta

SEQ ID NO: 39 - DNA, 5020 bp, Homo sapiens
agcacacatgatcttaactgggtctcttctcctgaatccctggggaaagagaaagacgcctacagcacttttttccactgcccctctgtggtcagcctttggtgaggggaactggaagggccttctagatcacacatccaactccctcaattataaatgagggcactgtggaccagaggagccaagggctttctccagggtcacacagtggaccaatgtcagggaccaggagggtccagatccctcagttcccaagccctacatcctcacgtccagcatgcacgtgcaaggccagcatgcccagcctggaactggagacgccgatcagagggcctggcaggctgctgccggtgcccatctcacaggccccgagggctgataaggatgcccttgaaggtgattgatggtttgcaaagcacccacttattagtatttccactggacctctgaaaacagtgatggagatagagagattgcatgtaacttgggacttgggaggtggcctgaaatgactgtgacccagctgatttctctgaggacttaggaggaaatatctgaagttggactcttcttgactgggccaaaaccagatgcttccccggcttctttgcacatacttttccccgtgctttcttgttgaaataagcagcattgtggagtgagaggcatttggaatgtgactcctccgtttacttactcctccacctaggcagaatactttgcttctgtttcctttgtgtaaaatgggaagacgatagaacctccttggttaggactgtggtgaggtgtcagtgaattaatgcgaaatccacatagaaccatgcactatcacaagcgtttgccattatcattcatagtgttagcattcataagcggcatgattgtcccagcagccttgagaaagggtggggagagcactttaatccgtgcttcacagatgaggaaactgaggcacagagaaggtccccagccttcccaagaccccacagtaggtgagttgcagggttagtctgctgtgtcccagatctgtgttctttctgccatgctgcattgccactcagagaggaacaacctgatctagaaagtgaaattttttccagccgcagctgctgcggctacatttgtgaatcagctctgtaaatacaagtttaatacgcgttgttcctgctcagtgggcgttgatagcccagccctggaagagcctttaagaacaggccttaaatagacacaccagctccatgcttcagttttgggaggctgtaccccataaaggaagggtgcaagggcctgtgggctgacaggaattacagaccggcttccaggtggccccaccacctgtgctgggcccctgctgggctcacttgactgtccctgagcccatcactcacccttttggagcaatttttgaaacagaccgctaagtacccaggttattagctggtctcatccctaccatgccggggaacagcatttggatcaccgcagtagcagcccaaggagacacacaagtagctgctttctcggactgtattattttctgaaagtaagaaactttccctgggcagaactctttctagttcccatggggatgggcaggataggcgagaggccgagcccccacttccaggtctctgggcagggcggggttaggcagcagcgggtgtcactcacacagtgactttcacttgtgctttcagtgctcaggacatgggcacctgccggcttccttctagcccggttggacagctccggcagctggtttggggaggtaaaattataggagcgtgatgtcacccgggccactcagggcagagcctggctgctgggcagaagggcacttgggccgggctgcttcagccgagagggccattcggtgtcctgcccacagagagagaaacagtgagagaccaagagagcaaaccagagagatagggagggggaatgcaaggggtccctgggggactcaggagtcccagtggagaatgagaggcaggccccccgtggtggccggggccctggctgccagaggaccgggctggtgaggaggcgaggatgtggactttcgtcacccagctgttggtcacgctggtgctgctgagcttcttcctggtcagctgtcagaacgtgatgcacattgtcagggggtccctgtgctttgtgctaaagcacatccaccaggagctggacaaggagctgggggagagcgagggcctcagtgacgacgaggagaccatctccaccagggtggtccggcggcgggtcttcctgaaggggaatgagtttcagaatattccaggggagcaggtgacagaggagcaattcacggatgagcagggcaacattgtcaccaagaaggtggagctgagagggagtggcctacagccggacctgatagagggcaggaagggggcgcagatagtgaagcgggccagcctgaaaagggggaaacagtgaccccgagccgctctccttggagtagcctctcgggaggatcacacctcgacacccaacccctgaaccccacacactctgccatgcacacaggaggagagctggacctgagggccaccgcagcggtgcacacattcctctgggctgacggcatgacctctgtaagggactcctgctagtcccctcttggcatgaatgactgactgtagacgcatgacctccaggcttcaatcctgcctcttgcaatgacagctgatctgtcggaaccaggacacaaaagcagcaagaagcggggagagagagggatagaaaacaagcgcaggagagcctgcgaacgcaaaagtgaatgagggctttttgtggctggggatgggttttggttttggggttttttttttaaattgttttgacttcgtacagggtactttttcccaacctcatctgtcagaaatccatgtgggcttcctggaaagaaaaaaaaaaaaaaagaaaactaggcatgaaatcagtttaacaccttaatcttaagccatgtcctcatctgcccaccctccccaacccacatacctccattccacttgtgacaccccctcgactccctggtgacgctcctcccagatcgctctacatgacattcaggacacacacacacacacacacacacacaccactcgcctccactgaatctacacacagattttactgtgacttctgaagctgtggataaattggaattttttatgttgtctctctctctgccaatttcaatacgaatcatcttccaatggaaaatcattaccttgaagagtgcattcggggttccttgtgttagggacttaagaatctgaggcgaggacccccaggcttacctgtaggactcaaagggagccaggaccccatctgaaagggtctcctctctcagttgggggacaggccggtggctgacccaggattgcaccagcatgtccatagagaagaggttttctatgtcttcaagcactatatcatagtccgtgttcaaagtgtaaactgtacagtaatcagccttgtgtatatgaaaaacaataaatactatgcaaaccaatagaaacatttagcagtacgtacagagcctgacagcgcagctcctgaggacttctgcggctgcaggagaaggagctgtggcctgtctttcagtgaaagaggaaggaaaggagtagggctagtgaatgtatctgccaggtcttagaagtcaggaccacccagggtctcccagagtgaacttggtgctctaagtccaggcagcctgcaggctggggaccctgggtgcaggtgccaggctcgaggctgttccctgtcctgcctcagtgcctcccctctgcccagcccctgtggcctcttggagaggcgagccagggggctccccggaccgcatggccggtgagagtagagtcggaggcggagagcctggacgcccagaggccggggccaggctctgggtcaaggcaggaaggagacagacagctggcagttcctcgcctcggtgccatcagggaggagccttaagttccactagagcctccggcccagggaggccagaatcagcacaatcccggccccgccctcgcggcgggcgcccccagggccaggagagagagacagggctggctcctctcgcccctggagccgcggtgtggacggcccggccccgtccgccccgccgctctgcgggagtgtcctcgggacacacttaaaccttccaagtagcacagaagccccctccacgtcagaggccccctggccgcggggcctgtgagcggagaggggccctgcttcccacacaaatccgccccggtgcacccccggccaggcaggccccggggcggcctaggcgccttgtcggccgggggtggggctgcttttgcttcctttagaggggcgggcagggagaggaagctctagctccgggcctgagtttccccgaggctgcgtcggaggagctgcagggcgagcccggacggctgccgtctccgccagaggccaccccggcccggcctccagggcgcagaggcgcccccctccatcctcccccatcccgggggccacggcaggggggccgcacagcgcggctgggaccgattcggtgacggcccaaggaagctgggcgcagggctcgcctctcccgcctcgatcctgcaccttcctctcccaggtcgctgctgcagccaacccagtagcccccttagcgcccccgcggaccccgcagctccagactccgctttggcacctctgctccggctggcatggctgcacgctccggctgctagtaggagccgttaggggaggagtttggggtctccacacgatgcctagagaatgctgcagtctgcacattagacgctttttagaagttttgaaattaccttgatttttttaattgttatgaaaatggatcttttcttgactctcccacatgctctgttatgggagagaatcccctaccctactctgatgtatagaccattctcccttcaccagccgaaccaatgtcaaaattaataaagaaatggactaatggcacagggctcta

SEQ ID NO: 40 - DNA, 5128 bp, Homo sapiens
agcacacatgatcttaactgggtctcttctcctgaatccctggggaaagagaaagacgcctacagcacttttttccactgcccctctgtggtcagcctttggtgaggggaactggaagggccttctagatcacacatccaactccctcaattataaatgagggcactgtggaccagaggagccaagggctttctccagggtcacacagtggaccaatgtcagggaccaggagggtccagatccctcagttcccaagccctacatcctcacgtccagcatgcacgtgcaaggccagcatgcccagcctggaactggagacgccgatcagagggcctggcaggctgctgccggtgcccatctcacaggccccgagggctgataaggatgcccttgaaggtgattgatggtttgcaaagcacccacttattagtatttccactggacctctgaaaacagtgatggagatagagagattgcatgtaacttgggacttgggaggtggcctgaaatgactgtgacccagctgatttctctgaggacttaggaggaaatatctgaagttggactcttcttgactgggccaaaaccagatgcttccccggcttctttgcacatacttttccccgtgctttcttgttgaaataagcagcattgtggagtgagaggcatttggaatgtgactcctccgtttacttactcctccacctaggcagaatactttgcttctgtttcctttgtgtaaaatgggaagacgatagaacctccttggttaggactgtggtgaggtgtcagtgaattaatgcgaaatccacatagaaccatgcactatcacaagcgtttgccattatcattcatagtgttagcattcataagcggcatgattgtcccagcagccttgagaaagggtggggagagcactttaatccgtgcttcacagatgaggaaactgaggcacagagaaggtccccagccttcccaagaccccacagtaggtgagttgcagggttagtctgctgtgtcccagatctgtgttctttctgccatgctgcattgccactcagagaggaacaacctgatctagaaagtgaaattttttccagccgcagctgctgcggctacatttgtgaatcagctctgtaaatacaagtttaatacgcgttgttcctgctcagtgggcgttgatagcccagccctggaagagcctttaagaacaggccttaaatagacacaccagctccatgcttcagttttgggaggctgtaccccataaaggaagggtgcaagggcctgtgggctgacaggaattacagaccggcttccaggtggccccaccacctgtgctgggcccctgctgggctcacttgactgtccctgagcccatcactcacccttttggagcaatttttgaaacagaccgctaagtacccaggttattagctggtctcatccctaccatgccggggaacagcatttggatcaccgcagtagcagcccaaggagacacacaagtagctgctttctcggactgtattattttctgaaagtaagaaactttccctgggcagaactctttctagttcccatggggatgggcaggataggcgagaggccgagcccccacttccaggtctctgggcagggcggggttaggcagcagcgggtgtcactcacacagtgactttcacttgtgctttcagtgctcaggacatgggcacctgccggcttccttctagcccggttggacagctccggcagctggtttggggaggtaaaattataggagcgtgatgtcacccgggccactcagggcagagcctggctgctgggcagaagggcacttgggccgggctgcttcagccgagagggccattcggtgtcctgcccacagagagagaaacagtgagagaccaagagagcaaaccagagagatagggagggggaatgcaaggggtccctgggggactcaggagtcccagtggagaatgagaggcaggccccccgtggtggccggggccctggctgccagaggaccgggctggtgaggaggcgaggatgtggactttcgtcacccagctgttggtcacgctggtgctgctgagcttcttcctggtcagctgtcagaacgtgatgcacattgtcagggggtccctgtgctttgtgctaaagcacatccaccaggagctggacaaggagctgggggagagcgagggcctcagtgacgacgaggagaccatctccaccagggtggtccggcggcgggtcttcctgaaggggaatgagtttcagaatattccaggggagcaggtgacagaggagcaattcacggatgagcagggcaacattgtcaccaagaagatcattcgcaaggtggttcgacagatagacttgtccagcgccgatgccgcccaggagcacgaggaggtgactgtagaggggcccctggaggatcccagtgagctggaggtggagctgagagggagtggcctacagccggacctgatagagggcaggaagggggcgcagatagtgaagcgggccagcctgaaaagggggaaacagtgaccccgagccgctctccttggagtagcctctcgggaggatcacacctcgacacccaacccctgaaccccacacactctgccatgcacacaggaggagagctggacctgagggccaccgcagcggtgcacacattcctctgggctgacggcatgacctctgtaagggactcctgctagtcccctcttggcatgaatgactgactgtagacgcatgacctccaggcttcaatcctgcctcttgcaatgacagctgatctgtcggaaccaggacacaaaagcagcaagaagcggggagagagagggatagaaaacaagcgcaggagagcctgcgaacgcaaaagtgaatgagggctttttgtggctggggatgggttttggttttggggttttttttttaaattgttttgacttcgtacagggtactttttcccaacctcatctgtcagaaatccatgtgggcttcctggaaagaaaaaaaaaaaaaaagaaaactaggcatgaaatcagtttaacaccttaatcttaagccatgtcctcatctgcccaccctccccaacccacatacctccattccacttgtgacaccccctcgactccctggtgacgctcctcccagatcgctctacatgacattcaggacacacacacacacacacacacacacaccactcgcctccactgaatctacacacagattttactgtgacttctgaagctgtggataaattggaattttttatgttgtctctctctctgccaatttcaatacgaatcatcttccaatggaaaatcattaccttgaagagtgcattcggggttccttgtgttagggacttaagaatctgaggcgaggacccccaggcttacctgtaggactcaaagggagccaggaccccatctgaaagggtctcctctctcagttgggggacaggccggtggctgacccaggattgcaccagcatgtccatagagaagaggttttctatgtcttcaagcactatatcatagtccgtgttcaaagtgtaaactgtacagtaatcagccttgtgtatatgaaaaacaataaatactatgcaaaccaatagaaacatttagcagtacgtacagagcctgacagcgcagctcctgaggacttctgcggctgcaggagaaggagctgtggcctgtctttcagtgaaagaggaaggaaaggagtagggctagtgaatgtatctgccaggtcttagaagtcaggaccacccagggtctcccagagtgaacttggtgctctaagtccaggcagcctgcaggctggggaccctgggtgcaggtgccaggctcgaggctgttccctgtcctgcctcagtgcctcccctctgcccagcccctgtggcctcttggagaggcgagccagggggctccccggaccgcatggccggtgagagtagagtcggaggcggagagcctggacgcccagaggccggggccaggctctgggtcaaggcaggaaggagacagacagctggcagttcctcgcctcggtgccatcagggaggagccttaagttccactagagcctccggcccagggaggccagaatcagcacaatcccggccccgccctcgcggcgggcgcccccagggccaggagagagagacagggctggctcctctcgcccctggagccgcggtgtggacggcccggccccgtccgccccgccgctctgcgggagtgtcctcgggacacacttaaaccttccaagtagcacagaagccccctccacgtcagaggccccctggccgcggggcctgtgagcggagaggggccctgcttcccacacaaatccgccccggtgcacccccggccaggcaggccccggggcggcctaggcgccttgtcggccgggggtggggctgcttttgcttcctttagaggggcgggcagggagaggaagctctagctccgggcctgagtttccccgaggctgcgtcggaggagctgcagggcgagcccggacggctgccgtctccgccagaggccaccccggcccggcctccagggcgcagaggcgcccccctccatcctcccccatcccgggggccacggcaggggggccgcacagcgcggctgggaccgattcggtgacggcccaaggaagctgggcgcagggctcgcctctcccgcctcgatcctgcaccttcctctcccaggtcgctgctgcagccaacccagtagcccccttagcgcccccgcggaccccgcagctccagactccgctttggcacctctgctccggctggcatggctgcacgctccggctgctagtaggagccgttaggggaggagtttggggtctccacacgatgcctagagaatgctgcagtctgcacattagacgctttttagaagttttgaaattaccttgatttttttaattgttatgaaaatggatcttttcttgactctcccacatgctctgttatgggagagaatcccctaccctactctgatgtatagaccattctcccttcaccagccgaaccaatgtcaaaattaataaagaaatggactaatggcacagggctcta

SEQ ID NO: 41 - DNA, 5161 bp, Homo sapiens
agcacacatgatcttaactgggtctcttctcctgaatccctggggaaagagaaagacgcctacagcacttttttccactgcccctctgtggtcagcctttggtgaggggaactggaagggccttctagatcacacatccaactccctcaattataaatgagggcactgtggaccagaggagccaagggctttctccagggtcacacagtggaccaatgtcagggaccaggagggtccagatccctcagttcccaagccctacatcctcacgtccagcatgcacgtgcaaggccagcatgcccagcctggaactggagacgccgatcagagggcctggcaggctgctgccggtgcccatctcacaggccccgagggctgataaggatgcccttgaaggtgattgatggtttgcaaagcacccacttattagtatttccactggacctctgaaaacagtgatggagatagagagattgcatgtaacttgggacttgggaggtggcctgaaatgactgtgacccagctgatttctctgaggacttaggaggaaatatctgaagttggactcttcttgactgggccaaaaccagatgcttccccggcttctttgcacatacttttccccgtgctttcttgttgaaataagcagcattgtggagtgagaggcatttggaatgtgactcctccgtttacttactcctccacctaggcagaatactttgcttctgtttcctttgtgtaaaatgggaagacgatagaacctccttggttaggactgtggtgaggtgtcagtgaattaatgcgaaatccacatagaaccatgcactatcacaagcgtttgccattatcattcatagtgttagcattcataagcggcatgattgtcccagcagccttgagaaagggtggggagagcactttaatccgtgcttcacagatgaggaaactgaggcacagagaaggtccccagccttcccaagaccccacagtaggtgagttgcagggttagtctgctgtgtcccagatctgtgttctttctgccatgctgcattgccactcagagaggaacaacctgatctagaaagtgaaattttttccagccgcagctgctgcggctacatttgtgaatcagctctgtaaatacaagtttaatacgcgttgttcctgctcagtgggcgttgatagcccagccctggaagagcctttaagaacaggccttaaatagacacaccagctccatgcttcagttttgggaggctgtaccccataaaggaagggtgcaagggcctgtgggctgacaggaattacagaccggcttccaggtggccccaccacctgtgctgggcccctgctgggctcacttgactgtccctgagcccatcactcacccttttggagcaatttttgaaacagaccgctaagtacccaggttattagctggtctcatccctaccatgccggggaacagcatttggatcaccgcagtagcagcccaaggagacacacaagtagctgctttctcggactgtattattttctgaaagtaagaaactttccctgggcagaactctttctagttcccatggggatgggcaggataggcgagaggccgagcccccacttccaggtctctgggcagggcggggttaggcagcagcgggtgtcactcacacagtgactttcacttgtgctttcagtgctcaggacatgggcacctgccggcttccttctagcccggttggacagctccggcagctggtttggggaggtaaaattataggagcgtgatgtcacccgggccactcagggcagagcctggctgctgggcagaagggcacttgggccgggctgcttcagccgagagggccattcggtgtcctgcccacagagagagaaacagtgagagaccaagagagcaaaccagagagatagggagggggaatgcaaggggtccctgggggactcaggagtcccagtggagaatgagaggcaggccccccgtggtggccggggccctggctgccagaggaccgggctggtgaggaggcgaggatgtggactttcgtcacccagctgttggtcacgctggtgctgctgagcttcttcctggtcagctgtcagaacgtgatgcacattgtcagggggtccctgtgctttgtgctaaagcacatccaccaggagctggacaaggagctgggggagagcgagggcctcagtgacgacgaggagaccatctccaccagggtggtccggcggcgggtcttcctgaaggggaatgagtttcagaatattccaggggagcaggtgacagaggagcaattcacggatgagcagggcaacattgtcaccaagaagatcattcgcaaggtggttcgacagatagacttgtccagcgccgatgccgcccaggagcacgaggaggtgactgtagaggggcccctggaggatcccagtgagctggaggtcgatattgattactttatgaaacactccaaggtggagctgagagggagtggcctacagccggacctgatagagggcaggaagggggcgcagatagtgaagcgggccagcctgaaaagggggaaacagtgaccccgagccgctctccttggagtagcctctcgggaggatcacacctcgacacccaacccctgaaccccacacactctgccatgcacacaggaggagagctggacctgagggccaccgcagcggtgcacacattcctctgggctgacggcatgacctctgtaagggactcctgctagtcccctcttggcatgaatgactgactgtagacgcatgacctccaggcttcaatcctgcctcttgcaatgacagctgatctgtcggaaccaggacacaaaagcagcaagaagcggggagagagagggatagaaaacaagcgcaggagagcctgcgaacgcaaaagtgaatgagggctttttgtggctggggatgggttttggttttggggttttttttttaaattgttttgacttcgtacagggtactttttcccaacctcatctgtcagaaatccatgtgggcttcctggaaagaaaaaaaaaaaaaaagaaaactaggcatgaaatcagtttaacaccttaatcttaagccatgtcctcatctgcccaccctccccaacccacatacctccattccacttgtgacaccccctcgactccctggtgacgctcctcccagatcgctctacatgacattcaggacacacacacacacacacacacacacaccactcgcctccactgaatctacacacagattttactgtgacttctgaagctgtggataaattggaattttttatgttgtctctctctctgccaatttcaatacgaatcatcttccaatggaaaatcattaccttgaagagtgcattcggggttccttgtgttagggacttaagaatctgaggcgaggacccccaggcttacctgtaggactcaaagggagccaggaccccatctgaaagggtctcctctctcagttgggggacaggccggtggctgacccaggattgcaccagcatgtccatagagaagaggttttctatgtcttcaagcactatatcatagtccgtgttcaaagtgtaaactgtacagtaatcagccttgtgtatatgaaaaacaataaatactatgcaaaccaatagaaacatttagcagtacgtacagagcctgacagcgcagctcctgaggacttctgcggctgcaggagaaggagctgtggcctgtctttcagtgaaagaggaaggaaaggagtagggctagtgaatgtatctgccaggtcttagaagtcaggaccacccagggtctcccagagtgaacttggtgctctaagtccaggcagcctgcaggctggggaccctgggtgcaggtgccaggctcgaggctgttccctgtcctgcctcagtgcctcccctctgcccagcccctgtggcctcttggagaggcgagccagggggctccccggaccgcatggccggtgagagtagagtcggaggcggagagcctggacgcccagaggccggggccaggctctgggtcaaggcaggaaggagacagacagctggcagttcctcgcctcggtgccatcagggaggagccttaagttccactagagcctccggcccagggaggccagaatcagcacaatcccggccccgccctcgcggcgggcgcccccagggccaggagagagagacagggctggctcctctcgcccctggagccgcggtgtggacggcccggccccgtccgccccgccgctctgcgggagtgtcctcgggacacacttaaaccttccaagtagcacagaagccccctccacgtcagaggccccctggccgcggggcctgtgagcggagaggggccctgcttcccacacaaatccgccccggtgcacccccggccaggcaggccccggggcggcctaggcgccttgtcggccgggggtggggctgcttttgcttcctttagaggggcgggcagggagaggaagctctagctccgggcctgagtttccccgaggctgcgtcggaggagctgcagggcgagcccggacggctgccgtctccgccagaggccaccccggcccggcctccagggcgcagaggcgcccccctccatcctcccccatcccgggggccacggcaggggggccgcacagcgcggctgggaccgattcggtgacggcccaaggaagctgggcgcagggctcgcctctcccgcctcgatcctgcaccttcctctcccaggtcgctgctgcagccaacccagtagcccccttagcgcccccgcggaccccgcagctccagactccgctttggcacctctgctccggctggcatggctgcacgctccggctgctagtaggagccgttaggggaggagtttggggtctccacacgatgcctagagaatgctgcagtctgcacattagacgctttttagaagttttgaaattaccttgatttttttaattgttatgaaaatggatcttttcttgactctcccacatgctctgttatgggagagaatcccctaccctactctgatgtatagaccattctcccttcaccagccgaaccaatgtcaaaattaataaagaaatggactaatggcacagggctcta

SEQ ID NO: 42 - DNA, 4993 bp, Homo sapiens
agcacacatgatcttaactgggtctcttctcctgaatccctggggaaagagaaagacgcctacagcacttttttccactgcccctctgtggtcagcctttggtgaggggaactggaagggccttctagatcacacatccaactccctcaattataaatgagggcactgtggaccagaggagccaagggctttctccagggtcacacagtggaccaatgtcagggaccaggagggtccagatccctcagttcccaagccctacatcctcacgtccagcatgcacgtgcaaggccagcatgcccagcctggaactggagacgccgatcagagggcctggcaggctgctgccggtgcccatctcacaggccccgagggctgataaggatgcccttgaaggtgattgatggtttgcaaagcacccacttattagtatttccactggacctctgaaaacagtgatggagatagagagattgcatgtaacttgggacttgggaggtggcctgaaatgactgtgacccagctgatttctctgaggacttaggaggaaatatctgaagttggactcttcttgactgggccaaaaccagatgcttccccggcttctttgcacatacttttccccgtgctttcttgttgaaataagcagcattgtggagtgagaggcatttggaatgtgactcctccgtttacttactcctccacctaggcagaatactttgcttctgtttcctttgtgtaaaatgggaagacgatagaacctccttggttaggactgtggtgaggtgtcagtgaattaatgcgaaatccacatagaaccatgcactatcacaagcgtttgccattatcattcatagtgttagcattcataagcggcatgattgtcccagcagccttgagaaagggtggggagagcactttaatccgtgcttcacagatgaggaaactgaggcacagagaaggtccccagccttcccaagaccccacagtaggtgagttgcagggttagtctgctgtgtcccagatctgtgttctttctgccatgctgcattgccactcagagaggaacaacctgatctagaaagtgaaattttttccagccgcagctgctgcggctacatttgtgaatcagctctgtaaatacaagtttaatacgcgttgttcctgctcagtgggcgttgatagcccagccctggaagagcctttaagaacaggccttaaatagacacaccagctccatgcttcagttttgggaggctgtaccccataaaggaagggtgcaagggcctgtgggctgacaggaattacagaccggcttccaggtggccccaccacctgtgctgggcccctgctgggctcacttgactgtccctgagcccatcactcacccttttggagcaatttttgaaacagaccgctaagtacccaggttattagctggtctcatccctaccatgccggggaacagcatttggatcaccgcagtagcagcccaaggagacacacaagtagctgctttctcggactgtattattttctgaaagtaagaaactttccctgggcagaactctttctagttcccatggggatgggcaggataggcgagaggccgagcccccacttccaggtctctgggcagggcggggttaggcagcagcgggtgtcactcacacagtgactttcacttgtgctttcagtgctcaggacatgggcacctgccggcttccttctagcccggttggacagctccggcagctggtttggggaggtaaaattataggagcgtgatgtcacccgggccactcagggcagagcctggctgctgggcagaagggcacttgggccgggctgcttcagccgagagggccattcggtgtcctgcccacagagagagaaacagtgagagaccaagagagcaaaccagagagatagggagggggaatgcaaggggtccctgggggactcaggagtcccagtggagaatgagaggcaggccccccgtggtggccggggccctggctgccagaggaccgggctggtgaggaggcgaggatgtggactttcgtcacccagctgttggtcacgctggtgctgctgagcttcttcctggtcagctgtcagaacgtgatgcacattgtcagggggtccctgtgctttgtgctaaagcacatccaccaggagctggacaaggagctgggggagagcgagggcctcagtgacgacgaggagaccatctccaccagggtggtccggcggcgggtcttcctgaaggggaatgagtttcagaatattccaggggagcaggtgacagaggagcaattcacggatgagcagggcaacattgtcaccaagaagatcattcgcaaggtggttcgacagatagacttgtccagcgccgatgccgcccaggagcacgaggaggtgactgtagaggggcccctggaggatcccagtgagctggaggatcacacctcgacacccaacccctgaaccccacacactctgccatgcacacaggaggagagctggacctgagggccaccgcagcggtgcacacattcctctgggctgacggcatgacctctgtaagggactcctgctagtcccctcttggcatgaatgactgactgtagacgcatgacctccaggcttcaatcctgcctcttgcaatgacagctgatctgtcggaaccaggacacaaaagcagcaagaagcggggagagagagggatagaaaacaagcgcaggagagcctgcgaacgcaaaagtgaatgagggctttttgtggctggggatgggttttggttttggggttttttttttaaattgttttgacttcgtacagggtactttttcccaacctcatctgtcagaaatccatgtgggcttcctggaaagaaaaaaaaaaaaaaagaaaactaggcatgaaatcagtttaacaccttaatcttaagccatgtcctcatctgcccaccctccccaacccacatacctccattccacttgtgacaccccctcgactccctggtgacgctcctcccagatcgctctacatgacattcaggacacacacacacacacacacacacacaccactcgcctccactgaatctacacacagattttactgtgacttctgaagctgtggataaattggaattttttatgttgtctctctctctgccaatttcaatacgaatcatcttccaatggaaaatcattaccttgaagagtgcattcggggttccttgtgttagggacttaagaatctgaggcgaggacccccaggcttacctgtaggactcaaagggagccaggaccccatctgaaagggtctcctctctcagttgggggacaggccggtggctgacccaggattgcaccagcatgtccatagagaagaggttttctatgtcttcaagcactatatcatagtccgtgttcaaagtgtaaactgtacagtaatcagccttgtgtatatgaaaaacaataaatactatgcaaaccaatagaaacatttagcagtacgtacagagcctgacagcgcagctcctgaggacttctgcggctgcaggagaaggagctgtggcctgtctttcagtgaaagaggaaggaaaggagtagggctagtgaatgtatctgccaggtcttagaagtcaggaccacccagggtctcccagagtgaacttggtgctctaagtccaggcagcctgcaggctggggaccctgggtgcaggtgccaggctcgaggctgttccctgtcctgcctcagtgcctcccctctgcccagcccctgtggcctcttggagaggcgagccagggggctccccggaccgcatggccggtgagagtagagtcggaggcggagagcctggacgcccagaggccggggccaggctctgggtcaaggcaggaaggagacagacagctggcagttcctcgcctcggtgccatcagggaggagccttaagttccactagagcctccggcccagggaggccagaatcagcacaatcccggccccgccctcgcggcgggcgcccccagggccaggagagagagacagggctggctcctctcgcccctggagccgcggtgtggacggcccggccccgtccgccccgccgctctgcgggagtgtcctcgggacacacttaaaccttccaagtagcacagaagccccctccacgtcagaggccccctggccgcggggcctgtgagcggagaggggccctgcttcccacacaaatccgccccggtgcacccccggccaggcaggccccggggcggcctaggcgccttgtcggccgggggtggggctgcttttgcttcctttagaggggcgggcagggagaggaagctctagctccgggcctgagtttccccgaggctgcgtcggaggagctgcagggcgagcccggacggctgccgtctccgccagaggccaccccggcccggcctccagggcgcagaggcgcccccctccatcctcccccatcccgggggccacggcaggggggccgcacagcgcggctgggaccgattcggtgacggcccaaggaagctgggcgcagggctcgcctctcccgcctcgatcctgcaccttcctctcccaggtcgctgctgcagccaacccagtagcccccttagcgcccccgcggaccccgcagctccagactccgctttggcacctctgctccggctggcatggctgcacgctccggctgctagtaggagccgttaggggaggagtttggggtctccacacgatgcctagagaatgctgcagtctgcacattagacgctttttagaagttttgaaattaccttgatttttttaattgttatgaaaatggatcttttcttgactctcccacatgctctgttatgggagagaatcccctaccctactctgatgtatagaccattctcccttcaccagccgaaccaatgtcaaaattaataaagaaatggactaatggcacagggctcta

SEQ ID NO: 43 - DNA, 2490 bp, Homo sapiens
agcacacatgatcttaactgggtctcttctcctgaatccctggggaaagagaaagacgcctacagcacttttttccactgcccctctgtggtcagcctttggtgaggggaactggaagggccttctagatcacacatccaactccctcaattataaatgagggcactgtggaccagaggagccaagggctttctccagggtcacacagtggaccaatgtcagggaccaggagggtccagatccctcagttcccaagccctacatcctcacgtccagcatgcacgtgcaaggccagcatgcccagcctggaactggagacgccgatcagagggcctggcaggctgctgccggtgcccatctcacaggccccgagggctgataaggatgcccttgaaggtgattgatggtttgcaaagcacccacttattagtatttccactggacctctgaaaacagtgatggagatagagagattgcatgtaacttgggacttgggaggtggcctgaaatgactgtgacccagctgatttctctgaggacttaggaggaaatatctgaagttggactcttcttgactgggccaaaaccagatgcttccccggcttctttgcacatacttttccccgtgctttcttgttgaaataagcagcattgtggagtgagaggcatttggaatgtgactcctccgtttacttactcctccacctaggcagaatactttgcttctgtttcctttgtgtaaaatgggaagacgatagaacctccttggttaggactgtggtgaggtgtcagtgaattaatgcgaaatccacatagaaccatgcactatcacaagcgtttgccattatcattcatagtgttagcattcataagcggcatgattgtcccagcagccttgagaaagggtggggagagcactttaatccgtgcttcacagatgaggaaactgaggcacagagaaggtccccagccttcccaagaccccacagtaggtgagttgcagggttagtctgctgtgtcccagatctgtgttctttctgccatgctgcattgccactcagagaggaacaacctgatctagaaagtgaaattttttccagccgcagctgctgcggctacatttgtgaatcagctctgtaaatacaagtttaatacgcgttgttcctgctcagtgggcgttgatagcccagccctggaagagcctttaagaacaggccttaaatagacacaccagctccatgcttcagttttgggaggctgtaccccataaaggaagggtgcaagggcctgtgggctgacaggaattacagaccggcttccaggtggccccaccacctgtgctgggcccctgctgggctcacttgactgtccctgagcccatcactcacccttttggagcaatttttgaaacagaccgctaagtacccaggttattagctggtctcatccctaccatgccggggaacagcatttggatcaccgcagtagcagcccaaggagacacacaagtagctgctttctcggactgtattattttctgaaagtaagaaactttccctgggcagaactctttctagttcccatggggatgggcaggataggcgagaggccgagcccccacttccaggtctctgggcagggcggggttaggcagcagcgggtgtcactcacacagtgactttcacttgtgctttcagtgctcaggacatgggcacctgccggcttccttctagcccggttggacagctccggcagctggtttggggaggtaaaattataggagcgtgatgtcacccgggccactcagggcagagcctggctgctgggcagaagggcacttgggccgggctgcttcagccgagagggccattcggtgtcctgcccacagagagagaaacagtgagagaccaagagagcaaaccagagagatagggagggggaatgcaaggggtccctgggggactcaggagtcccagtggagaatgagaggcaggccccccgtggtggccggggccctggctgccagaggaccgggctggtgaggaggcgaggatgtggactttcgtcacccagctgttggtcacgctggtgctgctgagcttcttcctggtcagctgtcagaacgtgatgcacattgtcagggggtccctgtgctttgtgctaaagcacatccaccaggagctggacaaggagctgggggagagcgagggcctcagtgacgacgaggagaccatctccaccagggtggtccggcggcgggtcttcctgaaggggaatgagtttcagaatattccaggggagcaggtgacagaggagcaattcacggatgagcagggcaacattgtcaccaagaaggtgggtgcagagtgttcccctctgtgctggggagaggcaggtgggctagaagctaaaaggtggtagaagccagtggcttctccctgctgccctcacagcaggtgagcacagccaggctggctgcccccgtgctca

SEQ ID NO: 44 - DNA, 3332 bp, Homo sapiens
gagctggagagagcgagagcaaagagcgagcgagggagaggagagagagagagaggagagagaaagacacacgcacgcagagacacacggtcactggaattccattagaaaaaagtgagccgagcaagggttagcgggagaagatttttttgaatcttgtcttcgtcttggtgcgaaagaagcgactccagtctctcgtcctcgaagctccgactggattgttcttgggcgctgacacccgtctgtggatttcttttctatttgcattttattccgaccccctccctcgccgcttccttccagcccttcactcgcaaatcgcctctctccccacctccccaggcccctcctgggaagcgcaggggaattggacccgcggggactcacgccttcccggacgattggaggggagggctgaccccaggactgggctgttggcttagaaagccgatacacagatacgcgtatatttgattgtagcgggcaaggggggcgtcgagaggcagcagcccatcgcccgcctctcaccccaccccctccagccagaggcgagaatcgcaggactcgggatcttcatcgggtggactagctgggatctccgcattggatttggggctgattaccactgcttgcctattattattgttgttgttactactattatttttttttacccaagggagaaagacaaaaaaacggtgggatttatttaacatgatcttggcaaacgtcttctgcctcttcttctttctagggccccgagctccacggctggcgccccccagtggactgtgtccgggccaatgagctgtgtgccgccgaatccaactgcagctctcgctaccgcactctgcggcagtgcctggcaggccgcgaccgcaacaccatgctggccaacaaggagtgccaggcggccttggaggtcttgcaggagagcccgctgtacgactgccgctgcaagcggggcatgaagaaggagctgcagtgtctgcagatctactggagcatccacctggggctgaccgagggtgaggagttctacgaagcctccccctatgagccggtgacctcccgcctctcggacatcttcaggcttgcttcaatcttctcagggacaggggcagacccggtggtcagcgccaagagcaaccattgcctggatgctgccaaggcctgcaacctgaatgacaactgcaagaagctgcgctcctcctacatctccatctgcaaccgcgagatctcgcccaccgagcgctgcaaccgccgcaagtgccacaaggccctgcgccagttcttcgaccgggtgcccagcgagtacacctaccgcatgctcttctgctcctgccaagaccaggcgtgcgctgagcgccgccggcaaaccatcctgcccagctgctcctatgaggacaaggagaagcccaactgcctggacctgcgtggcgtgtgccggactgaccacctgtgtcggtcccggctggccgacttccatgccaattgtcgagcctcctaccagacggtcaccagctgccctgcggacaattaccaggcgtgtctgggctcttatgctggcatgattgggtttgacatgacacctaactatgtggactccagccccactggcatcgtggtgtccccctggtgcagctgtcgtggcagcgggaacatggaggaggagtgtgagaagttcctcagggacttcaccgagaacccatgcctccggaacgccatccaggcctttggcaacggcacggacgtgaacgtgtccccaaaaggcccctcgttccaggccacccaggcccctcgggtggagaagacgccttctttgccagatgacctcagtgacagtaccagcttggggaccagtgtcatcaccacctgcacgtctgtccaggagcaggggctgaaggccaacaactccaaagagttaagcatgtgcttcacagagctcacgacaaatatcatcccagggagtaacaaggtgatcaaacctaactcaggccccagcagagccagaccgtcggctgccttgaccgtgctgtctgtcctgatgctgaaacaggccttgtaggctgtgggaaccgagtcagaagatttttgaaagctacgcagacaagaacagccgcctgacgaaatggaaacacacacagacacacacacaccttgcaaaaaaaaaattgtttttcccaccttgtcgctgaacctgtctcctcccaggtttcttctctggagaagtttttgtaaaccaaacagacaagcaggcaggcagcctgagagctggcccaggggtcccctggcaggggaaactctggtgccggggagggcacgaggctctagaaatgcccttcactttctcctggtgtttttctctctggacccttctgaagcagagaccggacaagagcctgcagcggaagggactctgggctgtgcctgaggctggctgggggcaggacaacacagctgcttccccaggctgcccactctggggacccgctgggggctggcagagggcatcggtcagcggggcagcggggctggccatgagggtccaccttcagccctttggcttcaaggatggagatggttttgccctccctctctgccctcgggtggggctggtgggtctgcagctggtgtgggaacttccccacggatggcggtggagggggttcgcaccgtgctgggctccccctgactgtagcacggagtgttggggctgggggccagctccaggagggcttgagagctcagcctgcctgggagagcccttgtggcgaggcattaaaacttgggcaccagcttctttctcggtggcagaaattttgaagtcagagagaaacggtcctttgttggcttctttgctttctcgtgggtcctttggcaggcctccctttggggagagggaggggagagaccacagccgggtgtgtgtctgcagcaccgtgggccctcaagctttcctgctgtcttctccctcctcctcctttcccctttctctttcctcatttcctagacgtacgtcaactgtatgtacataccggggctcctctcctaacatatatgtatatacacatccatatacatatattgtgtggtttcccctttctttcctttttttaagcaacaaaactatggaaataataccccaacagatgagcgaaaatgtattattgtaaagtttattttttttaatactgttgtctataatggggaaaaaggacattggccccgcagtgccctgccccagtcagcctggctgggctctggtgggggctcctgatccgcatccaagcttaaccaaggctccaataaacgtgctaggaagcaagctg

SEQ ID NO: 45 - DNA, 3615 bp, Homo sapiens
acacagtactctcagcttgttggtggaagcccctcatctgccttcattctgaaggcagggcccggcagaggaaggatcagagggtcgcggccggagggtcccggccggtggggccaactcagagggagaggaaagggctagagacacgaagaacgcaaaccatcaaatttagaagaaaaagccctttgactttttccccctctccctccccaatggctgtgtagcaaacatccctggcgataccttggaaaggacgaagttggtctgcagtcgcaatttcgtgggttgagttcacagttgtgagtgcggggctcggagatggagccgtggtcctctaggtggaaaacgaaacggtggctctgggatttcaccgtaacaaccctcgcattgaccttcctcttccaagctagagaggtcagaggagctgctccagttgatgtactaaaagcactagattttcacaattctccagagggaatatcaaaaacaacgggattttgcacaaacagaaagaattctaaaggctcagatactgcttacagagtttcaaagcaagcacaactcagtgccccaacaaaacagttatttccaggtggaactttcccagaagacttttcaatactatttacagtaaaaccaaaaaaaggaattcagtctttccttttatctatatataatgagcatggtattcagcaaattggtgttgaggttgggagatcacctgtttttctgtttgaagaccacactggaaaacctgccccagaagactatcccctcttcagaactgttaacatcgctgacgggaagtggcatcgggtagcaatcagcgtggagaagaaaactgtgacaatgattgttgattgtaagaagaaaaccacgaaaccacttgatagaagtgagagagcaattgttgataccaatggaatcacggtttttggaacaaggattttggatgaagaagtttttgagggggacattcagcagtttttgatcacaggtgatcccaaggcagcatatgactactgtgagcattatagtccagactgtgactcttcagcacccaaggctgctcaagctcaggaacctcagatagatgagtatgcaccagaggatataatcgaatatgactatgagtatggggaagcagagtataaagaggctgaaagtgtaacagagggacccactgtaactgaggagacaatagcacagacggaggcaaacatcgttgatgattttcaagaatacaactatggaacaatggaaagttaccagacagaagctcctaggcatgtttctgggacaaatgagccaaatccagttgaagaaatatttactgaagaatatctaacgggagaggattatgattcccagaggaaaaattctgaggatacactatatgaaaacaaagaaatagacggcagggattctgatcttctggtagatggagatttaggcgaatatgatttttatgaatataaagaatatgaagataaaccaacaagcccccctaatgaagaatttggtccaggtgtaccagcagaaactgatattacagaaacaagcataaatggccatggtgcatatggagagaaaggacagaaaggagaaccagcagtggttgagcctggtatgcttgtcgaaggaccaccaggaccagcaggacctgcaggtattatgggtcctccaggtctacaaggccccactggaccccctggtgaccctggcgataggggccccccaggacgtcctggcttaccaggggctgatggtctacctggtcctcctggtactatgttgatgttaccgttccgttatggtggtgatggttccaaaggaccaaccatctctgctcaggaagctcaggctcaagctattcttcagcaggctcggattgctctgagaggcccacctggcccaatgggtctaactggaagaccaggtcctgtgggggggcctggttcatctggggccaaaggtgagagtggtgatccaggtcctcagggccctcgaggcgtccagggtccccctggtccaacgggaaaacctggaaaaaggggtcgtccaggtgcagatggaggaagaggaatgccaggagaacctggggcaaagggagatcgagggtttgatggacttccgggtctgccaggtgacaaaggtcacaggggtgaacgaggtcctcaaggtcctccaggtcctcctggtgatgatggaatgaggggagaagatggagaaattggaccaagaggtcttccaggtgaagctggcccacgaggtttgctgggtccaaggggaactccaggagctccagggcagcctggtatggcaggtgtagatggccccccaggaccaaaagggaacatgggtccccaaggggagcctgggcctccaggtcaacaagggaatccaggacctcagggtcttcctggtccacaaggtccaattggtcctcctggtgaaaaaggaccacaaggaaaaccaggacttgctggacttcctggtgctgatgggcctcctggtcatcctgggaaagaaggccagtctggagaaaagggggctctgggtccccctggtccacaaggtcctattggatacccgggcccccggggagtaaagggagcagatggtgtcagaggtctcaagggatctaaaggtgaaaagggtgaagatggttttccaggattcaaaggtgacatgggtctaaaaggtgacagaggagaagttggtcaaattggcccaagaggggaagatggccctgaaggacccaaaggtcgagcaggcccaactggagacccaggtccttcaggtcaagcaggagaaaagggaaaacttggagttccaggattaccaggatatccaggaagacaaggtccaaagggttccactggattccctgggtttccaggtgccaatggagagaaaggtgcacggggagtagctggcaaaccaggccctcggggtcagcgtggtccaacgggtcctcgaggttcaagaggtgcaagaggtcccactgggaaacctgggccaaagggcacttcaggtggcgatggccctcctggccctccaggtgaaagaggtcctcaaggacctcagggtccagttggattccctggaccaaaaggccctcctggaccacctgggaaggatgggctgccaggacaccctgggcaacgtggggagactggatttcaaggcaagaccggccctcctgggccagggggagtggttggaccacagggaccaaccggtgagactggtccaataggggaacgtgggcatcctggccctcctggccctcctggtgagcaaggtcttcctggtgctgcaggaaaagaaggtgcaaagggtgatccaggtcctcaaggtatctcagggaaagatggaccagcaggattacgtggtttcccaggggaaagaggtcttcctggagctcagggtgcacctggactgaaaggaggggaaggtccccagggcccaccaggtccagttgtaagtatgatgataataaatagccagacaatcatggttgtgaattacagctcttctttcattactctcatgctgtgattccacagtgtgtgggagagaaaataaacacatgtcaatcaaatcagtcaa

SEQ ID NO: 46 - DNA, 2648 bp, Homo sapiens
acacagtactctcagcttgttggtggaagcccctcatctgccttcattctgaaggcagggcccggcagaggaaggatcagagggtcgcggccggagggtcccggccggtggggccaactcagagggagaggaaagggctagagacacgaagaacgcaaaccatcaaatttagaagaaaaagccctttgactttttccccctctccctccccaatggctgtgtagcaaacatccctggcgataccttggaaaggacgaagttggtctgcagtcgcaatttcgtgggttgagttcacagttgtgagtgcggggctcggagatggagccgtggtcctctaggtggaaaacgaaacggtggctctgggatttcaccgtaacaaccctcgcattgaccttcctcttccaagctagagaggtcagaggagctgctccagttgatgtactaaaagcactagattttcacaattctccagagggaatatcaaaaacaacgggattttgcacaaacagaaagaattctaaaggctcagatactgcttacagagtttcaaagcaagcacaactcagtgccccaacaaaacagttatttccaggtggaactttcccagaagacttttcaatactatttacagtaaaaccaaaaaaaggaattcagtctttccttttatctatatataatgagcatggtattcagcaaattggtgttgaggttgggagatcacctgtttttctgtttgaagaccacactggaaaacctgccccagaagactatcccctcttcagaactgttaacatcgctgacgggaagtggcatcgggtagcaatcagcgtggagaagaaaactgtgacaatgattgttgattgtaagaagaaaaccacgaaaccacttgatagaagtgagagagcaattgttgataccaatggaatcacggtttttggaacaaggattttggatgaagaagtttttgagggggacattcagcagtttttgatcacaggtgatcccaaggcagcatatgactactgtgagcattatagtccagactgtgactcttcagcacccaaggctgctcaagctcaggaacctcagatagatgagtatgcaccagaggatataatcgaatatgactatgagtatggggaagcagagtataaagaggctgaaagtgtaacagagggacccactgtaactgaggagacaatagcacagacggaggcaaacatcgttgatgattttcaagaatacaactatggaacaatggaaagttaccagacagaagctcctaggcatgtttctgggacaaatgagccaaatccagttgaagaaatatttactgaagaatatctaacgggagaggattatgattcccagaggaaaaattctgaggatacactatatgaaaacaaagaaatagacggcagggattctgatcttctggtagatggagatttaggcgaatatgatttttatgaatataaagaatatgaagataaaccaacaagcccccctaatgaagaatttggtccaggtgtaccagcagaaactgatattacagaaacaagcataaatggccatggtgcatatggagagaaaggacagaaaggagaaccagcagtggttgagcctggtatgcttgtcgaaggaccaccaggaccagcaggacctgcaggtattatgggtcctccaggtctacaaggccccactggaccccctggtgaccctggcgataggggccccccaggacgtcctggcttaccaggggctgatggtctacctggtcctcctggtactatgttgatgttaccgttccgttatggtggtgatggttccaaaggaccaaccatctctgctcaggaagctcaggctcaagctattcttcagcaggctcggattgctctgagaggcccacctggcccaatgggtctaactggaagaccaggtcctgtgggggggcctggttcatctggggccaaaggtgagagtggtgatccaggtcctcagggccctcgaggcgtccagggtccccctggtccaacgggaaaacctggaaaaaggggtcgtccaggtgcagatggaggaagaggaatgccaggagaacctggggcaaagggagatcgagggtttgatggacttccgggtctgccaggtgacaaaggtcacaggggtgaacgaggtcctcaaggtcctccaggtcctcctggtgatgatggaatgaggggagaagatggagaaattggaccaagaggtcttccaggtgaagctggcccacgaggtttgctgggtccaaggggaactccaggagctccagggcagcctggtatggcaggtgtagatggccccccaggaccaaaagggaacatgggtccccaaggggagcctgggcctccaggtcaacaagggaatccaggacctcagggtcttcctggtccacaaggtccaattggtcctcctggtgaaaaaatgtgctgcaatctaagtttcggaatacttataccactccagaaataatcctcgtgttaatattcagtccatgtttccaccccctcagacctagctaacaattaatttgctttctgtctctgtagatttgagttttctgaatatttcatgtgaatgaaacttatgaataaatttatgatttaatcata

SEQ ID NO: 47 - DNA, 3475 bp, Homo sapiens
acacagtactctcagcttgttggtggaagcccctcatctgccttcattctgaaggcagggcccggcagaggaaggatcagagggtcgcggccggagggtcccggccggtggggccaactcagagggagaggaaagggctagagacacgaagaacgcaaaccatcaaatttagaagaaaaagccctttgactttttccccctctccctccccaatggctgtgtagcaaacatccctggcgataccttggaaaggacgaagttggtctgcagtcgcaatttcgtgggttgagttcacagttgtgagtgcggggctcggagatggagccgtggtcctctaggtggaaaacgaaacggtggctctgggatttcaccgtaacaaccctcgcattgaccttcctcttccaagctagagaggtcagaggagctgctccagttgatgtactaaaagcactagattttcacaattctccagagggaatatcaaaaacaacgggattttgcacaaacagaaagaattctaaaggctcagatactgcttacagagtttcaaagcaagcacaactcagtgccccaacaaaacagttatttccaggtggaactttcccagaagacttttcaatactatttacagtaaaaccaaaaaaaggaattcagtctttccttttatctatatataatgagcatggtattcagcaaattggtgttgaggttgggagatcacctgtttttctgtttgaagaccacactggaaaacctgccccagaagactatcccctcttcagaactgttaacatcgctgacgggaagtggcatcgggtagcaatcagcgtggagaagaaaactgtgacaatgattgttgattgtaagaagaaaaccacgaaaccacttgatagaagtgagagagcaattgttgataccaatggaatcacggtttttggaacaaggattttggatgaagaagtttttgagggggacattcagcagtttttgatcacaggtgatcccaaggcagcatatgactactgtgagcattatagtccagactgtgactcttcagcacccaaggctgctcaagctcaggaacctcagatagatgagtatgcaccagaggatataatcgaatatgactatgagtatggggaagcagagtataaagaggctgaaagtgtaacagagggacccactgtaactgaggagacaatagcacagacggaggcaaacatcgttgatgattttcaagaatacaactatggaacaatggaaagttaccagacagaagctcctaggcatgtttctgggacaaatgagccaaatccagttgaagaaatatttactgaagaatatctaacgggagaggattatgattcccagaggaaaaattctgaggatacactatatgaaaacaaagaaatagacggcagggattctgatcttctggtagatggagatttaggcgaatatgatttttatgaatataaagaatatgaagataaaccaacaagcccccctaatgaagaatttggtccaggtgtaccagcagaaactgatattacagaaacaagcataaatggccatggtgcatatggagagaaaggacagaaaggagaaccagcagtggttgagcctggtatgcttgtcgaaggaccaccaggaccagcaggacctgcaggtattatgggtcctccaggtctacaaggccccactggaccccctggtgaccctggcgataggggccccccaggacgtcctggcttaccaggggctgatggtctacctggtcctcctggtactatgttgatgttaccgttccgttatggtggtgatggttccaaaggaccaaccatctctgctcaggaagctcaggctcaagctattcttcagcaggctcggattgctctgagaggcccacctggcccaatgggtctaactggaagaccaggtcctgtgggggggcctggttcatctggggccaaaggtgagagtggtgatccaggtcctcagggccctcgaggcgtccagggtccccctggtccaacgggaaaacctggaaaaaggggtcgtccaggtgcagatggaggaagaggaatgccaggagaacctggggcaaagggagatcgagggtttgatggacttccgggtctgccaggtgacaaaggtcacaggggtgaacgaggtcctcaaggtcctccaggtcctcctggtgatgatggaatgaggggagaagatggagaaattggaccaagaggtcttccaggtgaagctggtatggcaggtgtagatggccccccaggaccaaaagggaacatgggtccccaaggggagcctgggcctccaggtcaacaagggaatccaggacctcagggtcttcctggtccacaaggtccaattggtcctcctggtgaaaaagtctccttttctttctcattattttacaaaaaagtaattaagtttgcttgtgacaaaagatttgtaggaagacatgatgaaaggaaagttgtgaagttgtcattgccattatatctcatatatgaatagcaaatgatgttcttgttaataactcaatgtctggatcaaaacaagaataaatctataattaaacacatgtctttttccctgatctccactgtgagattccttgagtaatattttgtcccctgtagtcatagcacatttctatctggctctttccaacaccttttttctttcattatttttgttgatttctacaaacatattaattaaaaaaaactaatagctttatcgaagtgtaatttaaatactataaatattcccttgttttaagtgtacaagtgaattatttttactaaatttacagatgtgctgcaatctaagtttcggaatacttataccactccagaaataatcctcgtgttaatattcagtccatgtttccaccccctcagacctagctaacaattaatttgctttctgtctctgtagatttgagttttctgaatatttcatgtgaatgaaacttatgaataaatttatgatttaatcatatgaatgtgtatgtgacctttatgtctgacttctttcattttaggttcatccatgctgtagcatacatatattagtactttgctccttattttgttctcatagtattccattgattgggtataccaggttctgtttacttttacttggcagttgatagaataggtgtagtttatactttttcgctattctccataccggtgctgtagtgaataattgcatacaagtctttgtatagatgtgttttcattctttttggtatatacttagaagcagaattcttgtgttatggtaaacttatattcaatattttgtgaattccactcttttccatatcgattgtaccattttcccttccaagtaaccatgtatgaggatagtcatttctgcacattctcactaatgcttgttattgtctgtcttcttgattacgatcattctcgttggtgtgaaa

SEQ ID NO: 48 - DNA, 1271 bp, Homo sapiens
acacagtactctcagcttgttggtggaagcccctcatctgccttcattctgaaggcagggcccggcagaggaaggatcagagggtcgcggccggagggtcccggccggtggggccaactcagagggagaggaaagggctagagacacgaagaacgcaaaccatcaaatttagaagaaaaagccctttgactttttccccctctccctccccaatggctgtgtagcaaacatccctggcgataccttggaaaggacgaagttggtctgcagtcgcaatttcgtgggttgagttcacagttgtgagtgcggggctcggagatggagccgtggtcctctaggtggaaaacgaaacggtggctctgggatttcaccgtaacaaccctcgcattgaccttcctcttccaagctagagaggtcagaggagctgctccagttgatgtactaaaagcactagattttcacaattctccagagggaatatcaaaaacaacgggattttgcacaaacagaaagaattctaaaggctcagatactgcttacagagtttcaaagcaagcacaactcagtgccccaacaaaacagttatttccaggtggaactttcccagaagacttttcaatactatttacagtaaaaccaaaaaaaggaattcagtctttccttttatctatatataatgagcatggtattcagcaaattggtgttgaggttgggagatcacctgtttttctgtttgaagaccacactggaaaacctgccccagaagactatcccctcttcagaactgttaacatcgctgacgggaagtggcatcgggtagcaatcagcgtggagaagaaaactgtgacaatgattgttgattgtaagaagaaaaccacgaaaccacttgatagaagtgagagagcaattgttgataccaatggaatcacggtttttggaacaaggattttggatgaagaagtttttgagggggacattcagcagtttttgatcacaggtgatcccaaggcagcatatgactactgtgagcattatagtccagactgtgactcttcagcacccaaggctgctcaagctcaggaacctcagatagatgaggtgaggagcacaagaccagagaaggtcttcgtatttcagtgatatggacatagcagtgcagtttttgaacttatacttatttattccattttaattaagctatgctttgtattttaattgtgttgtaatatttccaggaaaaagtgacttgaatatatttggtacttgttttc

SEQ ID NO: 49 - DNA, 2201 bp, Homo sapiens
tgagacaagatgtcactctgtcacccaggctggagtgcagtggcaggatcacggctcactgcagcctcgacctccctgggctcaggtgatcctcccacctcagcctaccgagtagctgggactacaggtgcatgtcaccatacccggttaatttttgtattttttttagagacaaggtctcaccatgttgcccaggctggtctcaaactcctgtgctcaggcaatgcgtcagcctcgacatctcaaagtgctgtgattacaggcgtgagccccgacacctggcctagttctattttctaaatgtgaattctgtaaagatatcttttaaaaataaagttctgtttttggtagaaaatgtaaaaatagataaatatggagggaagaaatcccccctggaatacagacgcttcctctcccttccagccttttccccatatgaacattgctgtgagtgagacttacatgcaatgtaatttctttttgagcttaacattacaacataaattctcaaactctgatgttcattaaacaccccagccccatcctgggaacttgggcttggggctcggggtgttctgataatgatcaaagtatgagaattgaacccatgaggactttgatccaagatactggggtgtggggaggggcaggcacaggtgtcctgggaacacactttgagaagcaatggcaaagctgggggtccagctaatgtgttacattagaatcacctcggggaggccctgggtgcccttctcagccctccctccggaggctgctgaagcccagcaaagccggagtcagagaacaatgtccgcctgagggcagggctgggctgggctggccttctggccctatctgctccgtgcccaacccagcgccccgcacagtcggagctttgtaaatacgaggtgactgtctgcctacaaactttgtaaacatcacttgaaatggccgcagggcattgcgacatggccataccactatttgtttgctattgaatttgtacttccctgccttacttttgctattgcaaaccatgctgtcactaaggtcttcatgcacacagttgtgtcttggtcagatgatatgtttctaccaattttaattgtgtttctttccacctggacacacagctctctggcccagggctgggtcatcagcacaccctgctgctgctgttcagatctgcatcctggtcccgcttggtcccacagtgagaacgctttgctatcacatgggcaggctctgagagccctgccggcctggccttctcaaagaagacctgagagcttgggacccaagcagagaggaagaacagggctcagggtgcttgctccatgctcgctccacacctggggctcaaccctggctttccccggctccctgtgtgacttcagggcaggtcccttgggccctctgggccttatcatcttcatctgtaacagggcgatgcctctgccgtgtctggtggtgttgaggagttcctgtttgtgtaagcagctagttcagtgccagcacgagatgggaggcccatgaagttagcagtgcacaaaaaatagagcaaagactggatgcatttcctgagaacaaccatcactgtaaagcactttacaaatccaaagacaacccccggcaaaaactcaaaatgaaactccctctcgcagagcacaattccaattcgctctaaaaacattacaagttagttcatgtcatgccagatagctgaaggcagctcacaagttcttaaggccaggaatgccatgtgtctgctatgcacagctggccctggccctgagcctgaatgacagcacaaaggtgacgcagatgtgggtgccctgctcctgcccagcagcagtgcttggtggaggctgaggccctgcacaggcaccctcactgctgaccttgagcctctctctcctctagagtggaaaagacaaggatgccgtggataaattgctcaaggacctggacgccaatggagatgcccaggtggacttcagtgagttcatcgtgttcgtggctgcaatcacgtctgcctgtcacaagtactttgagaaggcaggactcaaatgatgccctggagatgtcacagattcctggcagagccatggtcccaggcttcccaaaagtgtttgttggcaattattcccctaggctgagcctgctcatgtacctctgattaataaatgcttatgaaatga

SEQ ID NO: 50 - DNA, 3125 bp, Homo sapiens
gggtctcccacttgtccagacagcggccgggcttgtcacggggctctgtgcagccttttccactctcccggctgccagcgtcccgccccgtcccctcccagcccccaagggaggaggggagagctgcagagaggaggaggggtcggggaggcccggctttataaaggcggctggaacaaccctgcccgccagaccccgtcgcccggatcccctgagctgcccgccatcccacgtgaccgcgccgccccccagctccaccgctgagcccgctcgccatggccctcttcggggccctcttcctagcgctgctggcaggcgcacatgcagagttcccagggaggggctgcgctttctggagcaagagctggagactatcaccattccggacctgcggggcaaagaaggccacttctactacaacatctctgaggtgaaggtcacagagctgcaactgacatcttccgagctcgatttccagccacagcaggagctgatgcttcaaatcaccaatgcctccttggggctgcgcttccggagacagctgctctactggttcttctatgatgggggctacatcaacgcctcagctgagggtgtgtccatccgcactggtctggagctctcccgggatcccgctggacggatgaaagtgtccaatgtctcctgccaggcctctgtctccagaatgcacgcggccttcgggggaaccttcaagaaggtgtatgattttctctccacgttcatcacctcagggatgcgcttcctcctcaaccagcagatctgccctgtcctctaccacgcagggacggtcctgctcaactccctcctggacaccgtgcctgtgcgcagttctgtggacgagcttgttggcattgactattccctcatgaaggatcctgtggcttccaccagcaacctggacatggacttccggggggccttcttccccctgactgagaggaactggagcctccccaaccgggcagtggagccccagctgcaggaggaagagcggatggtgtatgtggccttctctgagttcttcttcgactctgccatggagagctacttccgggcgggggccctgcagctgttgctggtgggggacaaggtgccccacgacctggacatgctgctgagggccacctactttgggagcattgtcctgctgagcccagcagtgattgactccccattgaagctggagctgcgggtcctggccccaccgcgctgcaccatcaagccctctggcaccaccatctctgtcactgctagcgtcaccattgccctggtcccaccagaccagcctgaggtccagctgtccagcatgactatggacgcccgtctcagcgccaagatggctctccgggggaaggccctgcgcacgcagctggacctgcgcaggttccgaatctattccaaccattctgcactggagtcgctggctctgatcccattacaggcccctctgaagaccatgctgcagattggggtgatgcccatgctcaatgagcggacctggcgtggggtgcagatcccactacctgagggcatcaactttgtgcatgaggtggtgacgaaccatgcgggattcctcaccatcggggctgatctccactttgccaaagggctgcgagaggtgattgagaagaaccggcctgctgatgtcagggcgtccactgcccccacaccgtccacagcagctgtctgagccctcaatccccaagctggcagctgtcattcaggaccccaacccctctcagcccctcttttcccacattcatagcctgtagtgccccctctaacccccagtgccacagagaagacgggatttgaagctgtacccaatttaattccataatcaatctatcaattacagtccgtccaccacctccctgtgggctgtcctgagctctgttgggttcctgggatggaatcagtgcatcataaagggcattctttaagcagagaaggggccaggccaccccattcaggaactgctgcgggaataaagtgctaacttgcccccaggctgtctatgggagaccctgggcccagtctgggatgtacagggctctgggaagggggcagtcctggcggcagaacccggcctgcaggggcactttgcttagaagaggactctcctagcgggagaggctgggaggggctgcatcaggccgtggagctggttgctgtggtcatcagtatggctgcttgttcaggaagcgggagaacatggtgaaggcagcgaggggcttgtcggtgggaaccatgtggccggcgccctgaggagcaatgttcgtgagctcctgaccccaccattccctcctccccatataactgctcactcgggggcaattccttcatcccaaaccctttattcttcccagaaccctccccacccctctccaaaaaaacttgcccatacaggggccagatggtgacccatgacccagcctaaaaggcagccagagggaaaggacgggtgggtcctgctcctttgcctccggcccagttatctctcagcaggcccagtccctaccttgatcgtgagaaaggcgatgtgggagaactccttcacgaagccggcaatctgctccccgctgtccccgtacttcactaaccagggccggcgctgcacctccatctgccccaccaggaaagacatcagcctacagcagctgcatccttgctcacagctaccagcaagaccttagggctgggaattcctccacacttgccctctgtgggccagagccaggcagccagctggccactcccaggcatacccgctcccaatcctccacagcagcccctatcccagggccaggaatctctaccttaccttctggttgagggaatccacaaaccactcatcccccatgaaattgcaggccatgtctacatctccattatataataggatctggtatttctaaagcaggatggggtaaaaatgaggggtgtggaacaagcccagtccccagcccttccctagttcaaggcctacccctcaggaaattcaaggggccaagctagataacacgaaccagggaattttcatgttttctaacgacttactgcatgtccagtattctactaaatgttttatctgtgaaagtaga

SEQ ID NO: 51 - DNA, 3263 bp, Homo sapiens
gggtctcccacttgtccagacagcggccgggcttgtcacggggctctgtgcagccttttccactctcccggctgccagcgtcccgccccgtcccctcccagcccccaagggaggaggggagagctgcagagaggaggaggggtcggggaggcccggctttataaaggcggctggaacaaccctgcccgccagaccccgtcgcccggatcccctgagctgcccgccatcccacgtgaccgcgccgccccccagctccaccgctgagcccgctcgccatggccctcttcggggccctcttcctagcgctgctggcaggcgcacatgcagagttcccaggctgcaagatccgcgtcacctccaaggcgctggagctggtgaagcaggaggggctgcgctttctggagcaagagctggagactatcaccattccggacctgcggggcaaagaaggccacttctactacaacatctctgagcctggacttgaaaggggagcagacaaatttcctgtcgttgggggaagttccctcttcttggccctggatctgaccctgaggcctcctgtagggtgaaggtcacagagctgcaactgacatcttccgagctcgatttccagccacagcaggagctgatgcttcaaatcaccaatgcctccttggggctgcgcttccggagacagctgctctactggttcttctatgatgggggctacatcaacgcctcagctgagggtgtgtccatccgcactggtctggagctctcccgggatcccgctggacggatgaaagtgtccaatgtctcctgccaggcctctgtctccagaatgcacgcggccttcgggggaaccttcaagaaggtgtatgattttctctccacgttcatcacctcagggatgcgcttcctcctcaaccagcagatctgccctgtcctctaccacgcagggacggtcctgctcaactccctcctggacaccgtgcctgtgcgcagttctgtggacgagcttgttggcattgactattccctcatgaaggatcctgtggcttccaccagcaacctggacatggacttccggggggccttcttccccctgactgagaggaactggagcctccccaaccgggcagtggagccccagctgcaggaggaagagcggatggtgtatgtggccttctctgagttcttcttcgactctgccatggagagctacttccgggcgggggccctgcagctgttgctggtgggggacaaggtgccccacgacctggacatgctgctgagggccacctactttgggagcattgtcctgctgagcccagcagtgattgactccccattgaagctggagctgcgggtcctggccccaccgcgctgcaccatcaagccctctggcaccaccatctctgtcactgctagcgtcaccattgccctggtcccaccagaccagcctgaggtccagctgtccagcatgactatggacgcccgtctcagcgccaagatggctctccgggggaaggccctgcgcacgcagctggacctgcgcaggttccgaatctattccaaccattctgcactggagtcgctggctctgatcccattacaggcccctctgaagaccatgctgcagattggggtgatgcccatgctcaatgagcggacctggcgtggggtgcagatcccactacctgagggcatcaactttgtgcatgaggtggtgacgaaccatgcgggattcctcaccatcggggctgatctccactttgccaaagggctgcgagaggtgattgagaagaaccggcctgctgatgtcagggcgtccactgcccccacaccgtccacagcagctgtctgagccctcaatccccaagctggcagctgtcattcaggaccccaacccctctcagcccctcttttcccacattcatagcctgtagtgccccctctaacccccagtgccacagagaagacgggatttgaagctgtacccaatttaattccataatcaatctatcaattacagtccgtccaccacctccctgtgggctgtcctgagctctgttgggttcctgggatggaatcagtgcatcataaagggcattctttaagcagagaaggggccaggccaccccattcaggaactgctgcgggaataaagtgctaacttgcccccaggctgtctatgggagaccctgggcccagtctgggatgtacagggctctgggaagggggcagtcctggcggcagaacccggcctgcaggggcactttgcttagaagaggactctcctagcgggagaggctgggaggggctgcatcaggccgtggagctggttgctgtggtcatcagtatggctgcttgttcaggaagcgggagaacatggtgaaggcagcgaggggcttgtcggtgggaaccatgtggccggcgccctgaggagcaatgttcgtgagctcctgaccccaccattccctcctccccatataactgctcactcgggggcaattccttcatcccaaaccctttattcttcccagaaccctccccacccctctccaaaaaaacttgcccatacaggggccagatggtgacccatgacccagcctaaaaggcagccagagggaaaggacgggtgggtcctgctcctttgcctccggcccagttatctctcagcaggcccagtccctaccttgatcgtgagaaaggcgatgtgggagaactccttcacgaagccggcaatctgctccccgctgtccccgtacttcactaaccagggccggcgctgcacctccatctgccccaccaggaaagacatcagcctacagcagctgcatccttgctcacagctaccagcaagaccttagggctgggaattcctccacacttgccctctgtgggccagagccaggcagccagctggccactcccaggcatacccgctcccaatcctccacagcagcccctatcccagggccaggaatctctaccttaccttctggttgagggaatccacaaaccactcatcccccatgaaattgcaggccatgtctacatctccattatataataggatctggtatttctaaagcaggatggggtaaaaatgaggggtgtggaacaagcccagtccccagcccttccctagttcaaggcctacccctcaggaaattcaaggggccaagctagataacacgaaccagggaattttcatgttttctaacgacttactgcatgtccagtattctactaaatgttttatctgtgaaagtaga

SEQ ID NO: 52 - DNA, 3256 bp, Homo sapiens
gggtctcccacttgtccagacagcggccgggcttgtcacggggctctgtgcagccttttccactctcccggctgccagcgtcccgccccgtcccctcccagcccccaagggaggaggggagagctgcagagaggaggaggggtcggggaggcccggctttataaaggcggctggaacaaccctgcccgccagaccccgtcgcccggatcccctgagctgcccgccatcccacgtgaccgcgccgccccccagctccaccgctgagcccgctcgccatggccctcttcggggccctcttcctagcgctgctggcaggcgcacatgcagagttcccaggctgcaagatccgcgtcacctccaaggcgctggagctggtgaagcaggaggggctgcgctttctggagcaagagctggagactatcaccattccggacctgcggggcaaagaaggccacttctactacaacatctctgaggtgaaggtcacagagctgcaactgacatcttccgagctcgatttccagccacagcaggagctgatgcttcaaatcaccaatgcctccttggggctgcgcttccggagacagctgctctactggttcttctatgatgggggctacatcaacgcctcagctgagggtgtgtccatccgcactggtctggagctctcccgggatcccgctggacggatgaaagtgtccaatgtctcctgccaggcctctgtctccagaatgcacgcggccttcgggggaaccttcaagaaggtgtatgattttctctccacgttcatcacctcagggatgcgcttcctcctcaaccagcaggtgtgggcagcgacaggtcgcagggtggcaagggtgggcatgctctcactttgagaaggccctgactctggctcccacctcgcagatctgccctgtcctctaccacgcagggacggtcctgctcaactccctcctggacaccgtgcctgtgcgcagttctgtggacgagcttgttggcattgactattccctcatgaaggatcctgtggcttccaccagcaacctggacatggacttccggggggccttcttccccctgactgagaggaactggagcctccccaaccgggcagtggagccccagctgcaggaggaagagcggatggtgtatgtggccttctctgagttcttcttcgactctgccatggagagctacttccgggcgggggccctgcagctgttgctggtgggggacaaggtgccccacgacctggacatgctgctgagggccacctactttgggagcattgtcctgctgagcccagcagtgattgactccccattgaagctggagctgcgggtcctggccccaccgcgctgcaccatcaagccctctggcaccaccatctctgtcactgctagcgtcaccattgccctggtcccaccagaccagcctgaggtccagctgtccagcatgactatggacgcccgtctcagcgccaagatggctctccgggggaaggccctgcgcacgcagctggacctgcgcaggttccgaatctattccaaccattctgcactggagtcgctggctctgatcccattacaggcccctctgaagaccatgctgcagattggggtgatgcccatgctcaatgagcggacctggcgtggggtgcagatcccactacctgagggcatcaactttgtgcatgaggtggtgacgaaccatgcgggattcctcaccatcggggctgatctccactttgccaaagggctgcgagaggtgattgagaagaaccggcctgctgatgtcagggcgtccactgcccccacaccgtccacagcagctgtctgagccctcaatccccaagctggcagctgtcattcaggaccccaacccctctcagcccctcttttcccacattcatagcctgtagtgccccctctaacccccagtgccacagagaagacgggatttgaagctgtacccaatttaattccataatcaatctatcaattacagtccgtccaccacctccctgtgggctgtcctgagctctgttgggttcctgggatggaatcagtgcatcataaagggcattctttaagcagagaaggggccaggccaccccattcaggaactgctgcgggaataaagtgctaacttgcccccaggctgtctatgggagaccctgggcccagtctgggatgtacagggctctgggaagggggcagtcctggcggcagaacccggcctgcaggggcactttgcttagaagaggactctcctagcgggagaggctgggaggggctgcatcaggccgtggagctggttgctgtggtcatcagtatggctgcttgttcaggaagcgggagaacatggtgaaggcagcgaggggcttgtcggtgggaaccatgtggccggcgccctgaggagcaatgttcgtgagctcctgaccccaccattccctcctccccatataactgctcactcgggggcaattccttcatcccaaaccctttattcttcccagaaccctccccacccctctccaaaaaaacttgcccatacaggggccagatggtgacccatgacccagcctaaaaggcagccagagggaaaggacgggtgggtcctgctcctttgcctccggcccagttatctctcagcaggcccagtccctaccttgatcgtgagaaaggcgatgtgggagaactccttcacgaagccggcaatctgctccccgctgtccccgtacttcactaaccagggccggcgctgcacctccatctgccccaccaggaaagacatcagcctacagcagctgcatccttgctcacagctaccagcaagaccttagggctgggaattcctccacacttgccctctgtgggccagagccaggcagccagctggccactcccaggcatacccgctcccaatcctccacagcagcccctatcccagggccaggaatctctaccttaccttctggttgagggaatccacaaaccactcatcccccatgaaattgcaggccatgtctacatctccattatataataggatctggtatttctaaagcaggatggggtaaaaatgaggggtgtggaacaagcccagtccccagcccttccctagttcaaggcctacccctcaggaaattcaaggggccaagctagataacacgaaccagggaattttcatgttttctaacgacttactgcatgtccagtattctactaaatgttttatctgtgaaagtaga

SEQ ID NO: 53 - DNA, 3164 bp, Homo sapiens
gggtctcccacttgtccagacagcggccgggcttgtcacggggctctgtgcagccttttccactctcccggctgccagcgtcccgccccgtcccctcccagcccccaagggaggaggggagagctgcagagaggaggaggggtcggggaggcccggctttataaaggcggctggaacaaccctgcccgccagaccccgtcgcccggatcccctgagctgcccgccatcccacgtgaccgcgccgccccccagctccaccgctgagcccgctcgccatggccctcttcggggccctcttcctagcgctgctggcaggcgcacatgcagagttcccaggctgcaagatccgcgtcacctccaaggcgctggagctggtgaagcaggaggggctgcgctttctggagcaagagctggagactatcaccattccggacctgcggggcaaagaaggccacttctactacaacatctctgaggtgaaggtcacagagctgcaactgacatcttccgagctcgatttccagccacagcaggagctgatgcttcaaatcaccaatgcctccttggggctgcgcttccggagacagctgctctactggttcttctatgatgggggctacatcaacgcctcagctgagggtgtgtccatccgcactggtctggagctctcccgggatcccgctggacggatgaaagtgtccaatgtctcctgccaggcctctgtctccagaatgcacgcggccttcgggggaaccttcaagaaggtgtatgattttctctccacgttcatcacctcagggatgcgcttcctcctcaaccagcagatctgccctgtcctctaccacgcagggacggtcctgctcaactccctcctggacaccgtgcctgttctgtggacgagcttgttggcattgactattccctcatgaaggatcctgtggcttccaccagcaacctggacatggacttccggggggccttcttccccctgactgagaggaactggagcctccccaaccgggcagtggagccccagctgcaggaggaagagcggatggtgtatgtggccttctctgagttcttcttcgactctgccatggagagctacttccgggcgggggccctgcagctgttgctggtgggggacaaggtgccccacgacctggacatgctgctgagggccacctactttgggagcattgtcctgctgagcccagcagtgattgactccccattgaagctggagctgcgggtcctggccccaccgcgctgcaccatcaagccctctggcaccaccatctctgtcactgctagcgtcaccattgccctggtcccaccagaccagcctgaggtccagctgtccagcatgactatggacgcccgtctcagcgccaagatggctctccgggggaaggccctgcgcacgcagctggacctgcgcaggttccgaatctattccaaccattctgcactggagtcgctggctctgatcccattacaggcccctctgaagaccatgctgcagattggggtgatgcccatgctcaatgagcggacctggcgtggggtgcagatcccactacctgagggcatcaactttgtgcatgaggtggtgacgaaccatgcgggattcctcaccatcggggctgatctccactttgccaaagggctgcgagaggtgattgagaagaaccggcctgctgatgtcagggcgtccactgcccccacaccgtccacagcagctgtctgagccctcaatccccaagctggcagctgtcattcaggaccccaacccctctcagcccctcttttcccacattcatagcctgtagtgccccctctaacccccagtgccacagagaagacgggatttgaagctgtacccaatttaattccataatcaatctatcaattacagtccgtccaccacctccctgtgggctgtcctgagctctgttgggttcctgggatggaatcagtgcatcataaagggcattctttaagcagagaaggggccaggccaccccattcaggaactgctgcgggaataaagtgctaacttgcccccaggctgtctatgggagaccctgggcccagtctgggatgtacagggctctgggaagggggcagtcctggcggcagaacccggcctgcaggggcactttgcttagaagaggactctcctagcgggagaggctgggaggggctgcatcaggccgtggagctggttgctgtggtcatcagtatggctgcttgttcaggaagcgggagaacatggtgaaggcagcgaggggcttgtcggtgggaaccatgtggccggcgccctgaggagcaatgttcgtgagctcctgaccccaccattccctcctccccatataactgctcactcgggggcaattccttcatcccaaaccctttattcttcccagaaccctccccacccctctccaaaaaaacttgcccatacaggggccagatggtgacccatgacccagcctaaaaggcagccagagggaaaggacgggtgggtcctgctcctttgcctccggcccagttatctctcagcaggcccagtccctaccttgatcgtgagaaaggcgatgtgggagaactccttcacgaagccggcaatctgctccccgctgtccccgtacttcactaaccagggccggcgctgcacctccatctgccccaccaggaaagacatcagcctacagcagctgcatccttgctcacagctaccagcaagaccttagggctgggaattcctccacacttgccctctgtgggccagagccaggcagccagctggccactcccaggcatacccgctcccaatcctccacagcagcccctatcccagggccaggaatctctaccttaccttctggttgagggaatccacaaaccactcatcccccatgaaattgcaggccatgtctacatctccattatataataggatctggtatttctaaagcaggatggggtaaaaatgaggggtgtggaacaagcccagtccccagcccttccctagttcaaggcctacccctcaggaaattcaaggggccaagctagataacacgaaccagggaattttcatgttttctaacgacttactgcatgtccagtattctactaaatgttttatctgtgaaagtaga

SEQ ID NO: 54 - DNA, 2886 bp, Homo sapiens
gggtctcccacttgtccagacagcggccgggcttgtcacggggctctgtgcagccttttccactctcccggctgccagcgtcccgccccgtcccctcccagcccccaagggaggaggggagagctgcagagaggaggaggggtcggggaggcccggctttataaaggcggctggaacaaccctgcccgccagaccccgtcgcccggatcccctgagctgcccgccatcccacgtgaccgcgccgccccccagctccaccgctgagcccgctcgccatggccctcttcggggccctcttcctagcgctgctggcaggcgcacatgcagagttcccaggctgcaagatccgcgtcacctccaaggcgctggagctggtgaagcaggaggggctgcgctttctggagcaagagctggagactatcaccattccggacctgcggggcaaagaaggccacttctactacaacatctctgagaaggtgtatgattttctctccacgttcatcacctcagggatgcgcttcctcctcaaccagcagatctgccctgtcctctaccacgcagggacggtcctgctcaactccctcctggacaccgtgcctgtgcgcagttctgtggacgagcttgttggcattgactattccctcatgaaggatcctgtggcttccaccagcaacctggacatggacttccggggggccttcttccccctgactgagaggaactggagcctccccaaccgggcagtggagccccagctgcaggaggaagagcggatggtgtatgtggccttctctgagttcttcttcgactctgccatggagagctacttccgggcgggggccctgcagctgttgctggtgggggacaaggtgccccacgacctggacatgctgctgagggccacctactttgggagcattgtcctgctgagcccagcagtgattgactccccattgaagctggagctgcgggtcctggccccaccgcgctgcaccatcaagccctctggcaccaccatctctgtcactgctagcgtcaccattgccctggtcccaccagaccagcctgaggtccagctgtccagcatgactatggacgcccgtctcagcgccaagatggctctccgggggaaggccctgcgcacgcagctggacctgcgcaggttccgaatctattccaaccattctgcactggagtcgctggctctgatcccattacaggcccctctgaagaccatgctgcagattggggtgatgcccatgctcaatgagcggacctggcgtggggtgcagatcccactacctgagggcatcaactttgtgcatgaggtggtgacgaaccatgcgggattcctcaccatcggggctgatctccactttgccaaagggctgcgagaggtgattgagaagaaccggcctgctgatgtcagggcgtccactgcccccacaccgtccacagcagctgtctgagccctcaatccccaagctggcagctgtcattcaggaccccaacccctctcagcccctcttttcccacattcatagcctgtagtgccccctctaacccccagtgccacagagaagacgggatttgaagctgtacccaatttaattccataatcaatctatcaattacagtccgtccaccacctccctgtgggctgtcctgagctctgttgggttcctgggatggaatcagtgcatcataaagggcattctttaagcagagaaggggccaggccaccccattcaggaactgctgcgggaataaagtgctaacttgcccccaggctgtctatgggagaccctgggcccagtctgggatgtacagggctctgggaagggggcagtcctggcggcagaacccggcctgcaggggcactttgcttagaagaggactctcctagcgggagaggctgggaggggctgcatcaggccgtggagctggttgctgtggtcatcagtatggctgcttgttcaggaagcgggagaacatggtgaaggcagcgaggggcttgtcggtgggaaccatgtggccggcgccctgaggagcaatgttcgtgagctcctgaccccaccattccctcctccccatataactgctcactcgggggcaattccttcatcccaaaccctttattcttcccagaaccctccccacccctctccaaaaaaacttgcccatacaggggccagatggtgacccatgacccagcctaaaaggcagccagagggaaaggacgggtgggtcctgctcctttgcctccggcccagttatctctcagcaggcccagtccctaccttgatcgtgagaaaggcgatgtgggagaactccttcacgaagccggcaatctgctccccgctgtccccgtacttcactaaccagggccggcgctgcacctccatctgccccaccaggaaagacatcagcctacagcagctgcatccttgctcacagctaccagcaagaccttagggctgggaattcctccacacttgccctctgtgggccagagccaggcagccagctggccactcccaggcatacccgctcccaatcctccacagcagcccctatcccagggccaggaatctctaccttaccttctggttgagggaatccacaaaccactcatcccccatgaaattgcaggccatgtctacatctccattatataataggatctggtatttctaaagcaggatggggtaaaaatgaggggtgtggaacaagcccagtccccagcccttccctagttcaaggcctacccctcaggaaattcaaggggccaagctagataacacgaaccagggaattttcatgttttctaacgacttactgcatgtccagtattctactaaatgttttatctgtgaaagtaga

SEQ ID NO: 55 - DNA, 3100 bp, Homo sapiens
gggtctcccacttgtccagacagcggccgggcttgtcacggggctctgtgcagccttttccactctcccggctgccagcgtcccgccccgtcccctcccagcccccaagggaggaggggagagctgcagagaggaggaggggtcggggaggcccggctttataaaggcggctggaacaaccctgcccgccagaccccgtcgcccggatcccctgagctgcccgccatcccacgtgaccgcgccgccccccagctccaccgctgagcccgctcgccatggccctcttcggggccctcttcctagcgctgctggcaggcgcacatgcagagttcccaggctgcaagatccgcgtcacctccaaggcgctggagctggtgaagcaggaggggctgcgctttctggagcaagagctggagactatcaccattccggacctgcggggcaaagaaggccacttctactacaacatctctgaggtgaaggtcacagagctgcaactgacatcttccgagctcgatttccagccacagcaggagctgatgcttcaaatcaccaatgcctccttggggctgcgcttccggagacagctgctctactggttcttgaaggtgtatgattttctctccacgttcatcacctcagggatgcgcttcctcctcaaccagcaggtgtgggcagcgacaggtcgcagggtggcaagggtgggcatgctctcactttgagaaggccctgactctggctcccacctcgcagatctgccctgtcctctaccacgcagggacggtcctgctcaactccctcctggacaccgtgcctgtgcgcagttctgtggacgagcttgttggcattgactattccctcatgaaggatcctgtggcttccaccagcaacctggacatggacttccggggggccttcttccccctgactgagaggaactggagcctccccaaccgggcagtggagccccagctgcaggaggaagagcggatggtgtatgtggccttctctgagttcttcttcgactctgccatggagagctacttccgggcgggggccctgcagctgttgctggtgggggacaaggtgccccacgacctggacatgctgctgagggccacctactttgggagcattgtcctgctgagcccagcagtgattgactccccattgaagctggagctgcgggtcctggccccaccgcgctgcaccatcaagccctctggcaccaccatctctgtcactgctagcgtcaccattgccctggtcccaccagaccagcctgaggtccagctgtccagcatgactatggacgcccgtctcagcgccaagatggctctccgggggaaggccctgcgcacgcagctggacctgcgcaggttccgaatctattccaaccattctgcactggagtcgctggctctgatcccattacaggcccctctgaagaccatgctgcagattggggtgatgcccatgctcaatgagcggacctggcgtggggtgcagatcccactacctgagggcatcaactttgtgcatgaggtggtgacgaaccatgcgggattcctcaccatcggggctgatctccactttgccaaagggctgcgagaggtgattgagaagaaccggcctgctgatgtcagggcgtccactgcccccacaccgtccacagcagctgtctgagccctcaatccccaagctggcagctgtcattcaggaccccaacccctctcagcccctcttttcccacattcatagcctgtagtgccccctctaacccccagtgccacagagaagacgggatttgaagctgtacccaatttaattccataatcaatctatcaattacagtccgtccaccacctccctgtgggctgtcctgagctctgttgggttcctgggatggaatcagtgcatcataaagggcattctttaagcagagaaggggccaggccaccccattcaggaactgctgcgggaataaagtgctaacttgcccccaggctgtctatgggagaccctgggcccagtctgggatgtacagggctctgggaagggggcagtcctggcggcagaacccggcctgcaggggcactttgcttagaagaggactctcctagcgggagaggctgggaggggctgcatcaggccgtggagctggttgctgtggtcatcagtatggctgcttgttcaggaagcgggagaacatggtgaaggcagcgaggggcttgtcggtgggaaccatgtggccggcgccctgaggagcaatgttcgtgagctcctgaccccaccattccctcctccccatataactgctcactcgggggcaattccttcatcccaaaccctttattcttcccagaaccctccccacccctctccaaaaaaacttgcccatacaggggccagatggtgacccatgacccagcctaaaaggcagccagagggaaaggacgggtgggtcctgctcctttgcctccggcccagttatctctcagcaggcccagtccctaccttgatcgtgagaaaggcgatgtgggagaactccttcacgaagccggcaatctgctccccgctgtccccgtacttcactaaccagggccggcgctgcacctccatctgccccaccaggaaagacatcagcctacagcagctgcatccttgctcacagctaccagcaagaccttagggctgggaattcctccacacttgccctctgtgggccagagccaggcagccagctggccactcccaggcatacccgctcccaatcctccacagcagcccctatcccagggccaggaatctctaccttaccttctggttgagggaatccacaaaccactcatcccccatgaaattgcaggccatgtctacatctccattatataataggatctggtatttctaaagcaggatggggtaaaaatgaggggtgtggaacaagcccagtccccagcccttccctagttcaaggcctacccctcaggaaattcaaggggccaagctagataacacgaaccagggaattttcatgttttctaacgacttactgcatgtccagtattctactaaatgttttatctgtgaaagtaga

SEQ ID NO: 56 - DNA, 3254 bp, Homo sapiens
gggtctcccacttgtccagacagcggccgggcttgtcacggggctctgtgcagccttttccactctcccggctgccagcgtcccgccccgtcccctcccagcccccaagggaggaggggagagctgcagagaggaggaggggtcggggaggcccggctttataaaggcggctggaacaaccctgcccgccagaccccgtcgcccggatcccctgagctgcccgccatcccacgtgaccgcgccgccccccagctccaccgctgagcccgctcgccatggccctcttcggggccctcttcctagcgctgctggcaggcgcacatgcagagttcccaggctgcaagatccgcgtcacctccaaggcgctggagctggtgaagcaggaggggctgcgctttctggagcaagagctggagactatcaccattccggacctgcggggcaaagaaggccacttctactacaacatctctgaggtgaaggtcacagagctgcaactgacatcttccgagctcgatttccagccacagcaggagctgatgcttcaaatcaccaatgcctccttggggctgcgcttccggagacagctgctctactggttcttctatgatgggggctacatcaacgcctcagctgagggtgtgtccatccgcactggtctggagctctcccgggatcccgctggacggatgaaagtgtccaatgtctcctgccaggcctctgtctccagaatgcacgcggccttcgggggaaccttcaagaaggtgtatgattttctctccacgttcatcacctcagggatgcgcttcctcctcaaccagcagatctgccctgtcctctaccacgcagggacggtcctgctcaactccctcctggacaccgtgcctgtgcgcagttctgtggacgagcttgttggcattgactattccctcatgaaggatcctgtggcttccaccagcaacctggacatggacttccggggggccttcttccccctgactgagaggaactggagcctccccaaccgggcagtggagccccagctgcaggaggaagagcggatggtgtatgtggccttctctgagttcttcttcgactctgccatggagagctacttccgggcgggggccctgcagctgttgctggtgggggacaaggtgccccacgacctggacatgctgctgagggccacctactttgggagcattgtcctgctgagcccagcagtgattgactccccattgaagctggagctgcgggtcctggccccaccgcgctgcaccatcaagccctctggcaccaccatctctgtcactgctagcgtcaccattgccctggtcccaccagaccagcctgaggtccagctgtccagcatgactatggacgcccgtctcagcgccaagatggctctccgggggaaggccctgcgcacgcagctggacctgcgcaggttccgaatctattccaaccattctgcactggagtcgctggctctgatcccattacaggcccctctgaagaccatgctgcagattggggtgatgcccatgctcaatggtaaggctggggtgtgaggatggaggaagaaaggaggggtgaactgggcgggcccagactgagcggggtgctcccacccacagagcggacctggcgtggggtgcagatcccactacctgagggcatcaactttgtgcatgaggtggtgacgaaccatgcgggattcctcaccatcggggctgatctccactttgccaaagggctgcgagaggtgattgagaagaaccggcctgctgatgtcagggcgtccactgcccccacaccgtccacagcagctgtctgagccctcaatccccaagctggcagctgtcattcaggaccccaacccctctcagcccctcttttcccacattcatagcctgtagtgccccctctaacccccagtgccacagagaagacgggatttgaagctgtacccaatttaattccataatcaatctatcaattacagtccgtccaccacctccctgtgggctgtcctgagctctgttgggttcctgggatggaatcagtgcatcataaagggcattctttaagcagagaaggggccaggccaccccattcaggaactgctgcgggaataaagtgctaacttgcccccaggctgtctatgggagaccctgggcccagtctgggatgtacagggctctgggaagggggcagtcctggcggcagaacccggcctgcaggggcactttgcttagaagaggactctcctagcgggagaggctgggaggggctgcatcaggccgtggagctggttgctgtggtcatcagtatggctgcttgttcaggaagcgggagaacatggtgaaggcagcgaggggcttgtcggtgggaaccatgtggccggcgccctgaggagcaatgttcgtgagctcctgaccccaccattccctcctccccatataactgctcactcgggggcaattccttcatcccaaaccctttattcttcccagaaccctccccacccctctccaaaaaaacttgcccatacaggggccagatggtgacccatgacccagcctaaaaggcagccagagggaaaggacgggtgggtcctgctcctttgcctccggcccagttatctctcagcaggcccagtccctaccttgatcgtgagaaaggcgatgtgggagaactccttcacgaagccggcaatctgctccccgctgtccccgtacttcactaaccagggccggcgctgcacctccatctgccccaccaggaaagacatcagcctacagcagctgcatccttgctcacagctaccagcaagaccttagggctgggaattcctccacacttgccctctgtgggccagagccaggcagccagctggccactcccaggcatacccgctcccaatcctccacagcagcccctatcccagggccaggaatctctaccttaccttctggttgagggaatccacaaaccactcatcccccatgaaattgcaggccatgtctacatctccattatataataggatctggtatttctaaagcaggatggggtaaaaatgaggggtgtggaacaagcccagtccccagcccttccctagttcaaggcctacccctcaggaaattcaaggggccaagctagataacacgaaccagggaattttcatgttttctaacgacttactgcatgtccagtattctactaaatgttttatctgtgaaagtaga

SEQ ID NO: 57 - DNA, 1437 bp, Homo sapiens
agtacatccgggggagcggaactgcaagaggaaaggctcgggtaggcttctgggagcgaccgctccgctcgtctcgttggttccggaggtcgctgcggcggtgggaaatgctggcgcgcgcggcgcggggcactggggcccttttgctgaggggctctctactggcttctggccgcgctccgcgccgcgcctcctctggattgccccgaaacaccgtggtactgttcgtgccgcagcaggaggcctgggtggtggagcgaatgggccgattccaccggatcctggagcctggtttgaacatcctcatccctgtgttagaccggatccgatatgtgcagagtctcaaggaaattgtcatcaacgtgcctgagcagtcggctgtgactctcgacaatgtaactctgcaaatcgatggagtcctttacctgcgcatcatggacccttacaaggcaagctacggtgtggaggaccctgagtatgccgtcacccagctagctcaaacaaccatgagatcagagctcggcaaactctctctggacaaagtcttccgggaacgggagtccctgaatgccagcattgtggatgccatcaaccaagctgctgactgctggggtatccgctgcctccgttatgagatcaaggatatccatgtgccaccccgggtgaaagagtctatgcagatgcaggtggaggcagagcggcggaaacgggccacagttctagagtctgaggggacccgagagtcggccatcaatgtggcagaagggaagaaacaggcccagatcctggcctccgaagcagaaaaggctgaacagataaatcaggcagcaggagaggccagtgcagttctggcgaaggccaaggctaaagctgaagctattcgaatcctggctgcagctctgacacaacataatggagatgcagcagcttcactgactgtggccgagcagtatgtcagcgcgttctccaaactggccaaggactccaacactatcctactgccctccaaccctggcgatgtcaccagcatggtggctcaggccatgggtgtatatggagccctcaccaaagccccagtgccagggactccagactcactctccagtgggagcagcagagatgtccagggtacagatgcaagtcttgatgaggaacttgatcgagtcaagatgagttagtggagctgggcttggccagggagtctggggacaaggaagcagattttcctgattctggctctagcttccctgccaagattttggtttttatttttttatttgaactttagtcgtgtaataaactcaccagtggcaaaccaaaaaaaaaaatctttgattggggaatgaagttgggaaagtcactagcattttccttggatccagtcctgtcagcatgatgcctccatgaataagagtgaacttcttgtaaagtgaaact

SEQ ID NO: 58 - DNA, 1745 bp, Homo sapiens
agtacatccgggggagcggaactgcaagaggaaaggctcgggtaggcttctgggagcgaccgctccgctcgtctcgttggttccggaggtcgctgcggcggtgggaaatgctggcgcgcgcggcgcggggcactggggcccttttgctgaggggctctctactggcttctggccgcgctccgcgccgcgcctcctctggattgccccgaaacaccgtggtactgttcgtgccgcagcaggaggcctgggtggtggagcgaatgggccgattccaccggatcctggagcctggtttgaacatcctcatccctgtgttagaccggatccgatatgtgcagagtctcaaggaaattgtcatcaacgtgcctgagcagtcggctgtgactctcgacaatgtaactctgcaaatcgatggagtcctttacctgcgcatcatggacccttacaaggcaagctacggtgtggaggaccctgagtatgccgtcacccagctagctcaaacaaccatgagatcagagctcggcaaactctctctggacaaagtcttccgggaacgggagtccctgaatgccagcattgtggatgccatcaaccaagctgctgactgctggggtatccgctgcctccgttatgagatcaaggatatccatgtgccaccccgggtgaaagagtctatgcagatgcaggtggaggcagagcggcggaaacgggccacagttctagagtctgaggggacccgagagtcggccatcaatgtggcagaagggaagaaacaggcccagatcctggcctccgaagcagaaaaggctgaacagataaatcaggcagcaggagaggccagtgcagttctggcgaaggccaaggctaaagctgaagctattcgaatcctggctgcagctctgacacaacataatggagatgcagcagcttcactgactgtggccgagcagtatgtcagcgcgttctccaaactggccaaggactccaacactatcctactgccctccaaccctggcgatgtcaccagcatggtggctcaggttagagctctctgaggacccagcacagagcactggtgccagggaccaaactgagaccccaccaccgtcatcaacacttacataccataaaggtcttcagagtgccttggccctagacctcccttcgttctttgtagagatggaatctaagaatgaaacatctccactcagtcctgcaaatatggaagttcttgagatacctttttttggtagatacttgtgctggtattctgagagtcactttactctgatggtttgcaagattcctaaaatcaactccagagcttacaagacaggtttgagagagggagaaaggaaaaccaacttactggcccccatgccatcttttcccgtttagccattggtaggctgggctgcacctctgtcaagtgtcctcatggtattctctctgttcctctcctcaggccatgggtgtatatggagccctcaccaaagccccagtgccagggactccagactcactctccagtgggagcagcagagatgtccagggtacagatgcaagtcttgatgaggaacttgatcgagtcaagatgagttagtggagctgggcttggccagggagtctggggacaaggaagcagattttcctgattctggctctagcttccctgccaagattttggtttttatttttttatttgaactttagtcgtgtaataaactcaccagtggcaaaccaaa

SEQ ID NO: 59 - DNA, 2037 bp, Homo sapiens
agtacatccgggggagcggaactgcaagaggaaaggctcgggtaggcttctgggagcgaccgctccgctcgtctcgttggttccggaggtcgctgcggcggtgggaaatgctggcgcgcgcggcgcggggcactggggcccttttgctgagggtgagagcgaggcaacctttccagagggtcaggacagagattacctgggttctccgctggaaaagagcgaaattccaacttttggagaggactggggtcagaggtcatggtccccatgtgattctccgaggatcctgagggtcgtggtttatggagatgccttcaggaccgaggggcggcgtgtctggccagatgggatctctgctcaccctcttctttccttcagggctctctactggcttctggccgcgctccgcgccgcgcctcctctggattgccccgaaacaccgtggtactgttcgtgccgcagcaggaggcctgggtggtggagcgaatgggccgattccaccggatcctggagcctgtgagaaacctcttctgcccaccctgggccagccagatgaccaatccctcacgacatgcaatgtcgggaggacttcctttgggcctgcccgcactgttagctcccgactctgtaggccagacctgacagggcccaggctgctgaccatcatccccatgttaccaccttttcctatgcatctcacaggccccattcttgggaatctcccctgcccactctcagccctacctctcagtctgcatagagatggctattctgctggctccgattctcatgactctcccctccattcaggggcctagtcttgcattcctgttctcttgggttttcttaccagtgacacctcagccttctgaggacttatttcttggtaggagctgctgcttttctgggcatgttccatgtgttgactccctacatactccaggactagcttaggtcccaacccaatagttcccagccttctgaggacccatgactcctctttccagggtttgaacatcctcatccctgtgttagaccggatccgatatgtgcagagtctcaaggaaattgtcatcaacgtgcctgagcagtcggctgtgactctcgacaatgtaactctgcaaatcgatggagtcctttacctgcgcatcatggacccttacaaggcaagctacggtgtggaggaccctgagtatgccgtcacccagctagctcaaacaaccatgagatcagagctcggcaaactctctctggacaaagtcttccgggaacgggagtccctgaatgccagcattgtggatgccatcaaccaagctgctgactgctggggtatccgctgcctccgttatgagatcaaggatatccatgtgccaccccgggtgaaagagtctatgcagatgcaggtggaggcagagcggcggaaacgggccacagttctagagtctgaggggacccgagagtcggccatcaatgtggcagaagggaagaaacaggcccagatcctggcctccgaagcagaaaaggctgaacagataaatcaggcagcaggagaggccagtgcagttctggcgaaggccaaggctaaagctgaagctattcgaatcctggctgcagctctgacacaacataatggagatgcagcagcttcactgactgtggccgagcagtatgtcagcgcgttctccaaactggccaaggactccaacactatcctactgccctccaaccctggcgatgtcaccagcatggtggctcaggccatgggtgtatatggagccctcaccaaagccccagtgccagggactccagactcactctccagtgggagcagcagagatgtccagggtacagatgcaagtcttgatgaggaacttgatcgagtcaagatgagttagtggagctgggcttggccagggagtctggggacaaggaagcagattttcctgattctggctctagcttccctgccaagattttggtttttatttttttatttgaactttagtcgtgtaataaactcaccagtggcaaaccaaa

SEQ ID NO: 60 - DNA, 1811 bp, Homo sapiens
agtacatccgggggagcggaactgcaagaggaaaggctcgggtaggcttctgggagcgaccgctccgctcgtctcgttggttccggaggtcgctgcggcggtgggaaatgctggcgcgcgcggcgcggggcactggggcccttttgctgaggggctctctactggcttctggccgcgctccgcgccgcgcctcctctggattgccccgaaacaccgtggtactgttcgtgccgcagcaggaggcctgggtggtggagcgaatgggccgattccaccggatcctggagcctgtgagaaacctcttctgcccaccctgggccagccagatgaccaatccctcacgacatgcaatgtcgggaggacttcctttgggcctgcccgcactgttagctcccgactctgtaggccagacctgacagggcccaggctgctgaccatcatccccatgttaccaccttttcctatgcatctcacaggccccattcttgggaatctcccctgcccactctcagccctacctctcagtctgcatagagatggctattctgctggctccgattctcatgactctcccctccattcaggggcctagtcttgcattcctgttctcttgggttttcttaccagtgacacctcagccttctgaggacttatttcttggtaggagctgctgcttttctgggcatgttccatgtgttgactccctacatactccaggactagcttaggtcccaacccaatagttcccagccttctgaggacccatgactcctctttccagggtttgaacatcctcatccctgtgttagaccggatccgatatgtgcagagtctcaaggaaattgtcatcaacgtgcctgagcagtcggctgtgactctcgacaatgtaactctgcaaatcgatggagtcctttacctgcgcatcatggacccttacaaggcaagctacggtgtggaggaccctgagtatgccgtcacccagctagctcaaacaaccatgagatcagagctcggcaaactctctctggacaaagtcttccgggaacgggagtccctgaatgccagcattgtggatgccatcaaccaagctgctgactgctggggtatccgctgcctccgttatgagatcaaggatatccatgtgccaccccgggtgaaagagtctatgcagatgcaggtggaggcagagcggcggaaacgggccacagttctagagtctgaggggacccgagagtcggccatcaatgtggcagaagggaagaaacaggcccagatcctggcctccgaagcagaaaaggctgaacagataaatcaggcagcaggagaggccagtgcagttctggcgaaggccaaggctaaagctgaagctattcgaatcctggctgcagctctgacacaacataatggagatgcagcagcttcactgactgtggccgagcagtatgtcagcgcgttctccaaactggccaaggactccaacactatcctactgccctccaaccctggcgatgtcaccagcatggtggctcaggccatgggtgtatatggagccctcaccaaagccccagtgccagggactccagactcactctccagtgggagcagcagagatgtccagggtacagatgcaagtcttgatgaggaacttgatcgagtcaagatgagttagtggagctgggcttggccagggagtctggggacaaggaagcagattttcctgattctggctctagcttccctgccaagattttggtttttatttttttatttgaactttagtcgtgtaataaactcaccagtggcaaaccaaa

SEQ ID NO: 61 - DNA, 1437 bp, Homo sapiens
agtacatccgggggagcggaactgcaagaggaaaggctcgggtaggcttctgggagcgaccgctccgctcgtctcgttggttccggaggtcgctgcggcggtgggaaatgctggcgcgcgcggcgcggggcactggggcccttttgctgaggggctctctactggcttctggccgcgctccgcgccgcgcctcctctggattgccccgaaacaccgtggtactgttcgtgccgcagcaggaggcctgggtggtggagcgaatgggccgattccaccggatcctggagcctgagctgctgcttttctgggcatgttccatgtgttgactccctacatactccaggactagcttaggtcccaacccaatagttcccagccttctgaggacccatgactcctctttccagggtttgaacatcctcatccctgtgttagaccggatccgatatgtgcagagtctcaaggaaattgtcatcaacgtgcctgagcagtcggctgtgactctcgacaatgtaactctgcaaatcgatggagtcctttacctgcgcatcatggacccttacaaggcaagctacggtgtggaggaccctgagtatgccgtcacccagctagctcaaacaaccatgagatcagagctcggcaaactctctctggacaaagtcttccgggaacgggagtccctgaatgccagcattgtggatgccatcaaccaagctgctgactgctggggtatccgctgcctccgttatgagatcaaggatatccatgtgccaccccgggtgaaagagtctatgcagatgcaggtggaggcagagcggcggaaacgggccacagttctagagtctgaggggacccgagagtcggccatcaatgtggcagaagggaagaaacaggcccagatcctggcctccgaagcagaaaaggctgaacagataaatcaggcagcaggagaggccagtgcagttctggcgaaggccaaggctaaagctgaagctattcgaatcctggctgcagctctgacacaacataatggagatgcagcagcttcactgactgtggccgagcagtatgtcagcgcgttctccaaactggccaaggactccaacactatcctactgccctccaaccctggcgatgtcaccagcatggtggctcaggccatgggtgtatatggagccctcaccaaagccccagtgccagggactccagactcactctccagtgggagcagcagagatgtccagggtacagatgcaagtcttgatgaggaacttgatcgagtcaagatgagttagtggagctgggcttggccagggagtctggggacaaggaagcagattttcctgattctggctctagcttccctgccaagattttggtttttatttttttatttgaactttagtcgtgtaataaactcaccagtggcaaaccaaa

SEQ ID NO: 62 - DNA, 1525 bp, Homo sapiens
agtacatccgggggagcggaactgcaagaggaaaggctcgggtaggcttctgggagcgaccgctccgctcgtctcgttggttccggaggtcgctgcggcggtgggaaatgctggcgcgcgcggcgcggggcactggggcccttttgctgaggggctctctactggcttctggccgcgctccgcgccgcgcctcctctggattgccccgaaacaccgtggtactgttcgtgccgcagcaggaggcctgggtggtggagcgaatgggccgattccaccggatcctggagcctggtttgaacatcctcatccctgtgttagaccggatccgatatgtgcagagtctcaaggaaattgtcatcaacgtgcctgagcagtcggctgtgactctcgacaatgtaactctgcaaatcgatggagtcctttacctgcgcatcatggacccttacaaggcaagctacggtgtggaggaccctgagtatgccgtcacccagctagctcaaacaaccatgagatcagagctcggcaaactctctctggacaaagtcttccgggaacgggagtccctgaatgccagcattgtggatgccatcaaccaagctgctgactgctggggtatccgctgcctccgttatgagatcaaggatatccatgtgccaccccgggtgaaagagtctatgcagatgcaggtggaggcagagcggcggaaacgggccacagttctagagtctgaggggacccgagagtcggccatcaatgtggcagaagggaagaaacaggcccagatcctggcctccgaagcagaaaaggctgaacagataaatcaggcagcaggagaggccagtgcagttctggcgaaggccaaggctaaagctgaagctattcgaatcctggctgcagctctgacacaacatgtgagaggcccctgggtgggaatggggacaggaattgacagtggaaggggttctcttatctacgcttgaggagagttccgcctctgtgggctctgttgagccagattacatggtcctttttattgtgaactgctttcttcattccccatcccccccttcttctccgtatcggtgatctctgatttttatccccctgtgatcacagaatggagatgcagcagcttcactgactgtggccgagcagtatgtcagcgcgttctccaaactggccaaggactccaacactatcctactgccctccaaccctggcgatgtcaccagcatggtggctcaggccatgggtgtatatggagccctcaccaaagccccagtgccagggactccagactcactctccagtgggagcagcagagatgtccagggtacagatgcaagtcttgatgaggaacttgatcgagtcaagatgagttagtggagctgggcttggccagggagtctggggacaaggaagcagattttcctgattctggctctagcttccctgccaagattttggtttttatttttttatttgaactttagtcgtgtaataaactcaccagtggcaaaccaaa

SEQ ID NO: 63 - DNA, 1443 bp, Homo sapiens
agtacatccgggggagcggaactgcaagaggaaaggctcgggtaggcttctgggagcgaccgctccgctcgtctcgttggttccggaggtcgctgcggcggtgggaaatgctggcgcgcgcggcgcggggcactggggcccttttgctgaggggctctctactggcttctggccgcgctccgcgccgcgcctcctctggattgccccgaaacaccgtggtactgttcgtgccgcagcaggaggcctgggtggtggagcgaatgggccgattccaccggatcctggagcctggtttgaacatcctcatccctgtgttagaccggatccgatatgtgcagagtctcaaggaaattgtcatcaacgtgcctgagcagtcggctgtgactctcgacaatgtaactctgcaaatcgatggagtcctttacctgcgcatcatggacccttacaaggcaagctacggtgtggaggaccctgagtatgccgtcacccagctagctcaaacaaccatgagatcagagctcggcaaactctctctggacaaagtcttccgggaacgggagtccctgaatgccagcattgtggatgccatcaaccaagctgctgactgctggggtatccgctgcctccgttatgagatcaaggatatccatgtgccaccccgggtgaaagagtctatgcagatgcaggtggaggcagagcggcggaaacgggccacagttctagagtctgaggggacccgagagtcggccatcaatgtggcagaagggaagaaacaggcccagatcctggcctccgaagcagaaaaggctgaacagataaatcaggcagcaggtcaggagagggtagaggctgagggaggagcaaggcatgggcctttgaagattggtgctggggcaggatctttggggtactttgacttcatgggtcaagcaagctctgtcccttctcttgcaggagaggccagtgcagttctggcgaaggccaaggctaaagctgaagctattcgaatcctggctgcagctctgacacaacataatggagatgcagcagcttcactgactgtggccgagcagtatgtcagcgcgttctccaaactggccaaggactccaacactatcctactgccctccaaccctggcgatgtcaccagcatggtggctcaggccatgggtgtatatggagccctcaccaaagccccagtgccagggactccagactcactctccagtgggagcagcagagatgtccagggtacagatgcaagtcttgatgaggaacttgatcgagtcaagatgagttagtggagctgggcttggccagggagtctggggacaaggaagcagattttcctgattctggctctagcttccctgccaagattttggtttttatttttttatttgaactttagtcgtgtaataaactcaccagtggcaaaccaaa

SEQ ID NO: 64 - DNA, 1191 bp, Homo sapiens
agtacatccgggggagcggaactgcaagaggaaaggctcgggtaggcttctgggagcgaccgctccgctcgtctcgttggttccggaggtcgctgcggcggtgggaaatgctggcgcgcgcggcgcggggcactggggcccttttgctgaggggctctctactggcttctggccgcgctccgcgccgcgcctcctctggattgccccgaaacaccgtggtactgttcgtgccgcagcaggaggcctgggtggtggagcgaatgggccgattccaccggatcctggagcctggtttgaacatcctcatccctgtgttagaccggatccgatatgtgcagagtctcaaggaaattgtcatcaacgtgcctgagcagtcggctgtgactctcgacaatgtaactctgcaaatcgatggagtcctttacctgcgcatcatggacccttacaaggcaagctacggtgtggaggaccctgagtatgccgtcacccagctagctcaaacaaccatgagatcagagctcggcaaactctctctggacaaagtcttccgggaacgggagtccctgaatgccagcattgtggatgccatcaaccaagctgctgactgctggggtatccgctgcctccgttatgagatcaaggatatccatgtgccaccccgggtgaaagagtctatgcagatgcaggtggaggcagagcggcggaaacgggccacagttctagagtctgaggggacccgagagtcggccatcaatgtggcagaagggaagaaacaggcccagatcctggcctccgaagcagaaaaggctgaacagataaatcaggcagcaggagaggccagtgcagttctggcgaaggccaaggctaaagctgaagctattcgaatcctggctgcagctctgacacaacatgccatgggtgtatatggagccctcaccaaagccccagtgccagggactccagactcactctccagtgggagcagcagagatgtccagggtacagatgcaagtcttgatgaggaacttgatcgagtcaagatgagttagtggagctgggcttggccagggagtctggggacaaggaagcagattttcctgattctggctctagcttccctgccaagattttggtttttatttttttatttgaactttagtcgtgtaataaactcaccagtggcaaaccaaa

SEQ ID NO: 65 - DNA, 1648 bp, Homo sapiens
agtacatccgggggagcggaactgcaagaggaaaggctcgggtaggcttctgggagcgaccgctccgctcgtctcgttggttccggaggtcgctgcggcggtgggaaatgctggcgcgcgcggcgcggggcactggggcccttttgctgaggggctctctactggcttctggccgcgctccgcgccgcgcctcctctggattgccccgaaacaccgtggtactgttcgtgccgcagcaggaggcctgggtggtggagcgaatgggccgattccaccggatcctggagcctggtttgaacatcctcatccctgtgttagaccggatccgatatgtgcagagtctcaaggaaattgtcatcaacgtgcctgagcagtcggctgtgactctcgacaatgtaactctgcaaatcgatggagtcctttacctgcgcatcatggacccttacaaggcaagctacggtgtggaggaccctgagtatgccgtcacccagctagctcaaacaaccatgagatcagagctcggcaaactctctctggacaaagtcttccgggaacgggagtccctgaatgccagcattgtggatgccatcaaccaagctgctgactgctggggtatccgctgcctccgttatgagatcaaggatatccatgtgccaccccgggtgaaagagtctatgcagatgcaggtggaggcagagcggcggaaacgggccacagttctagagtctgaggggacccgagagtcggccatcaatgtggcagaagggaagaaacaggcccagatcctggcctccgaagcagaaaaggctgaacagataaatcaggcagcaggtcaggagagggtagaggctgagggaggagcaaggcatgggcctttgaagattggtgctggggcaggatctttggggtactttgacttcatgggtcaagcaagctctgtcccttctcttgcaggagaggccagtgcagttctggcgaaggccaaggctaaagctgaagctattcgaatcctggctgcagctctgacacaacatgtgagaggcccctgggtgggaatggggacaggaattgacagtggaaggggttctcttatctacgcttgaggagagttccgcctctgtgggctctgttgagccagattacatggtcctttttattgtgaactgctttcttcattccccatcccccccttcttctccgtatcggtgatctctgatttttatccccctgtgatcacagaatggagatgcagcagcttcactgactgtggccgagcagtatgtcagcgcgttctccaaactggccaaggactccaacactatcctactgccctccaaccctggcgatgtcaccagcatggtggctcaggccatgggtgtatatggagccctcaccaaagccccagtgccagggactccagactcactctccagtgggagcagcagagatgtccagggtacagatgcaagtcttgatgaggaacttgatcgagtcaagatgagttagtggagctgggcttggccagggagtctggggacaaggaagcagattttcctgattctggctctagcttccctgccaagattttggtttttatttttttatttgaactttagtcgtgtaataaactcaccagtggcaaaccaaa

SEQ ID NO: 66 - DNA, 1469 bp, Homo sapiens
agtacatccgggggagcggaactgcaagaggaaaggctcgggtaggcttctgggagcgaccgctccgctcgtctcgttggttccggaggtcgctgcggcggtgggaaatgctggcgcgcgcggcgcggggcactggggcccttttgctgaggggctctctactggcttctggccgcgctccgcgccgcgcctcctctggattgccccgaaacaccgtggtactgttcgtgccgcagcaggaggcctgggtggtggagcgaatgggccgattccaccggatcctggagcctggtttgaacatcctcatccctgtgttagaccggatccgatatgtgcagagtctcaaggaaattgtcatcaacgtgcctgagcagtcggctgtgactctcgacaatgtaactctgcaaatcgatggagtcctttacctgcgcatcatggacccttacaaggcaagctacggtgtggaggaccctgagtatgccgtcacccagctagctcaaacaaccatgagatcagagctcggcaaactctctctggacaaagtcttccgggtaagcagatctgagccagagttagggtttgaagacacaaacctgacactcttaatcttttctgaaggtcaagatcagtcccaggcccttctcagtgtaggcccttgataggtaggttgaggctgtggggcttacacctctttttccaggaacgggagtccctgaatgccagcattgtggatgccatcaaccaagctgctgactgctggggtatccgctgcctccgttatgagatcaaggatatccatgtgccaccccgggtgaaagagtctatgcagatgcaggtggaggcagagcggcggaaacgggccacagttctagagtctgaggggacccgagagtcggccatcaatgtggcagaagggaagaaacaggcccagatcctggcctccgaagcagaaaaggctgaacagataaatcaggcagcaggagaggccagtgcagttctggcgaaggccaaggctaaagctgaagctattcgaatcctggctgcagctctgacacaacataatggagatgcagcagcttcactgactgtggccgagcagtatgtcagcgcgttctccaaactggccaaggactccaacactatcctactgccctccaaccctggcgatgtcaccagcatggtggctcaggccatgggtgtatatggagccctcaccaaagccccagtgccagggactccagactcactctccagtgggagcagcagagatgtccagggtacagatgcaagtcttgatgaggaacttgatcgagtcaagatgagttagtggagctgggcttggccagggagtctggggacaaggaagcagattttcctgattctggctctagcttccctgccaagattttggtttttatttttttatttgaactttagtcgtgtaataaactcaccagtggcaaaccaaa

SEQ ID NO: 67 - DNA, 2154 bp, Homo sapiens
agtacatccgggggagcggaactgcaagaggaaaggctcgggtaggcttctgggagcgaccgctccgctcgtctcgttggttccggaggtcgctgcggcggtgggaaatgctggcgcgcgcggcgcggggcactggggcccttttgctgagggtgagagcgaggcaacctttccagagggtcaggacagagattacctgggttctccgctggaaaagagcgaaattccaacttttggagaggactggggtcagaggtcatggtccccatgtgattctccgaggatcctgagggtcgtggtttatggagatgccttcaggaccgaggggcggcgtgtctggccagatgggatctctgctcaccctcttctttccttcagggctctctactggcttctggccgcgctccgcgccgcgcctcctctggattgccccgaaacaccgtggtactgttcgtgccgcagcaggaggcctgggtggtggagcgaatgggccgattccaccggatcctggagcctgtgagaaacctcttctgcccaccctgggccagccagatgaccaatccctcacgacatgcaatgtcgggaggacttcctttgggcctgcccgcactgttagctcccgactctgtaggccagacctgacagggcccaggctgctgaccatcatccccatgttaccaccttttcctatgcatctcacaggccccattcttgggaatctcccctgcccactctcagccctacctctcagtctgcatagagatggctattctgctggctccgattctcatgactctcccctccattcaggggcctagtcttgcattcctgttctcttgggttttcttaccagtgacacctcagccttctgaggacttatttcttggtaggagctgctgcttttctgggcatgttccatgtgttgactccctacatactccaggactagcttaggtcccaacccaatagttcccagccttctgaggacccatgactcctctttccagggtttgaacatcctcatccctgtgttagaccggatccgatatgtgcagagtctcaaggaaattgtcatcaacgtgcctgagcagtcggctgtgactctcgacaatgtaactctgcaaatcgatggagtcctttacctgcgcatcatggacccttacaaggcaagctacggtgtggaggaccctgagtatgccgtcacccagctagctcaaacaaccatgagatcagagctcggcaaactctctctggacaaagtcttccgggaacgggagtccctgaatgccagcattgtggatgccatcaaccaagctgctgactgctggggtatccgctgcctccgttatgagatcaaggatatccatgtgccaccccgggtgaaagagtctatgcagatgcaggtggaggcagagcggcggaaacgggccacagttctagagtctgaggggacccgagagtcggccatcaatgtggcagaagggaagaaacaggcccagatcctggcctccgaagcagaaaaggctgaacagataaatcaggcagcaggagaggccagtgcagttctggcgaaggccaaggctaaagctgaagctattcgaatcctggctgcagctctgacacaacataatggagatgcagcagcttcactgactgtggccgagcagtatgtcagcgcgttctccaaactggccaaggactccaacactatcctactgccctccaaccctggcgatgtcaccagcatggtggctcaggccatgggtgtatatggagccctcaccaaagccccagtgccagggactccagactcactctccagtgggagcagcagagatgtccagggtacagatgcaagtcttgatgaggaacttgatcgagtcaagatgagttagtggagctgggcttggccagggagtctggggacaaggaagcagattttcctgattctggctctagcttccctgccaagattttggtttttatttttttatttgaactttagtcgtgtaataaactcaccagtggcaaaccaaaaaaaaaaatctttgattggggaatgaagttgggaaagtcactagcattttccttggatccagtcctgtcagcatgatgcctccatgaataagagtgaacttcttgtaaagtgaaact

SEQ ID NO: 68 - DNA, 1464 bp, Homo sapiens
agtacatccgggggagcggaactgcaagaggaaaggctcgggtaggcttctgggagcgaccgctccgctcgtctcgttggttccggaggtcgctgcggcggtgggaaatgctggcgcgcgcggcgcggggcactggggcccttttgctgaggggctctctactggcttctggccgcgctccgcgccgcgcctcctctggattgccccgaaacaccgtggtactgttcgtgccgcagcaggaggcctgggtggtggagcgaatgggccgattccaccggatcctggagcctggtttgaacatcctcatccctgtgttagaccggatccgatatgtgcagagtctcaaggaaattgtcatcaacgtgcctgagcagtcggctgtgactctcgacaatgtaactctgcaaatcgatggagtcctttacctgcgcatcatggacccttacaaggcaagctacggtgtggaggaccctgagtatgccgtcacccagctagctcaaacaaccatgagatcagagctcggcaaactctctctggacaaagtcttccgggaacgggagtccctgaatgccagcattgtggatgccatcaaccaagctgctgactgctggggtatccgctgcctccgttatgagatcaaggatatccatgtgccaccccgggtgaaagagtctatgcagatgcaggtgggggccaaggaggggtgggaaaagggcctcagggctccagtaccaggaggatccagacttccctcctgttatgatgggtagagttgcatgtctgtatcagtctcccttggcttgttgattgggattgttgtgggcttccaggtggaggcagagcggcggaaacgggccacagttctagagtctgaggggacccgagagtcggccatcaatgtggcagaagggaagaaacaggcccagatcctggcctccgaagcagaaaaggctgaacagataaatcaggcagcaggagaggccagtgcagttctggcgaaggccaaggctaaagctgaagctattcgaatcctggctgcagctctgacacaacataatggagatgcagcagcttcactgactgtggccgagcagtatgtcagcgcgttctccaaactggccaaggactccaacactatcctactgccctccaaccctggcgatgtcaccagcatggtggctcaggccatgggtgtatatggagccctcaccaaagccccagtgccagggactccagactcactctccagtgggagcagcagagatgtccagggtacagatgcaagtcttgatgaggaacttgatcgagtcaagatgagttagtggagctgggcttggccagggagtctggggacaaggaagcagattttcctgattctggctctagcttccctgccaagattttggtttttatttttttatttgaactttagtcgtgtaataaactcaccagtggcaaaccaaa

SEQ ID NO: 69 - DNA, 1159 bp, Homo sapiens
agtacatccgggggagcggaactgcaagaggaaaggctcgggtaggcttctgggagcgaccgctccgctcgtctcgttggttccggaggtcgctgcggcggtgggaaatgctggcgcgcgcggcgcggggcactggggcccttttgctgaggggctctctactggcttctggccgcgctccgcgccgcgcctcctctggattgccccgaaacaccgtggtactgttcgtgccgcagcaggaggcctgggtggtggagcgaatgggccgattccaccggatcctggagcctggtttgaacatcctcatccctgtgttagaccggatccgatatgtgcagagtctcaaggaaattgtcatcaacgtgcctgagcagtcggctgtgactctcggaacgggagtccctgaatgccagcattgtggatgccatcaaccaagctgctgactgctggggtatccgctgcctccgttatgagatcaaggatatccatgtgccaccccgggtgaaagagtctatgcagatgcaggtggaggcagagcggcggaaacgggccacagttctagagtctgaggggacccgagagtcggccatcaatgtggcagaagggaagaaacaggcccagatcctggcctccgaagcagaaaaggctgaacagataaatcaggcagcaggagaggccagtgcagttctggcgaaggccaaggctaaagctgaagctattcgaatcctggctgcagctctgacacaacataatggagatgcagcagcttcactgactgtggccgagcagtatgtcagcgcgttctccaaactggccaaggactccaacactatcctactgccctccaaccctggcgatgtcaccagcatggtggctcaggccatgggtgtatatggagccctcaccaaagccccagtgccagggactccagactcactctccagtgggagcagcagagatgtccagggtacagatgcaagtcttgatgaggaacttgatcgagtcaagatgagttagtggagctgggcttggccagggagtctggggacaaggaagcagattttcctgattctggctctagcttccctgccaagattttggtttttatttttttatttgaactttagtcgtgtaataaactcaccagtggcaaaccaaa

SEQ ID NO: 70 - DNA, 1613 bp, Homo sapiens
agtacatccgggggagcggaactgcaagaggaaaggctcgggtaggcttctgggagcgaccgctccgctcgtctcgttggttccggaggtcgctgcggcggtgggaaatgctggcgcgcgcggcgcggggcactggggcccttttgctgaggggctctctactggcttctggccgcgctccgcgccgcgcctcctctggattgccccgaaacaccgtggtactgttcgtgccgcagcaggaggcctgggtggtggagcgaatgggccgattccaccggatcctggagcctggtttgaacatcctcatccctgtgttagaccggatccgatatgtgcagagtctcaaggaaattgtcatcaacgtgcctgagcagtcggctgtgactctcgacaatgtaactctgcaaatcgatggagtcctttacctgcgcatcatggacccttacaaggcaagctacggtgtggaggaccctgagtatgccgtcacccagctagctcaaacaaccatgagatcagagctcggcaaactctctctggacaaagtcttccgggtaagcagatctgagccagagttagggtttgaagacacaaacctgacactcttaatcttttctgaaggtcaagatcagtcccaggcccttctcagtgtaggcccttgataggtaggttgaggctgtggggcttacacctctttttccaggaacgggagtccctgaatgccagcattgtggatgccatcaaccaagctgctgactgctggggtatccgctgcctccgttatgagatcaaggatatccatgtgccaccccgggtgaaagagtctatgcagatgcaggtgggggccaaggaggggtgggaaaagggcctcagggctccagtaccaggaggatccagacttccctcctgttatgatgggtagagttgcatgtctgtatcagtctcccttggcttgttgattgggattgttgtgggcttccaggtggaggcagagcggcggaaacgggccacagttctagagtctgaggggacccgagagtcggccatcaatgtggcagaagggaagaaacaggcccagatcctggcctccgaagcagaaaaggctgaacagataaatcaggcagcaggagaggccagtgcagttctggcgaaggccaaggctaaagctgaagctattcgaatcctggctgcagctctgacacaacataatggagatgcagcagcttcactgactgtggccgagcagtatgtcagcgcgttctccaaactggccaaggactccaacactatcctactgccctccaaccctggcgatgtcaccagcatggtggctcaggccatgggtgtatatggagccctcaccaaagccccagtgccagggactccagactcactctccagtgggagcagcagagatgtccagggtacagatgcaagtcttgatgaggaacttgatcgagtcaagatgagttagtggagctgggcttggccagggagtctggggacaaggaagcagattttcctgattctggctctagcttccctgccaagattttggtttttatttttttatttgaactttagtcgtgtaataaactcaccagtggcaaaccaaa

SEQ ID NO: 71 - DNA, 1185 bp, Homo sapiens
agtacatccgggggagcggaactgcaagaggaaaggctcgggtaggcttctgggagcgaccgctccgctcgtctcgttggttccggaggtcgctgcggcggtgggaaatgctggcgcgcgcggcgcggggcactggggcccttttgctgaggggctctctactggcttctggccgcgctccgcgccgcgcctcctctggattgccccgaaacaccgtggtactgttcgtgccgcagcaggaggcctgggtggtggagcgaatgggccgattccaccggatcctggagcctggtttgaacatcctcatccctgtgttagaccggatccgatatgtgcagagtctcaaggaaattgtcatcaacgtgcctgagcagtcggctgtgactctcgacaatgtaactctgcaaatcgatggagtcctttacctgcgcatcatggacccttacaaggcaagctacggtgtggaggaccctgagtatgccgtcacccagctagctcaaacaaccatgagatcagagctcggcaaactctctctggacaaagtcttccgggtggaggcagagcggcggaaacgggccacagttctagagtctgaggggacccgagagtcggccatcaatgtggcagaagggaagaaacaggcccagatcctggcctccgaagcagaaaaggctgaacagataaatcaggcagcaggagaggccagtgcagttctggcgaaggccaaggctaaagctgaagctattcgaatcctggctgcagctctgacacaacataatggagatgcagcagcttcactgactgtggccgagcagtatgtcagcgcgttctccaaactggccaaggactccaacactatcctactgccctccaaccctggcgatgtcaccagcatggtggctcaggccatgggtgtatatggagccctcaccaaagccccagtgccagggactccagactcactctccagtgggagcagcagagatgtccagggtacagatgcaagtcttgatgaggaacttgatcgagtcaagatgagttagtggagctgggcttggccagggagtctggggacaaggaagcagattttcctgattctggctctagcttccctgccaagattttggtttttatttttttatttgaactttagtcgtgtaataaactcaccagtggcaaaccaaa

SEQ ID NO: 72 - DNA, 2799 bp, Homo sapiens
agtacatccgggggagcggaactgcaagaggaaaggctcgggtaggcttctgggagcgaccgctccgctcgtctcgttggttccggaggtcgctgcggcggtgggaaatgctggcgcgcgcggcgcggggcactggggcccttttgctgagggtgagagcgaggcaacctttccagagggtcaggacagagattacctgggttctccgctggaaaagagcgaaattccaacttttggagaggactggggtcagaggtcatggtccccatgtgattctccgaggatcctgagggtcgtggtttatggagatgccttcaggaccgaggggcggcgtgtctggccagatgggatctctgctcaccctcttctttccttcagggctctctactggcttctggccgcgctccgcgccgcgcctcctctggattgccccgaaacaccgtggtactgttcgtgccgcagcaggaggcctgggtggtggagcgaatgggccgattccaccggatcctggagcctgtgagaaacctcttctgcccaccctgggccagccagatgaccaatccctcacgacatgcaatgtcgggaggacttcctttgggcctgcccgcactgttagctcccgactctgtaggccagacctgacagggcccaggctgctgaccatcatccccatgttaccaccttttcctatgcatctcacaggccccattcttgggaatctcccctgcccactctcagccctacctctcagtctgcatagagatggctattctgctggctccgattctcatgactctcccctccattcaggggcctagtcttgcattcctgttctcttgggttttcttaccagtgacacctcagccttctgaggacttatttcttggtaggagctgctgcttttctgggcatgttccatgtgttgactccctacatactccaggactagcttaggtcccaacccaatagttcccagccttctgaggacccatgactcctctttccagggtttgaacatcctcatccctgtgttagaccggatccgatatgtgcagagtctcaaggaaattgtcatcaacgtgcctgagcagtcggctgtgactctcggtgaggggttcagggtgacatgggtgctctgaggctattaggatgtggttgctgtagatccagagcttagtagaaagaactggttgggacctagaggcctgactttccccgttttctctcctggttctacagacaatgtaactctgcaaatcgatggagtcctttacctgcgcatcatggacccttacaaggcaagctacggtgtggaggaccctgagtatgccgtcacccagctagctcaaacaaccatgagatcagagctcggcaaactctctctggacaaagtcttccgggaacgggagtccctgaatgccagcattgtggatgccatcaaccaagctgctgactgctggggtatccgctgcctccgttatgagatcaaggatatccatgtgccaccccgggtgaaagagtctatgcagatgcaggtggaggcagagcggcggaaacgggccacagttctagagtctgaggggacccgagagtcggccatcaatgtggcagaagggaagaaacaggcccagatcctggcctccgaagcagaaaaggctgaacagataaatcaggcagcaggagaggccagtgcagttctggcgaaggccaaggctaaagctgaagctattcgaatcctggctgcagctctgacacaacatgtgagaggcccctgggtgggaatggggacaggaattgacagtggaaggggttctcttatctacgcttgaggagagttccgcctctgtgggctctgttgagccagattacatggtcctttttattgtgaactgctttcttcattccccatcccccccttcttctccgtatcggtgatctctgatttttatccccctgtgatcacagaatggagatgcagcagcttcactgactgtggccgagcagtatgtcagcgcgttctccaaactggccaaggactccaacactatcctactgccctccaaccctggcgatgtcaccagcatggtggctcaggttagagctctctgaggacccagcacagagcactggtgccagggaccaaactgagaccccaccaccgtcatcaacacttacataccataaaggtcttcagagtgccttggccctagacctcccttcgttctttgtagagatggaatctaagaatgaaacatctccactcagtcctgcaaatatggaagttcttgagatacctttttttggtagatacttgtgctggtattctgagagtcactttactctgatggtttgcaagattcctaaaatcaactccagagcttacaagacaggtttgagagagggagaaaggaaaaccaacttactggcccccatgccatcttttcccgtttagccattggtaggctgggctgcacctctgtcaagtgtcctcatggtattctctctgttcctctcctcaggccatgggtgtatatggagccctcaccaaagccccagtgccagggactccagactcactctccagtgggagcagcagagatgtccagggtacagatgcaagtcttgatgaggaacttgatcgagtcaagatgagttagtggagctgggcttggccagggagtctggggacaaggaagcagattttcctgattctggctctagcttccctgccaagattttggtttttatttttttatttgaactttagtcgtgtaataaactcaccagtggcaaaccaaa

SEQ ID NO: 73 - DNA, 984 bp, Homo sapiens
agtacatccgggggagcggaactgcaagaggaaaggctcgggtaggcttctgggagcgaccgctccgctcgtctcgttggttccggaggtcgctgcggcggtgggaaatgctggcgcgcgcggcgcggggcactggggcccttttgctgaggggctctctactggcttctggccgcgctccgcgccgcgcctcctctggattgccccgaaacaccgtggtactgttcgtgccgcagcaggaggcctgggtggtggagcgaatgggccgattccaccggatcctggagcctggtttgaacatcctcatccctgtgttagaccggatccgatatgtgcagagtctcaaggaaattgtcatcaacgtgcctgagcagtcggctgtgactctcgacaatgtaactctgcaaatcgatggagtcctttacctgcgcatcatggacccttacaaggcaagctacggtgtggaggaccctgagtatgccgtcacccagctagctcaaacaaccatgagatcagagctcggcaaactctctctggacaaagtcttccgggaacgggagtccctgaatgccagcattgtggctcaggccatgggtgtatatggagccctcaccaaagccccagtgccagggactccagactcactctccagtgggagcagcagagatgtccagggtacagatgcaagtcttgatgaggaacttgatcgagtcaagatgagttagtggagctgggcttggccagggagtctggggacaaggaagcagattttcctgattctggctctagcttccctgccaagattttggtttttatttttttatttgaactttagtcgtgtaataaactcaccagtggcaaaccaaaaaaaaaaatctttgattggggaatgaagttgggaaagtcactagcattttccttggatccagtcctgtcagcatgatgcctccatgaataagagtgaacttcttgtaaagtgaaact

SEQ ID NO: 74 - DNA, 766 bp, Homo sapiens
agtacatccgggggagcggaactgcaagaggaaaggctcgggtaggcttctgggagcgaccgctccgctcgtctcgttggttccggaggtcgctgcggcggtgggaaatgctggcgcgcgcggcgcggggcactggggcccttttgctgaggggctctctactggcttctggccgcgctccgcgccgcgcctcctctggattgccccgaaacaccgtggtactgttcgtgccgcagcaggaggcctgggtggtggagcgaatgggccgattccaccggatcctggagcctggtttgaacatcctcatccctgtgttagaccggatccgatatgtgcagagtctcaaggaaattgtcatcaacgtgcctgagcagtcggctgtgactctcgacaatgtaactctgcaaatcgatggagtcctttacctgcgcatcatggacccttacaaggcaagctacggtgtggaggaccctgagtatgccgtcacccagctagctcaaacaaccatgagatcagagctcggcaaactctcttccagactcactctccagtgggagcagcagagatgtccagggtacagatgcaagtcttgatgaggaacttgatcgagtcaagatgagttagtggagctgggcttggccagggagtctggggacaaggaagcagattttcctgattctggctctagcttccctgccaagattttggtttttatttttttatttgaactttagtcgtgtaataaactcaccagtggcaaaccaaa

SEQ ID NO: 75 - DNA, 1295 bp, Homo sapiens
agaagaggaagacaggaagggggtggggatgtgaagcgaccgtcccagccttccccgcccgccacccccaccccaactcggcagccgtcacgtgatgcctggagtgggaggtggggagaaaaggcgagacttttgtgggtgctcccgatcgccagtagttccttcagtctcagccgccaactccggaggcgcggtgctcggcccgggagcgcgagcgggaggagcagagacccgcagccgggagcccgagcgcgggcgatgcaggctccgcgagcggcacctgcggctcctctaagctacgaccgtcgtctccgcggcagcagcgcgggccccagcagcctcggcagccacagccgctgcagccggggcagcctccgctgctgtcgcctcctctgatgcgcttgccctctcccggccccgggactccgggagaatgtgggtcctaggcatcgcggcaactttttgcggattgttcttgcttccaggctttgcgctgcaaatccagtgctaccagtgtgaagaattccagctgaacaacgactgctcctcccccgagttcattgtgaattgcacggtgaacgttcaagacatgtgtcagaaagaagtgatggagcaaagtgccgggatcatgtaccgcaagtcctgtgcatcatcagcggcctgtctcatcgcctctgccggttctccttgcagaggactggcgccgggacgcgaagagcaacgggcgctgcacaaagcgggcgctgtcggtggtggagtgcgcatgtacgcgcaggcgcttctcgtggttggcgtgctgcagcgacaggcggcagcacagcacctgcacgaacacccgccgaaactgctgcgaggacaccgtgtacaggagcgggttgatgaccgagctgaggtagaaaaacgtctccgagaaggggaggaggatcatgtacgcccggaagtaggacctcgtccagtcgtgcttgggtttggccgcagccatgatcctccgaatctggttgggcatccagcatacggccaatgtcacaacaatcagccctgggcagacacgagcaggagggagagacagagaaaagaaaaacacagcatgagaacacagtaaataaataaaaccataaaatatttagcccctctgttctgtgcttactggccaggaaatggtaccaatttttcagtgttggacttgacagcttcttttgccacaagcaagagagaatttaacactgtttcaaacccgggggagttggctgtgttaaagaaagaccattaaatgctttagacagtgtatttatacc

SEQ ID NO: 76 - DNA, 1367 bp, Homo sapiens
agaagaggaagacaggaagggggtggggatgtgaagcgaccgtcccagccttccccgcccgccacccccaccccaactcggcagccgtcacgtgatgcctggagtgggaggtggggagaaaaggcgagacttttgtgggtgctcccgatcgccagtagttccttcagtctcagccgccaactccggaggcgcggtgctcggcccgggagcgcgagcgggaggagcagagacccgcagccgggagcccgagcgcgggcgatgcaggctccgcgagcggcacctgcggctcctctaagctacgaccgtcgtctccgcggcagcagcgcgggccccagcagcctcggcagccacagccgctgcagccggggcagcctccgctgctgtcgcctcctctgatgcgcttgccctctcccggccccgggactccgggagaatgtgggtcctaggcatcgcggcaactttttgcggattgttcttgcttccaggctttgcgctgcaaatccagtgctaccagtgtgaagaattccagctgaacaacgactgctcctcccccgagttcattgtgaattgcacggtgaacgttcaagacatgtgtcagaaagaagtgatggagcaaagtgccgggtctcactgtgtcacgaggctggagtgcagtggaacaatttcagcacactgcaacctctgcctcccaggctcaaatgatcatcccacctaagcctccggagtagctgggaccacaggcaagcgccaccatgcccagctgataccaatgtcttttaaaaaatgttgtatgtggaaataaattgagacttatagaaaagctgcaaaaatagtgcagtttctatatatccttcccccatctttggctagtgttaacaatctacataaccgcagtacgatgatcaaggctaggaaattaacattggcacagtactgttaatgaaaccatgctttgttttgagattcccacagttttgcctttttctgttccaagatcctatccaggatcccacgttgcatttcattgtcatgtctccttctcctctaacctctgacaatgcatcattctttccatgtcttttgtgatgttgacacttttgaagaggactggtccagatttttgtacactgtccctcagtttgggattgtctgctgttttctcatgaacagatagaggttttgcatttttgacaagaatcctcagaagagatgcacccttctcagtgcactgtagcaaggggcgcatgctgtcaatgtcttactggtgatgttaactttgatcgcttttgattcagatagtatctgctgggtttttccactgtaaagttactattttttccattgtaattaataaataacttgaggga

SEQ ID NO: 77 - DNA, 1520 bp, Homo sapiens
agaagaggaagacaggaagggggtggggatgtgaagcgaccgtcccagccttccccgcccgccacccccaccccaactcggcagccgtcacgtgatgcctggagtgggaggtggggagaaaaggcgagacttttgtgggtgctcccgatcgccagtagttccttcagtctcagccgccaactccggaggcgcggtgctcggcccgggagcgcgagcgggaggagcagagacccgcagccgggagcccgagcgcgggcgatgcaggctccgcgagcggcacctgcggctcctctaagctacgaccgtcgtctccgcggcagcagcgcgggccccagcagcctcggcagccacagccgctgcagccggggcagcctccgctgctgtcgcctcctctgatgcgcttgccctctcccggccccgggactccgggagaatgtgggtcctaggcatcgcggcaactttttgcggattgttcttgcttccaggctttgcgctgcaaatccagtgctaccagtgtgaagaattccagctgaacaacgactgctcctcccccgagttcattgtgaattgcacggtgaacgttcaagacatgtgtcagaaagaagtgatggagcaaagtgccgacactaaaagaacaaacaccttgctcttcgagatgagacattttgccaagcagttgaccacttagttctcaagaagcaactatctctttcatgtgccttctgaggaagtattcagagggggaatatcaaatgtctttcccttggactctcccaggtctcactgtgtcacgaggctggagtgcagtggaacaatttcagcacactgcaacctctgcctcccaggctcaaatgatcatcccacctaagcctccggagtagctgggaccacaggcaagcgccaccatgcccagctgataccaatgtcttttaaaaaatgttgtatgtggaaataaattgagacttatagaaaagctgcaaaaatagtgcagtttctatatatccttcccccatctttggctagtgttaacaatctacataaccgcagtacgatgatcaaggctaggaaattaacattggcacagtactgttaatgaaaccatgctttgttttgagattcccacagttttgcctttttctgttccaagatcctatccaggatcccacgttgcatttcattgtcatgtctccttctcctctaacctctgacaatgcatcattctttccatgtcttttgtgatgttgacacttttgaagaggactggtccagatttttgtacactgtccctcagtttgggattgtctgctgttttctcatgaacagatagaggttttgcatttttgacaagaatcctcagaagagatgcacccttctcagtgcactgtagcaaggggcgcatgctgtcaatgtcttactggtgatgttaactttgatcgcttttgattcagatagtatctgctgggtttttccactgtaaagttactattttttccattgtaattaataaataacttgaggga

SEQ ID NO: 78 - DNA, 1371 bp, Homo sapiens
agaagaggaagacaggaagggggtggggatgtgaagcgaccgtcccagccttccccgcccgccacccccaccccaactcggcagccgtcacgtgatgcctggagtgggaggtggggagaaaaggcgagacttttgtgggtgctcccgatcgccagtagttccttcagtctcagccgccaactccggaggcgcggtgctcggcccgggagcgcgagcgggaggagcagagacccgcagccgggagcccgagcgcgggcgatgcaggctccgcgagcggcacctgcggctcctctaagctacgaccgtcgtctccgcggcagcagcgcgggccccagcagcctcggcagccacagccgctgcagccggggcagcctccgctgctgtcgcctcctctgatgcgcttgccctctcccggccccgggactccgggagaatgtgggtcctaggcatcgcggcaactttttgcggattgttcttgcttccaggctttgcgctgcaaatccagtgctaccagtgtgaagaattccagctgaacaacgactgctcctcccccgagttcattgtgaattgcacggtgaacgttcaagacatgtgtcagaaagaagtgatggagcaaagtgccgacagggtctcactgtgtcacgaggctggagtgcagtggaacaatttcagcacactgcaacctctgcctcccaggctcaaatgatcatcccacctaagcctccggagtagctgggaccacaggcaagcgccaccatgcccagctgataccaatgtcttttaaaaaatgttgtatgtggaaataaattgagacttatagaaaagctgcaaaaatagtgcagtttctatatatccttcccccatctttggctagtgttaacaatctacataaccgcagtacgatgatcaaggctaggaaattaacattggcacagtactgttaatgaaaccatgctttgttttgagattcccacagttttgcctttttctgttccaagatcctatccaggatcccacgttgcatttcattgtcatgtctccttctcctctaacctctgacaatgcatcattctttccatgtcttttgtgatgttgacacttttgaagaggactggtccagatttttgtacactgtccctcagtttgggattgtctgctgttttctcatgaacagatagaggttttgcatttttgacaagaatcctcagaagagatgcacccttctcagtgcactgtagcaaggggcgcatgctgtcaatgtcttactggtgatgttaactttgatcgcttttgattcagatagtatctgctgggtttttccactgtaaagttactattttttccattgtaattaataaataacttgaggga

SEQ ID NO: 79 - DNA, 2213 bp, Homo sapiens
agaagaggaagacaggaagggggtggggatgtgaagcgaccgtcccagccttccccgcccgccacccccaccccaactcggcagccgtcacgtgatgcctggagtgggaggtggggagaaaaggcgagacttttgtgggtgctcccgatcgccagtagttccttcagtctcagccgccaactccggaggcgcggtgctcggcccgggagcgcgagcgggaggagcagagacccgcagccgggagcccgagcgcgggcgatgcaggctccgcgagcggcacctgcggctcctctaagctacgaccgtcgtctccgcggcagcagcgcgggccccagcagcctcggcagccacagccgctgcagccggggcagcctccgctgctgtcgcctcctctgatgcgcttgccctctcccggccccgggactccgggagaatgtgggtcctaggcatcgcggcaactttttgcggattgttcttgcttccaggctttgcgctgcaaatccagtgctaccagtgtgaagaattccagctgaacaacgactgctcctcccccgagttcattgtgaattgcacggtgaacgttcaagacatgtgtcagaaagaagtgatggagcaaagtgccgacactaaaagaacaaacaccttgctcttcgagatgagacattttgccaagcagttgaccacttagttctcaagaagcaactatctctttcatgtgccttctgaggaagtattcagagggggaatatcaaatgtctttcccttggactctcccaggatcatgtaccgcaagtcctgtgcatcatcagcggcctgtctcatcgcctctgccgggtaccagtccttctgctccccagggaaactgaactcagtttgcatcagctgctgcaacacccctctttgtaacgggccaaggcccaagaaaaggggaagttctgcctcggccctcaggccagggctccgcaccaccatcctgttcctcaaattagccctcttctcggcacactgctgaagctgaaggagatgccaccccctcctgcattgttcttccagccctcgcccccaaccccccacctccctgagtgagtttcttctgggtgtccttttattctgggtagggagcgggagtccgtgttctcttttgttcctgtgcaaataatgaaagagctcggtaaagcattctgaataaattcagcctgactgaattttcagtatgtacttgaaggaaggaggtggagtgaaagttcacccccatgtctgtgtaaccggagtcaaggccaggctggcagagtcagtccttagaagtcactgaggtgggcatctgccttttgtaaagcctccagtgtccattccatccctgatgggggcatagtttgagactgcagagtgagagtgacgttttcttagggctggagggccagttcccactcaaggctccctcgcttgacattcaaacttcatgctcctgaaaaccattctctgcagcagaattggctggtttcgcgcctgagttgggctctagtgactcgagactcaatgactgggacttagactggggctcggcctcgctctgaaaagtgcttaagaaaatcttctcagttctccttgcagaggactggcgccgggacgcgaagagcaacgggcgctgcacaaagcgggcgctgtcggtggtggagtgcgcatgtacgcgcaggcgcttctcgtggttggcgtgctgcagcgacaggcggcagcacagcacctgcacgaacacccgccgaaactgctgcgaggacaccgtgtacaggagcgggttgatgaccgagctgaggtagaaaaacgtctccgagaaggggaggaggatcatgtacgcccggaagtaggacctcgtccagtcgtgcttgggtttggccgcagccatgatcctccgaatctggttgggcatccagcatacggccaatgtcacaacaatcagccctgggcagacacgagcaggagggagagacagagaaaagaaaaacacagcatgagaacacagtaaataaataaaaccataaaatatttagcccctctgttctgtgcttactggccaggaaatggtaccaatttttcagtgttggacttgacagcttcttttgccacaagcaagagagaatttaacactgtttcaaacccgggggagttggctgtgttaaagaaagaccattaaatgctttagacagtgtatttatacc

SEQ ID NO: 80 - DNA, 2247 bp, Homo sapiens
agaagaggaagacaggaagggggtggggatgtgaagcgaccgtcccagccttccccgcccgccacccccaccccaactcggcagccgtcacgtgatgcctggagtgggaggtggggagaaaaggcgagacttttgtgggtgctcccgatcgccagtagttccttcagtctcagccgccaactccggaggcgcggtgctcggcccgggagcgcgagcgggaggagcagagacccgcagccgggagcccgagcgcgggcgatgcaggctccgcgagcggcacctgcggctcctctaagctacgaccgtcgtctccgcggcagcagcgcgggccccagcagcctcggcagccacagccgctgcagccggggcagcctccgctgctgtcgcctcctctgatgcgcttgccctctcccggccccgggactccgggagaatgtgggtcctaggcatcgcggcaactttttgcggattgttcttgcttccaggtgagaatacccagaggccagcagccgaggccaggctttgcgctgcaaatccagtgctaccagtgtgaagaattccagctgaacaacgactgctcctcccccgagttcattgtgaattgcacggtgaacgttcaagacatgtgtcagaaagaagtgatggagcaaagtgccgacactaaaagaacaaacaccttgctcttcgagatgagacattttgccaagcagttgaccacttagttctcaagaagcaactatctctttcatgtgccttctgaggaagtattcagagggggaatatcaaatgtctttcccttggactctcccaggatcatgtaccgcaagtcctgtgcatcatcagcggcctgtctcatcgcctctgccgggtaccagtccttctgctccccagggaaactgaactcagtttgcatcagctgctgcaacacccctctttgtaacgggccaaggcccaagaaaaggggaagttctgcctcggccctcaggccagggctccgcaccaccatcctgttcctcaaattagccctcttctcggcacactgctgaagctgaaggagatgccaccccctcctgcattgttcttccagccctcgcccccaaccccccacctccctgagtgagtttcttctgggtgtccttttattctgggtagggagcgggagtccgtgttctcttttgttcctgtgcaaataatgaaagagctcggtaaagcattctgaataaattcagcctgactgaattttcagtatgtacttgaaggaaggaggtggagtgaaagttcacccccatgtctgtgtaaccggagtcaaggccaggctggcagagtcagtccttagaagtcactgaggtgggcatctgccttttgtaaagcctccagtgtccattccatccctgatgggggcatagtttgagactgcagagtgagagtgacgttttcttagggctggagggccagttcccactcaaggctccctcgcttgacattcaaacttcatgctcctgaaaaccattctctgcagcagaattggctggtttcgcgcctgagttgggctctagtgactcgagactcaatgactgggacttagactggggctcggcctcgctctgaaaagtgcttaagaaaatcttctcagttctccttgcagaggactggcgccgggacgcgaagagcaacgggcgctgcacaaagcgggcgctgtcggtggtggagtgcgcatgtacgcgcaggcgcttctcgtggttggcgtgctgcagcgacaggcggcagcacagcacctgcacgaacacccgccgaaactgctgcgaggacaccgtgtacaggagcgggttgatgaccgagctgaggtagaaaaacgtctccgagaaggggaggaggatcatgtacgcccggaagtaggacctcgtccagtcgtgcttgggtttggccgcagccatgatcctccgaatctggttgggcatccagcatacggccaatgtcacaacaatcagccctgggcagacacgagcaggagggagagacagagaaaagaaaaacacagcatgagaacacagtaaataaataaaaccataaaatatttagcccctctgttctgtgcttactggccaggaaatggtaccaatttttcagtgttggacttgacagcttcttttgccacaagcaagagagaatttaacactgtttcaaacccgggggagttggctgtgttaaagaaagaccattaaatgctttagacagtgtatttatacc

SEQ ID NO: 81 - DNA, 9702 bp, Homo sapiens
ggcctgctctccccacctctccgcgctgagcagccacgtcggcggcggtccctggtccagggaggggcgtggcaaaggcccgtgcgcggtacgtgtcccgcccctcgctgcccggagcccggatgaagagtaacgccattaccgccggagccgccgagagccttagccgacggaaactggacactggaccggcagcgccatgagactcctcccccgcttgctgctgcttctcttactcgtgttccctgccactgtcttgttccgaggcggccccagaggcttgttagcagtggcacaagatcttacagaggatgaagaaacagtagaagattccataattgaggatgaagatgatgaagccgaggtagaagaagatgaacccacagatttggtagaagataaagaggaagaagatgtgtctggtgaacctgaagcttcaccgagtgcagatacaactatactgtttgtaaaaggagaagattttccagcaaataacattgtgaagttcctggtaggctttaccaacaagggtacagaagattttattgttgaatccttagatgcctcattccgttatcctcaggactaccagttttatatccagaatttcacagctcttcctctgaacactgtagtgccaccccagagacaggcaacttttgagtactctttcattcctgcagagcccatgggcggacgaccatttggtttggtcatcaatctgaactacaaagatttgaacggcaatgtattccaagatgcagtcttcaatcaaacagttacagttattgaaagagaggatgggttagatggagaaaccgtaagagacccatacagaaagtagaaatgggtacatcaagtcagaatgatgttgacatgagttggattcctcaggaaacattgaatcaaatcaataaagcttcaccaagaaggttgcccaggaaacgggcacagaagagatcagtgggatctgatgagtaaatgttcctttgtgcaacaattcggtctttacttaacctgccctaatatttttcggcctgatgggaattagtgcagagaagccatgtcaccatagaaggcaactcctacttgtgtgtggactgagcaatcagagtctgtggcgataatattgctgaaaatgcactgcattcatttttctaaagtaacaaatttggtttttttttaaaccattaaaatctatgtgtgtgcgtgtgtatgtatgtgagcagttggtcttaccagaatcattgttgaactacctgaaacaagtctttagaatactaaatataatgctgttgtctcttcctttttgacattttctgatttttttcccccaaaactcagttaatatttacccactatgattattgatgtcctgccttgaacagttttaaagaaaacaatttttggaatagctcaaatttcaattgatggcacaaatcagcattttgttgttgttactgtattacaattagtattctaaaggcagaagcagaagtagctgctttttagcaatagaattgtttcagtattttgctgctgtttaatgcgcatcttcagaaaacttcccagtggcttcaaggaatttggggatctctctggcaacaaattgtgaaacatgaaatttctgctgactttaatatatgaaacctaatcctacccccttttttaacaaaaagaaactagtacatttgtgaaaattgtgttgtgttgtccattgttgctctagttctgacccagaggtagctctggagtgattttagacctactcactcagttgtgtgtaggtttttttgttttgttttgagagagaatttttctctccttaatagaagcatcctttttaaagagaagttgccttggtccacacactaagcagaaaaccaagttatcaggacagagatatttcccagttactcctaatcaatgaagaaagtgagttggatatttttaaagcagttaactaattttttcttacctaatcttttgggagttttgcttgttgatataacctttttagttaacctgaaagattccaaaaattgttcttaagtgcttgagactggaaccaaaattaaattgtacttcataaaatcctcttatagagttactcttgccctagattgtaaattaagtttggcattattgtcagactggatggagggtgaagtaaaatagtatgaacaattaagaggctctccccctcttgtctttaagccatattctcctacatgtattttataagaaaatgttaagtcaaattttagtggctctttaattcctgacctcttcattctccttttcagtataacctcccctatgctcatgcccacacagacaaaaaaacaaaacgaaatacacacagaaaaaagtctttccaaactgtttaagtatttaaacatctgagccaaagcagatagaagttattgtataattgttaatcactttgcaaataggggctatcaaattacctatattggcattgctggattataaactctatatctgtaatataaagtgtttgagtttttaattgggctgttatgatcagtagttgattttgagaaagctctatgagctctaagtaactgcatggttttttgtttaatgtaatataggagacccttcacattcccaaggaatatattccaaaacatttttgtgaatatctaagtttgtgaaactactagggcatgatacagtaaggtgtaattacagaatttacgaaatgtaaatggcctctacagagttttatggaatacctggtactaacgtaggcagctgcaaaaccacactgagttacagctgtcagccctcctcattcctaaataacttgccttacatatcagccctcccacttctgaagttcaaattagtgcctcggaaatgtagaatttattatttgtcatttttttttttttagcatagattgagaacagttgaactcttaaatcctcagatgccaggggtctgctctagcatcagtaagtatttagcagaaactaactccgtaatgaatggaattcaattccacacatggtttgttcaagcacacttaataagtagcctattttttaaatgtctttttaaaatgtaaatatttggatgaagtttttctttgttttgatatattcatttgctacaccaactatgttttcagaattcatcttttgaacaacttggtttcagaatatgtaaaatgactttaaggatcttgtgtatcaaacctatccccggatgtgtgagaataatgtgttcataaagcatggatctcgctttggttgtatagcttcctcatttacttcatggtcttacatagctggtgactttcagggctaatctgccctctaaagcattgtcccaggagaggaaaaggaaatgggacctcagaagtagaagcctcagggaaggagtaaagtagaaatcagaagaaaagaagcttcacttgatagtaataaggtttttaacttcaagtaccttcagaaaatgtgattttgataagaggaaagggcaaatttagaccttaaaaaatatggaagaactactgccttaaaagtgcatttgtagcacatcagcctagaactgtatcatggctgtgctggggagaagtaaatggtggtaatgtaacattgccacctttacttaatgatgtgttattttcgaggtacagtagatcaatatagtaataggcgagcctcatatatagcattcatcttgtacaatgatatccatacccttgatatgaaggaaaattgacttggtttgtgcatttgaatactgaaataattttttaaaactcagtgacacataccatctcttgccaagactagaccctgtattttagttcctaaattagatgtttaaatttaaaaacattttcagatgtacttaagtacttccatagtacttttttttttttttttttttttgccccctgagacggagtctctgtgtcacccaggctggagtgcagtggtgcgatctcggctcactgcaacttctgcctcttgggttcaagcagttctccctgtctcagcctcctgagtagcttggattacaggcgcccgtcaccgcacctgcctaatttttgcatttttagtagagacggggtttcgtcatttggccaggctggtcttgaactcctgaccacaggtgatacgcctgccttggcctcccaaagtgtgctgggattacaggcgtgagccactgtgcccggcccactgttcactttttgaatggcatcattttatagctgtagaactaaaatcaatgtttgccccaattttcttaagtaaaactctactttgagctcttacctccaacttagtaaaaagcagcttcacacacaaacaagattcttactggtggaatgttaggtttcgttgttaagttaatctgtctataagctcatccttagaggatatttgaggaggaagaacaccttgcagctgacttgcaaacatctaaataatttatttcgggtgcttatgaatgttactaatggattttgtatgaatttttatcccttttcatttatacaaaaacctgggcttttatgttaattatatcatctgaggttctaaggttttttttttagattttgaaatttagggataatagctcttaggtttgggtaccactttgctgcagtttaagaaagggggaagggaactcatttattaaacatcaatcacgtgctgtgttctgtttgttttctagtcatcatatcacacacctttacgacagctcactgaaggaaggtgatactgttcccattttgtagatggaatagacaaaacctgaatttaagtagcttgctcaaggttccatattgaatatggaaagttcaaatcatctcagtaatgaatataccatatatacttgctgtattgtatctatgataattcagttacccacaatacccttttaaatttctgttaatgacatacctttaaatgtctccttgatgaacagaatcatggtctttaaaaacattttcatgggttgattgcattttcaagctctaaaggattgaaagataaatcttcacgttaaaggtgagagtgaagtatctgctcttgggttacagaaccagatagtactagaactaagattacagggtaaagctgcttttatcttttttctttttctttttcttttttttttgacatggggtctcactgtattgcccaggctggaatgcagtggcatgatctcagctcacggcagcctctgcctcttgggctcaagcgattctcctgcttcagctttccaagtatttgggaccacaggcgcacaccacaggcctggctaatgtttttgttttgtttttggtagagacggggtttcaccatgttgccaggctggtctcgaactcctgagctcaagtgattcacccaccttggcctcacaaagtgtcaggcttacaggcgtgagccactgcgcccggctcacagggtaaggcttctgtctggtgtgttgtattacggattttgcttaataggcacagtgaggcattaaaaagaaaattcagtatgcctgtagaaaggataatccttgtttaaagtctccaaattgcagtcaaagatgttttgactgtgcctttttttgttcccctgctgtcccttatgtagacttctgtcagtacccatggcagcctgtcatcttgttgacatctccttctggactgtgagctctgtatctggcttgtttttcatccccagcttctagttcacaattaggtagaaccctattactctttgaagaaggaacaagaaaatgtgggccagttttcatttgccattcttccatgtgagttagtatggttcgtaagtattcctggtgatacgctagtattggcaattctgtgaggttgaacaaaggggtggtatggtgtgctagcgtgggaattaggagacctctgggtcttgacagtgccctggccactaagcaaaggcagttcatccttggagtctcaatgtgcttttttgttaattgagatatgcttgaagtatcagccctaaatagtctgattctgtgacctacaaacccttacttaattcagtgttactataaatgattcttcccttaaacctactttttacttagcaaaagagaaaaaaaaaaaaaggaaacgctcatgtcaggctgcctgggtttgaaccccagatcccctcttagttggaggcaagttgtatgatgcttcagcttttggttcctgcctcctaaggttgttaggagttactgtgtgtagctgcttagaacattgcctgggtctcagtaagccgcttaagtgactgctctcattttcgctgtaaagcaccatactgtaataacatcccatgaagcatggggcggggaagagtatatggtaccttatggactttgatgtggtggggtagtaggtaaattctgaatatgtaagctacatagtattctttttgtaactaaaggataaaagttttaagatgggcatgtaatatggctagcactggattttaatgatgagccagagtaataaggctggcaaggggagtttttgttttgtaataaatctcttacacctgcacatccagttctttttaaaaacacgtttgaagaggctccatatttctcagtgaagctgttggggttcatgttatttttgaaaatcatcttgcaatttatttcagcatcagactgaaccacccaaagaaaattagtctatttctgaacagttttttcagaaaccatattggtctgatcacccaacatttatagaaataggcgcttaaggcctagaggcatttcagaaaggagaatgagaaatactgtggtcaagagtagtgttcagatggagaacatcaagcatctgctctgcccttccacacacatcctcatttcatcttcacaactgccctaggtaaccttgttatctgtaatgaaacagcctcaaggagcacagaggcactcactcctcacgtttggtctgttgccatttccggcttggttggaatagggtaggagccttttggcagggagcacattctcagtaatgcagagtgcactcacctgggttctagcttcaacacttaggatttgcttgatattttgtattctctgaggcactgcctgtatttgtttctgctatcacagtccagagtcaagcttcatttataaagactgggcagggcatggtggctcactcctgtaattccagcactttgggaggctgaggtgggtggatcactttaggtcaggagttcaagaccagcctggccaacatggtgaaaccccatctctactaaaaaatacaaaaaggccgggcacggtggctcacacctgtaatcccaacactttgggaggccaaggtgggcagaacacctgaggtcaggagttcaagaccatcctggcgaacatagtgaaacctcgcctctactaaaaatacaaaaattagccaggtgtggtggtgcatgcctgtaatcccagctacttgggaggctgaggcaggagaattgcttaaacctgggaggtggagattgtggtgagctgagatcgtgccactgcactccagcctgggagatagaacgagactccatctcaaaaaagaacaaaaacaattagccgagcgaggtggtgcacgcctgtaatcccagctactcatgaggctgaggcaggagaatcacttgaacccaggaggaggaggttgtagtgagtcaaggttgcaccactgcactccagcctgggtgacagagtgagactgtctcaaaaaataagtacataaataataagtaaaagctactaacaattaaaaaataaataaataaagacaagactgtctggaaaatggctctcctaaaaggaccagttgccatcatccacagtggaagattcaaagcagttggtccttggtacgtatgagaagcggatttcattcccttgaattctacagagcagtttattagagtgaatgcattttaaggccttgcatttgatatgtcatccagttcataatcaagttgcctttttctggctaaaacataatgattatgtatttttctcatttggtcctacaagctgctggccctttgtccctccactgtgggaatcagatctagagcaggctgagcctgcagacacagcagtggccaaaaggtcactctaagtgttttgtcttgactccttacttgaagtccacccagctagcacacatctggtttatactgaagccccctgcctagaaatactcatttcaggaaccaccagtaagcatctgtgaccacacaggctttttgactgatggcttcccggatctggtttcaagggataaccccgtctgtgtgcatctatggtcttctctctacagcgaggactttgcagtgctgcttgtggtccacacaaggggctcagagctgagtctgaactgcttcatggtcaccagctcctgtcccttccagtcttgagaggcttttttctccagatggaacctttccttcccgccgttttctcggtctctggctgtttttctcttgtgcccgtctaattggacacctcctggcttccatctctgtggttctcctgcctcacttcctgttctgttgtttttccgttttgtcaaaatatctcctatgttcttggcttccttttcgtcgccaggttttcagctttcctttagctcttcttctaatatggcttctgcccacaaaagcctgctctgtcaggatctcatggttctccacttgccagaaccttcttcagcctcagttcctcggcctcaacttgtacgtttaacccattgaccaccaccccccaaattcaccttcatttctttgaccctgctcctcactccttttctgttgaggaatctgttgactaactccaggctcactcaggctcaccgtcctgctctctgcaccagcctttccagagcgtgccagttctcatggcttcatctgttaactgttgatcgcttcagtcctgatttttagacctaaatggtttccttaacgccattctaactgcctgtgactcattttcacttacagtgtttattgtaacgccaaaccaacaaatcacaggtgcttgcttctctccataaatctccccagtctaactttttgtcattcaacatgactcgtttatccaacctgaaatcgcatatagccccaagtatggtgttttgtacacaggtatttaataagtgacttccagttttggctctgctatgaataaaaagagatttcagttctcttcactttgaaatctaacaactcagagaacattgaagaaattggaatttagttgggatgaaatacttgtggtttaaaatatttctgttcatattttctaatttgttgccggaggtcttgggttttctatttgagtgcttgcaaactcaatgtgatttctgtcagcatatcttaggtttgtttgttatgaaacttatgcagtgtgaggttctatctgaaaatgttatttagctatcttctgggactatttaatgaaagtggggtcatgaatccttaaaattcttgtgcagctttgagaaacatttctgttatttgggtatcagtttgtaagtgtggtaaagccaagatggaaacgagcactttgctttcttggttgttgttactggtctaacctcctgcttgaactagtctgctgtcctgtcaaatgcatctttttatttacatgtcccttaaattaaagctgatcatgaaagta

SEQ ID NO: 82 - DNA, 9608 bp, Homo sapiens
ggcctgctctccccacctctccgcgctgagcagccacgtcggcggcggtccctggtccagggaggggcgtggcaaaggcccgtgcgcggtacgtgtcccgcccctcgctgcccggagcccggatgaagagtaacgccattaccgccggagccgccgagagccttagccgacggaaactggacactggaccggcagcgccatgagactcctcccccgcttgctgctgcttctcttactcgtgttccctgccactgtcttgttccgaggcggccccagaggcttgttagcagtggcacaagatcttacagaggatgaagaaacagtagaagattccataattgaggatgaagatgatgaagccgaggtagaagaagatgaacccacagatttggtagaagataaagaggaagaagatgtgtctggtgaacctgaagcttcaccgagtgcagatacaactatactgtttgtaaaaggagaagattttccagcaaataacattgtgaagttcctggtaggctttaccaacaagggtacagaagattttattgttgaatccttagatgcctcattccgttatcctcaggactaccagttttatatccagaatttcacagctcttcctctgaacactgtagtgccaccccagagacaggcaacttttgagtactctttcattcctgcagagcccatgggcggacgaccatttggtttggtcatcaatctgaactacaaagatttgaacggcaatgtattccaagatgcagtcttcaatcaaacagttacagttattgaaagagaggatgggttagatggagaaacataaagcttcaccaagaaggttgcccaggaaacgggcacagaagagatcagtgggatctgatgagtaaatgttcctttgtgcaacaattcggtctttacttaacctgccctaatatttttcggcctgatgggaattagtgcagagaagccatgtcaccatagaaggcaactcctacttgtgtgtggactgagcaatcagagtctgtggcgataatattgctgaaaatgcactgcattcatttttctaaagtaacaaatttggtttttttttaaaccattaaaatctatgtgtgtgcgtgtgtatgtatgtgagcagttggtcttaccagaatcattgttgaactacctgaaacaagtctttagaatactaaatataatgctgttgtctcttcctttttgacattttctgatttttttcccccaaaactcagttaatatttacccactatgattattgatgtcctgccttgaacagttttaaagaaaacaatttttggaatagctcaaatttcaattgatggcacaaatcagcattttgttgttgttactgtattacaattagtattctaaaggcagaagcagaagtagctgctttttagcaatagaattgtttcagtattttgctgctgtttaatgcgcatcttcagaaaacttcccagtggcttcaaggaatttggggatctctctggcaacaaattgtgaaacatgaaatttctgctgactttaatatatgaaacctaatcctacccccttttttaacaaaaagaaactagtacatttgtgaaaattgtgttgtgttgtccattgttgctctagttctgacccagaggtagctctggagtgattttagacctactcactcagttgtgtgtaggtttttttgttttgttttgagagagaatttttctctccttaatagaagcatcctttttaaagagaagttgccttggtccacacactaagcagaaaaccaagttatcaggacagagatatttcccagttactcctaatcaatgaagaaagtgagttggatatttttaaagcagttaactaattttttcttacctaatcttttgggagttttgcttgttgatataacctttttagttaacctgaaagattccaaaaattgttcttaagtgcttgagactggaaccaaaattaaattgtacttcataaaatcctcttatagagttactcttgccctagattgtaaattaagtttggcattattgtcagactggatggagggtgaagtaaaatagtatgaacaattaagaggctctccccctcttgtctttaagccatattctcctacatgtattttataagaaaatgttaagtcaaattttagtggctctttaattcctgacctcttcattctccttttcagtataacctcccctatgctcatgcccacacagacaaaaaaacaaaacgaaatacacacagaaaaaagtctttccaaactgtttaagtatttaaacatctgagccaaagcagatagaagttattgtataattgttaatcactttgcaaataggggctatcaaattacctatattggcattgctggattataaactctatatctgtaatataaagtgtttgagtttttaattgggctgttatgatcagtagttgattttgagaaagctctatgagctctaagtaactgcatggttttttgtttaatgtaatataggagacccttcacattcccaaggaatatattccaaaacatttttgtgaatatctaagtttgtgaaactactagggcatgatacagtaaggtgtaattacagaatttacgaaatgtaaatggcctctacagagttttatggaatacctggtactaacgtaggcagctgcaaaaccacactgagttacagctgtcagccctcctcattcctaaataacttgccttacatatcagccctcccacttctgaagttcaaattagtgcctcggaaatgtagaatttattatttgtcatttttttttttttagcatagattgagaacagttgaactcttaaatcctcagatgccaggggtctgctctagcatcagtaagtatttagcagaaactaactccgtaatgaatggaattcaattccacacatggtttgttcaagcacacttaataagtagcctattttttaaatgtctttttaaaatgtaaatatttggatgaagtttttctttgttttgatatattcatttgctacaccaactatgttttcagaattcatcttttgaacaacttggtttcagaatatgtaaaatgactttaaggatcttgtgtatcaaacctatccccggatgtgtgagaataatgtgttcataaagcatggatctcgctttggttgtatagcttcctcatttacttcatggtcttacatagctggtgactttcagggctaatctgccctctaaagcattgtcccaggagaggaaaaggaaatgggacctcagaagtagaagcctcagggaaggagtaaagtagaaatcagaagaaaagaagcttcacttgatagtaataaggtttttaacttcaagtaccttcagaaaatgtgattttgataagaggaaagggcaaatttagaccttaaaaaatatggaagaactactgccttaaaagtgcatttgtagcacatcagcctagaactgtatcatggctgtgctggggagaagtaaatggtggtaatgtaacattgccacctttacttaatgatgtgttattttcgaggtacagtagatcaatatagtaataggcgagcctcatatatagcattcatcttgtacaatgatatccatacccttgatatgaaggaaaattgacttggtttgtgcatttgaatactgaaataattttttaaaactcagtgacacataccatctcttgccaagactagaccctgtattttagttcctaaattagatgtttaaatttaaaaacattttcagatgtacttaagtacttccatagtacttttttttttttttttttttttgccccctgagacggagtctctgtgtcacccaggctggagtgcagtggtgcgatctcggctcactgcaacttctgcctcttgggttcaagcagttctccctgtctcagcctcctgagtagcttggattacaggcgcccgtcaccgcacctgcctaatttttgcatttttagtagagacggggtttcgtcatttggccaggctggtcttgaactcctgaccacaggtgatacgcctgccttggcctcccaaagtgtgctgggattacaggcgtgagccactgtgcccggcccactgttcactttttgaatggcatcattttatagctgtagaactaaaatcaatgtttgccccaattttcttaagtaaaactctactttgagctcttacctccaacttagtaaaaagcagcttcacacacaaacaagattcttactggtggaatgttaggtttcgttgttaagttaatctgtctataagctcatccttagaggatatttgaggaggaagaacaccttgcagctgacttgcaaacatctaaataatttatttcgggtgcttatgaatgttactaatggattttgtatgaatttttatcccttttcatttatacaaaaacctgggcttttatgttaattatatcatctgaggttctaaggttttttttttagattttgaaatttagggataatagctcttaggtttgggtaccactttgctgcagtttaagaaagggggaagggaactcatttattaaacatcaatcacgtgctgtgttctgtttgttttctagtcatcatatcacacacctttacgacagctcactgaaggaaggtgatactgttcccattttgtagatggaatagacaaaacctgaatttaagtagcttgctcaaggttccatattgaatatggaaagttcaaatcatctcagtaatgaatataccatatatacttgctgtattgtatctatgataattcagttacccacaatacccttttaaatttctgttaatgacatacctttaaatgtctccttgatgaacagaatcatggtctttaaaaacattttcatgggttgattgcattttcaagctctaaaggattgaaagataaatcttcacgttaaaggtgagagtgaagtatctgctcttgggttacagaaccagatagtactagaactaagattacagggtaaagctgcttttatcttttttctttttctttttcttttttttttgacatggggtctcactgtattgcccaggctggaatgcagtggcatgatctcagctcacggcagcctctgcctcttgggctcaagcgattctcctgcttcagctttccaagtatttgggaccacaggcgcacaccacaggcctggctaatgtttttgttttgtttttggtagagacggggtttcaccatgttgccaggctggtctcgaactcctgagctcaagtgattcacccaccttggcctcacaaagtgtcaggcttacaggcgtgagccactgcgcccggctcacagggtaaggcttctgtctggtgtgttgtattacggattttgcttaataggcacagtgaggcattaaaaagaaaattcagtatgcctgtagaaaggataatccttgtttaaagtctccaaattgcagtcaaagatgttttgactgtgcctttttttgttcccctgctgtcccttatgtagacttctgtcagtacccatggcagcctgtcatcttgttgacatctccttctggactgtgagctctgtatctggcttgtttttcatccccagcttctagttcacaattaggtagaaccctattactctttgaagaaggaacaagaaaatgtgggccagttttcatttgccattcttccatgtgagttagtatggttcgtaagtattcctggtgatacgctagtattggcaattctgtgaggttgaacaaaggggtggtatggtgtgctagcgtgggaattaggagacctctgggtcttgacagtgccctggccactaagcaaaggcagttcatccttggagtctcaatgtgcttttttgttaattgagatatgcttgaagtatcagccctaaatagtctgattctgtgacctacaaacccttacttaattcagtgttactataaatgattcttcccttaaacctactttttacttagcaaaagagaaaaaaaaaaaaaggaaacgctcatgtcaggctgcctgggtttgaaccccagatcccctcttagttggaggcaagttgtatgatgcttcagcttttggttcctgcctcctaaggttgttaggagttactgtgtgtagctgcttagaacattgcctgggtctcagtaagccgcttaagtgactgctctcattttcgctgtaaagcaccatactgtaataacatcccatgaagcatggggcggggaagagtatatggtaccttatggactttgatgtggtggggtagtaggtaaattctgaatatgtaagctacatagtattctttttgtaactaaaggataaaagttttaagatgggcatgtaatatggctagcactggattttaatgatgagccagagtaataaggctggcaaggggagtttttgttttgtaataaatctcttacacctgcacatccagttctttttaaaaacacgtttgaagaggctccatatttctcagtgaagctgttggggttcatgttatttttgaaaatcatcttgcaatttatttcagcatcagactgaaccacccaaagaaaattagtctatttctgaacagttttttcagaaaccatattggtctgatcacccaacatttatagaaataggcgcttaaggcctagaggcatttcagaaaggagaatgagaaatactgtggtcaagagtagtgttcagatggagaacatcaagcatctgctctgcccttccacacacatcctcatttcatcttcacaactgccctaggtaaccttgttatctgtaatgaaacagcctcaaggagcacagaggcactcactcctcacgtttggtctgttgccatttccggcttggttggaatagggtaggagccttttggcagggagcacattctcagtaatgcagagtgcactcacctgggttctagcttcaacacttaggatttgcttgatattttgtattctctgaggcactgcctgtatttgtttctgctatcacagtccagagtcaagcttcatttataaagactgggcagggcatggtggctcactcctgtaattccagcactttgggaggctgaggtgggtggatcactttaggtcaggagttcaagaccagcctggccaacatggtgaaaccccatctctactaaaaaatacaaaaaggccgggcacggtggctcacacctgtaatcccaacactttgggaggccaaggtgggcagaacacctgaggtcaggagttcaagaccatcctggcgaacatagtgaaacctcgcctctactaaaaatacaaaaattagccaggtgtggtggtgcatgcctgtaatcccagctacttgggaggctgaggcaggagaattgcttaaacctgggaggtggagattgtggtgagctgagatcgtgccactgcactccagcctgggagatagaacgagactccatctcaaaaaagaacaaaaacaattagccgagcgaggtggtgcacgcctgtaatcccagctactcatgaggctgaggcaggagaatcacttgaacccaggaggaggaggttgtagtgagtcaaggttgcaccactgcactccagcctgggtgacagagtgagactgtctcaaaaaataagtacataaataataagtaaaagctactaacaattaaaaaataaataaataaagacaagactgtctggaaaatggctctcctaaaaggaccagttgccatcatccacagtggaagattcaaagcagttggtccttggtacgtatgagaagcggatttcattcccttgaattctacagagcagtttattagagtgaatgcattttaaggccttgcatttgatatgtcatccagttcataatcaagttgcctttttctggctaaaacataatgattatgtatttttctcatttggtcctacaagctgctggccctttgtccctccactgtgggaatcagatctagagcaggctgagcctgcagacacagcagtggccaaaaggtcactctaagtgttttgtcttgactccttacttgaagtccacccagctagcacacatctggtttatactgaagccccctgcctagaaatactcatttcaggaaccaccagtaagcatctgtgaccacacaggctttttgactgatggcttcccggatctggtttcaagggataaccccgtctgtgtgcatctatggtcttctctctacagcgaggactttgcagtgctgcttgtggtccacacaaggggctcagagctgagtctgaactgcttcatggtcaccagctcctgtcccttccagtcttgagaggcttttttctccagatggaacctttccttcccgccgttttctcggtctctggctgtttttctcttgtgcccgtctaattggacacctcctggcttccatctctgtggttctcctgcctcacttcctgttctgttgtttttccgttttgtcaaaatatctcctatgttcttggcttccttttcgtcgccaggttttcagctttcctttagctcttcttctaatatggcttctgcccacaaaagcctgctctgtcaggatctcatggttctccacttgccagaaccttcttcagcctcagttcctcggcctcaacttgtacgtttaacccattgaccaccaccccccaaattcaccttcatttctttgaccctgctcctcactccttttctgttgaggaatctgttgactaactccaggctcactcaggctcaccgtcctgctctctgcaccagcctttccagagcgtgccagttctcatggcttcatctgttaactgttgatcgcttcagtcctgatttttagacctaaatggtttccttaacgccattctaactgcctgtgactcattttcacttacagtgtttattgtaacgccaaaccaacaaatcacaggtgcttgcttctctccataaatctccccagtctaactttttgtcattcaacatgactcgtttatccaacctgaaatcgcatatagccccaagtatggtgttttgtacacaggtatttaataagtgacttccagttttggctctgctatgaataaaaagagatttcagttctcttcactttgaaatctaacaactcagagaacattgaagaaattggaatttagttgggatgaaatacttgtggtttaaaatatttctgttcatattttctaatttgttgccggaggtcttgggttttctatttgagtgcttgcaaactcaatgtgatttctgtcagcatatcttaggtttgtttgttatgaaacttatgcagtgtgaggttctatctgaaaatgttatttagctatcttctgggactatttaatgaaagtggggtcatgaatccttaaaattcttgtgcagctttgagaaacatttctgttatttgggtatcagtttgtaagtgtggtaaagccaagatggaaacgagcactttgctttcttggttgttgttactggtctaacctcctgcttgaactagtctgctgtcctgtcaaatgcatctttttatttacatgtcccttaaattaaagctgatcatgaaagta

SEQ ID NO: 83 - DNA, 935 bp, Homo sapiens
ggcctgctctccccacctctccgcgctgagcagccacgtcggcggcggtccctggtccagggaggggcgtggcaaaggcccgtgcgcggtacgtgtcccgcccctcgctgcccggagcccggatgaagagtaacgccattaccgccggagccgccgagagccttagccgacggaaactggacactggaccggcagcgccatgagactcctcccccgcttgctgctgcttctcttactcgtgttccctgccactgtcttgttccgaggcggccccagaggcttgttagcagtggcacaagatcttacagaggatgaagaaacagtagaagattccataattgaggatgaagatgatgaagccgaggtagaagaagatgaacccacagatttggtagaagataaagaggaagaagatgtgtctggtgaacctgaagcttcaccgagtgcagatacaactatactgtttgtaaaaggagaagattttccagcaaataacattgtgaagttcctggtaggctttaccaacaagggtacagaagattttattgttgaatccttagatgcctcattccgttatcctcaggactaccagttttatatccagaatttcacagctcttcctctgaacactgtagtgccaccccagagacaggcaacttttgagtactctttcattcctgcagagcccatgggcggacgaccatttggtttggtcatcaatctgaactacaaagatttgaacgtaagatcctctaaaccttctttttgtttaagttagagatggatgggggcggtgacgttgtttaatagaatatatctgttcattcagttgcctgttttgtggttgaacctgtgatagccaccagggaagcaaagataaattgcacgtttcttcttcaagtctaatccagtgggggaggcatatgaaaacaggc

SEQ ID NO: 84 - DNA, 629 bp, Homo sapiens
ggcctgctctccccacctctccgcgctgagcagccacgtcggcggcggtccctggtccagggaggggcgtggcaaaggcccgtgcgcggtacgtgtcccgcccctcgctgcccggagcccggatgaagagtaacgccattaccgccggagccgccgagagccttagccgacggaaactggacactggaccggcagcgccatgagactcctcccccgcttgctgctgcttctcttactcgtgttccctgccactgtcttgttccgaggcggccccagaggcttgttagcagtggcacaagatcttacagaggatgaagaaacagtagaagattccataattgaggatgaagatgatgaagccgaggtagaagaagatgaacccacagatttggtagaagataaagaggaagaagatgtgtctggtgaacctgaagcttcaccgagtgcagatacaactatactgtttgtaaaaggagaaggtaatacagaagtattagttttaattcagatgtaggcattttaaaacgatgagcttgttcatatatatctgaatacccatatctgtaaagtaatattgttggcatttaaagggaatacgtaggtgatatagacacaataaaaaataaacc

SEQ ID NO: 85 - DNA, 3194 bp, Homo sapiens
caagcccagcagccccggggcggatggctccggccgcctggctccgcagcgcggccgcgcgcgccctcctgcccccgatgctgctgctgctgctccagccgccgccgctgctggcccgggctctgccgccggacgtccaccacctccatgccgagaggagggggccacagccctggcatgcagccctgcccagtagcccggcacctgcccctgccacgcaggaagccccccggcctgccagcagcctcaggcctccccgctgtggcgtgcccgacccatctgatgggctgagtgcccgcaaccgacagaagaggttcgtgctttctggcgggcgctgggagaagacggacctcacctacaggatccttcggttcccatggcagttggtgcaggagcaggtgcggcagacgatggcagaggccctaaaggtatggagcgatgtgacgccactcacctttactgaggtgcacgagggccgtgctgacatcatgatcgacttcgccaggtactggcatggggacgacctgccgtttgatgggcctgggggcatcctggcccatgccttcttccccaagactcaccgagaaggggatgtccacttcgactatgatgagacctggactatcggggatgaccagggcacagacctgctgcaggtggcagcccatgaatttggccacgtgctggggctgcagcacacaacagcagccaaggccctgatgtccgccttctacacctttcgctacccactgagtctcagcccagatgactgcaggggcgttcaacacctatatggccagccctggcccactgtcacctccaggaccccagccctgggcccccaggctgggatagacaccaatgagattgcaccgctggagccagacgccccgccagatgcctgtgaggcctcctttgacgcggtctccaccatccgaggcgagctctttttcttcaaagcgggctttgtgtggcgcctccgtgggggccagctgcagcccggctacccagcattggcctctcgccactggcagggactgcccagccctgtggacgctgccttcgaggatgcccagggccacatttggttcttccaaggtgctcagtactgggtgtacgacggtgaaaagccagtcctgggccccgcacccctcaccgagctgggcctggtgaggttcccggtccatgctgccttggtctggggtcccgagaagaacaagatctacttcttccgaggcagggactactggcgtttccaccccagcacccggcgtgtagacagtcccgtgccccgcagggccactgactggagaggggtgccctctgagatcgacgctgccttccaggatgctgatggtgcgttgggggtgaggcagctggtgggaggtgggcacagcagccgcttctcccacctggtggtggctgggctcccacatgcctgccacaggaagtctggctcttcatcacaggtcctttgtccagagccatctgccctcctctcggtggccggctagtgctacattccatattgcagatgaggaaactgagggtcagagaagtgcaaggtcttaccctggtttttcagccacagccagtagaacaataaactgctgtacactgagggccaacaatgctctaagctccttactggtctcatccagttctcagaacagccctctgatgtgacacctgttgtgaacccagtttccagaggagcaaacagaggctcaggcaatgaggcccctaacctggactaccctggtggtccctgctcctaaccactgacccacccagcctcccacaaccacagggggctagagccagtccagtgctccctcccctgctaggctcctcttctgtgctctttctcccacatcaggacccactgggagagctatcctagggtagcctccagctccaggactccagggtgcccgtcaatagcctggctaatttaatagatgcaggagagagtgatgtggagggtggtgggggcaacgggacttgctttcctgagaggtgggactcaggcctctgaggctctgggtacctgtcaggctgggtattagcccagcccagattccggggcaggcagaagggctccctagagggaagagaggttctgaaaggccggccctggatcctgcaggactcgaggaactcagcagtggccaagggcttcccactcagccctcccttagtgcccatccctgggcacagcctgacaggcaggagtagggcccagtgtccactcgcccaggcttgaccaccttctcttctcaggctatgcctacttcctgcgcggccgcctctactggaagtttgaccctgtgaaggtgaaggctctggaaggcttcccccgtctcgtgggtcctgacttctttggctgtgccgagcctgccaacactttcctctgaccatggcttggatgccctcaggggtgctgacccctgccaggccacgaatatcaggctagagacccatggccatctttgtggctgtgggcaccaggcatgggactgagcccatgtctcctcagggggatggggtggggtacaaccaccatgacaactgccgggagggccacgcaggtcgtggtcacctgccagcgactgtctcagactgggcagggaggctttggcatgacttaagaggaagggcagtcttgggcccgctatgcaggtcctggcaaacctggctgccctgtctccatccctgtccctcagggtagcaccatggcaggactgggggaactggagtgtccttgctgtatccctgttgtgaggttccttccaggggctggcactgaagcaagggtgctggggccccatggccttcagccctggctgagcaactgggctgtagggcagggccacttcctgaggtcaggtcttggtaggtgcctgcatctgtctgccttctggctgacaatcctggaaatctgttctccagaatccaggccaaaaagttcacagtcaaatggggaggggtattcttcatgcaggagaccccaggccctggaggctgcaacatacctcaatcctgtcccaggccggatcctcctgaagcccttttcgcagcactgctatcctccaaagccattgtaaatgtgtgtacagtgtgtataaaccttcttcttcttttttttttttaaactgaggattgtcattaaacacagttgttttctacctgcc

SEQ ID NO: 86 - DNA, 2705 bp, Homo sapiens
caagcccagcagccccggggcggatggctccggccgcctggctccgcagcgcggccgcgcgcgccctcctgcccccgatgctgctgctgctgctccagccgccgccgctgctggcccgggctctgccgccggacgtccaccacctccatgccgagaggagggggccacagccctggcatgcagccctgcccagtagcccggcacctgcccctgccacgcaggaagccccccggcctgccagcagcctcaggcctccccgctgtggcgtgcccgacccatctgatgggctgagtgcccgcaaccgacagaagaggttcgtgctttctggcgggcgctgggagaagacggacctcacctacaggatccttcggttcccatggcagttggtgcaggagcaggtgcggcagacgatggcagaggccctaaaggtatggagcgatgtgacgccactcacctttactgaggtgcacgagggccgtgctgacatcatgatcgacttcgccaggtactggcatggggacgacctgccgtttgatgggcctgggggcatcctggcccatgccttcttccccaagactcaccgagaaggggatgtccacttcgactatgatgagacctggactatcggggatgaccagggcacagacctgctgcaggtggcagcccatgaatttggccacgtgctggggctgcagcacacaacagcagccaaggccctgatgtccgccttctacacctttcgctacccactgagtctcagcccagatgactgcaggggcgttcaacacctatatggccagccctggcccactgtcacctccaggaccccagccctgggcccccaggctgggatagacaccaatgagattgcaccgctggagccagacgccccgccagatgcctgtgaggcctcctttgacgcggtctccaccatccgaggcgagctctttttcttcaaagcgggctttgtgtggcgcctccgtgggggccagctgcagcccggctacccagcattggcctctcgccactggcagggactgcccagccctgtggacgctgccttcgaggatgcccagggccacatttggttcttccaagagctgggatttccatcctcaactggcagagatgagagcctggagcattgcagatgccagggacttcacaaatgaaggcacagcatgggaaacctgcgtgggttccagggcagtccagcctgcaggggcccagggagtggtcagtaggcatttgtcacagccaaatgccagtggaaggagcagccgcccaggcagccctctactgatgagagtaacctcacccgtgcactagtttacagagcattcactgccccagcttatcccaggcctcccgcttccctctgcgggtggggtgctgagcaggcattattggcctgcatgttttactgatgaggaaactgaggctgggagagtctgtggtaggggtcaagcaggtccacagtggcggggcatggcagtggtggctgggcaggtccttgcagccttccctctccggcaggtgctcagtactgggtgtacgacggtgaaaagccagtcctgggccccgcacccctcaccgagctgggcctggtgaggttcccggtccatgctgccttggtctggggtcccgagaagaacaagatctacttcttccgaggcagggactactggcgtttccaccccagcacccggcgtgtagacagtcccgtgccccgcagggccactgactggagaggggtgccctctgagatcgacgctgccttccaggatgctgatggctatgcctacttcctgcgcggccgcctctactggaagtttgaccctgtgaaggtgaaggctctggaaggcttcccccgtctcgtgggtcctgacttctttggctgtgccgagcctgccaacactttcctctgaccatggcttggatgccctcaggggtgctgacccctgccaggccacgaatatcaggctagagacccatggccatctttgtggctgtgggcaccaggcatgggactgagcccatgtctcctcagggggatggggtggggtacaaccaccatgacaactgccgggagggccacgcaggtcgtggtcacctgccagcgactgtctcagactgggcagggaggctttggcatgacttaagaggaagggcagtcttgggcccgctatgcaggtcctggcaaacctggctgccctgtctccatccctgtccctcagggtagcaccatggcaggactgggggaactggagtgtccttgctgtatccctgttgtgaggttccttccaggggctggcactgaagcaagggtgctggggccccatggccttcagccctggctgagcaactgggctgtagggcagggccacttcctgaggtcaggtcttggtaggtgcctgcatctgtctgccttctggctgacaatcctggaaatctgttctccagaatccaggccaaaaagttcacagtcaaatggggaggggtattcttcatgcaggagaccccaggccctggaggctgcaacatacctcaatcctgtcccaggccggatcctcctgaagcccttttcgcagcactgctatcctccaaagccattgtaaatgtgtgtacagtgtgtataaaccttcttcttcttttttttttttaaactgaggattgtcattaaacacagttgttttctacctgcc

SEQ ID NO: 87 - DNA, 3332 bp, Homo sapiens
caagcccagcagccccggggcggatggctccggccgcctggctccgcagcgcggccgcgcgcgccctcctgcccccgatgctgctgctgctgctccagccgccgccgctgctggcccgggctctgccgccggacgtccaccacctccatgccgagaggagggggccacagccctggcatgcagccctgcccagtagcccggcacctgcccctgccacgcaggaagccccccggcctgccagcagcctcaggcctccccgctgtggcgtgcccgacccatctgatgggctgagtgcccgcaaccgacagaagaggttcgtgctttctggcgggcgctgggagaagacggacctcacctacaggatccttcggttcccatggcagttggtgcaggagcaggtgcggcagacgatggcagaggccctaaaggtatggagcgatgtgacgccactcacctttactgaggtgcacgagggccgtgctgacatcatgatcgacttcgccaggtactggcatggggacgacctgccgtttgatgggcctgggggcatcctggcccatgccttcttccccaagactcaccgagaaggggatgtccacttcgactatgatgagacctggactatcggggatgaccagggcacagacctgctgcaggtggcagcccatgaatttggccacgtgctggggctgcagcacacaacagcagccaaggccctgatgtccgccttctacacctttcgctacccactgagtctcagcccagatgactgcaggggcgttcaacacctatatggccagccctggcccactgtcacctccaggaccccagccctgggcccccaggctgggatagacaccaatgagattgcaccgctggagccagacgccccgccagatgcctgtgaggcctcctttgacgcggtctccaccatccgaggcgagctctttttcttcaaagcgggctttgtgtggcgcctccgtgggggccagctgcagcccggctacccagcattggcctctcgccactggcagggactgcccagccctgtggacgctgccttcgaggatgcccagggccacatttggttcttccaagagctgggatttccatcctcaactggcagagatgagagcctggagcattgcagatgccagggacttcacaaatgaaggcacagcatgggaaacctgcgtgggttccagggcagtccagcctgcaggggcccagggagtggtgctcagtactgggtgtacgacggtgaaaagccagtcctgggccccgcacccctcaccgagctgggcctggtgaggttcccggtccatgctgccttggtctggggtcccgagaagaacaagatctacttcttccgaggcagggactactggcgtttccaccccagcacccggcgtgtagacagtcccgtgccccgcagggccactgactggagaggggtgccctctgagatcgacgctgccttccaggatgctgatggtgcgttgggggtgaggcagctggtgggaggtgggcacagcagccgcttctcccacctggtggtggctgggctcccacatgcctgccacaggaagtctggctcttcatcacaggtcctttgtccagagccatctgccctcctctcggtggccggctagtgctacattccatattgcagatgaggaaactgagggtcagagaagtgcaaggtcttaccctggtttttcagccacagccagtagaacaataaactgctgtacactgagggccaacaatgctctaagctccttactggtctcatccagttctcagaacagccctctgatgtgacacctgttgtgaacccagtttccagaggagcaaacagaggctcaggcaatgaggcccctaacctggactaccctggtggtccctgctcctaaccactgacccacccagcctcccacaaccacagggggctagagccagtccagtgctccctcccctgctaggctcctcttctgtgctctttctcccacatcaggacccactgggagagctatcctagggtagcctccagctccaggactccagggtgcccgtcaatagcctggctaatttaatagatgcaggagagagtgatgtggagggtggtgggggcaacgggacttgctttcctgagaggtgggactcaggcctctgaggctctgggtacctgtcaggctgggtattagcccagcccagattccggggcaggcagaagggctccctagagggaagagaggttctgaaaggccggccctggatcctgcaggactcgaggaactcagcagtggccaagggcttcccactcagccctcccttagtgcccatccctgggcacagcctgacaggcaggagtagggcccagtgtccactcgcccaggcttgaccaccttctcttctcaggctatgcctacttcctgcgcggccgcctctactggaagtttgaccctgtgaaggtgaaggctctggaaggcttcccccgtctcgtgggtcctgacttctttggctgtgccgagcctgccaacactttcctctgaccatggcttggatgccctcaggggtgctgacccctgccaggccacgaatatcaggctagagacccatggccatctttgtggctgtgggcaccaggcatgggactgagcccatgtctcctcagggggatggggtggggtacaaccaccatgacaactgccgggagggccacgcaggtcgtggtcacctgccagcgactgtctcagactgggcagggaggctttggcatgacttaagaggaagggcagtcttgggcccgctatgcaggtcctggcaaacctggctgccctgtctccatccctgtccctcagggtagcaccatggcaggactgggggaactggagtgtccttgctgtatccctgttgtgaggttccttccaggggctggcactgaagcaagggtgctggggccccatggccttcagccctggctgagcaactgggctgtagggcagggccacttcctgaggtcaggtcttggtaggtgcctgcatctgtctgccttctggctgacaatcctggaaatctgttctccagaatccaggccaaaaagttcacagtcaaatggggaggggtattcttcatgcaggagaccccaggccctggaggctgcaacatacctcaatcctgtcccaggccggatcctcctgaagcccttttcgcagcactgctatcctccaaagccattgtaaatgtgtgtacagtgtgtataaaccttcttcttcttttttttttttaaactgaggattgtcattaaacacagttgttttctacctgcc

SEQ ID NO: 88 - DNA, 3052 bp, Homo sapiens
caagcccagcagccccggggcggatggctccggccgcctggctccgcagcgcggccgcgcgcgccctcctgcccccgatgctgctgctgctgctccagccgccgccgctgctggcccgggctctgccgccggacgtccaccacctccatgccgagaggagggggccacagccctggcatgcagccctgcccagtagcccggcacctgcccctgccacgcaggaagccccccggcctgccagcagcctcaggcctccccgctgtggcgtgcccgacccatctgatgggctgagtgcccgcaaccgacagaagaggttcgtgctttctggcgggcgctgggagaagacggacctcacctacaggatccttcggttcccatggcagttggtgcaggagcaggtgcggcagacgatggcagaggccctaaaggtatggagcgatgtgacgccactcacctttactgaggtgcacgagggccgtgctgacatcatgatcgacttcgccaggtactggcatggggacgacctgccgtttgatgggcctgggggcatcctggcccatgccttcttccccaagactcaccgagaaggggatgtccacttcgactatgatgagacctggactatcggggatgaccagggcacagacctgctgcaggtggcagcccatgaatttggccacgtgctggggctgcagcacacaacagcagccaaggccctgatgtccgccttctacacctttcgctacccactgagtctcagcccagatgactgcaggggcgttcaacacctatatggccagccctggcccactgtcacctccaggaccccagccctgggcccccaggctgggatagacaccaatgagattgcaccgctggagccagacgccccgccagatgcctgtgaggcctcctttgacgcggtctccaccatccgaggcgagctctttttcttcaaagcgggctttgtgtggcgcctccgtgggggccagctgcagcccggctacccagcattggcctctcgccactggcagggactgcccagccctgtggacgctgccttcgaggatgcccagggccacatttggttcttccaagggactactggcgtttccaccccagcacccggcgtgtagacagtcccgtgccccgcagggccactgactggagaggggtgccctctgagatcgacgctgccttccaggatgctgatggtgcgttgggggtgaggcagctggtgggaggtgggcacagcagccgcttctcccacctggtggtggctgggctcccacatgcctgccacaggaagtctggctcttcatcacaggtcctttgtccagagccatctgccctcctctcggtggccggctagtgctacattccatattgcagatgaggaaactgagggtcagagaagtgcaaggtcttaccctggtttttcagccacagccagtagaacaataaactgctgtacactgagggccaacaatgctctaagctccttactggtctcatccagttctcagaacagccctctgatgtgacacctgttgtgaacccagtttccagaggagcaaacagaggctcaggcaatgaggcccctaacctggactaccctggtggtccctgctcctaaccactgacccacccagcctcccacaaccacagggggctagagccagtccagtgctccctcccctgctaggctcctcttctgtgctctttctcccacatcaggacccactgggagagctatcctagggtagcctccagctccaggactccagggtgcccgtcaatagcctggctaatttaatagatgcaggagagagtgatgtggagggtggtgggggcaacgggacttgctttcctgagaggtgggactcaggcctctgaggctctgggtacctgtcaggctgggtattagcccagcccagattccggggcaggcagaagggctccctagagggaagagaggttctgaaaggccggccctggatcctgcaggactcgaggaactcagcagtggccaagggcttcccactcagccctcccttagtgcccatccctgggcacagcctgacaggcaggagtagggcccagtgtccactcgcccaggcttgaccaccttctcttctcaggctatgcctacttcctgcgcggccgcctctactggaagtttgaccctgtgaaggtgaaggctctggaaggcttcccccgtctcgtgggtcctgacttctttggctgtgccgagcctgccaacactttcctctgaccatggcttggatgccctcaggggtgctgacccctgccaggccacgaatatcaggctagagacccatggccatctttgtggctgtgggcaccaggcatgggactgagcccatgtctcctcagggggatggggtggggtacaaccaccatgacaactgccgggagggccacgcaggtcgtggtcacctgccagcgactgtctcagactgggcagggaggctttggcatgacttaagaggaagggcagtcttgggcccgctatgcaggtcctggcaaacctggctgccctgtctccatccctgtccctcagggtagcaccatggcaggactgggggaactggagtgtccttgctgtatccctgttgtgaggttccttccaggggctggcactgaagcaagggtgctggggccccatggccttcagccctggctgagcaactgggctgtagggcagggccacttcctgaggtcaggtcttggtaggtgcctgcatctgtctgccttctggctgacaatcctggaaatctgttctccagaatccaggccaaaaagttcacagtcaaatggggaggggtattcttcatgcaggagaccccaggccctggaggctgcaacatacctcaatcctgtcccaggccggatcctcctgaagcccttttcgcagcactgctatcctccaaagccattgtaaatgtgtgtacagtgtgtataaaccttcttcttcttttttttttttaaactgaggattgtcattaaacacagttgttttctacctgcc

SEQ ID NO: 89 - DNA, 203 bp, Artificial
  Synthetic oligonucleotide
tctgctggctgcgcggtggcggcggctgtgtgtgcgccgcgccttgccgccccccctggccccccgagcccggggcgcgcgctcccgcccgggccgtccgggccccgcggcgccgcggcccgaggccccgggaagcgcagccatggctctgcggaggctgggggccgcgctgctgctgctgccgctgctcgccgccgtggaag

SEQ ID NO: 90 - DNA, 229 bp, Artificial
  Synthetic oligonucleotide
agagacaggatctcactatgttgtccaggctggtcttgaactcgtggccacaaatgatcctcccacctcagcctcccaaagtgttggaattataggcatgaaccaccatgcccaggaggagaatttttgataataatattttgtggacatctttgcatatcatgtcagagctataacatcattgtggagaagctcttaggatcccatagaataaatgtaccgtaattta

SEQ ID NO: 91 - DNA, 336 bp, Artificial
  Synthetic oligonucleotide
ccatcccctccgcgccccaggctgtgatttccagtgtcaatgagacctccctcatgctggagtggacccctccccgcgactccggaggccgagaggacctcgtctacaacatcatctgcaagagctgtggctcgggccggggtgcctgcacccgctgcggggacaatgtacagtacgcaccacgccagctaggcctgaccgagccacgcatttacatcagtgacctgctggcccacacccagtacaccttcgagatccaggctgtgaacggcgttactgaccagagccccttctcgcctcagttcgcctctgtgaacatcaccaccaaccaggcag

SEQ ID NO: 92 - DNA, 125 bp, Artificial
  Synthetic oligonucleotide
ctccatcggcagtgtccatcatgcatcaggtgagccgcaccgtggacagcattaccctgtcgtggtcccagccagaccagcccaatggcgtgatcctggactatgagctgcagtactatgagaag

SEQ ID NO: 93 - DNA, 1305 bp, Artificial
  Synthetic oligonucleotide
gtacctattggctgggtgctgtccccatcacccacctccctgagggcccctctcccaggctgaggcctgggagttctgccccaccgcaagatgagacgcactggtgcagcagaaagagcactggccttggagtcaggctgcctggctcccaatccagctccgctccttcccactgtgagacctcaggcaggtgccttgacctctctggatctcacttttctggtctggaggatacacccagcaatctcagtgaaatgcaacagtcacatccctttccctaccacgaccctttcatcttgacctcagtggcttgatgttgggaaaaactgggtttccaaaaagctgcacttatgaagtgataattagtcactcacctcttcttcgacagagatttgaaacagctcaagagagcttccgcctgccctgctctgagtcctgctaaaacacccactttcactcgcctgcatgccctttgcatggggagaggtgatttcactttgagcttttaaatcagaccttaattactccctttgggtggaagcccctgggatggtagaaggatcactggactaagagtgagaagccgtaggttcaaatcccagctccgtccttcaccagctatgtgaccttgggcaggcgtctttctccctctgaacctcagtttccacctgtgtcgagtgtgggtgagacccctcgcggggagctatgcaggttacggagaaaaggcagcacagcacccagaatgggacctggccctcagcagaggccatgtgtgtccctggccttcctcctctgccctgcctgctgcacagtgggcaatggtgacaggatgggaggccaagtggatgtggggtctgcacagtacaggggccaggaggtagacagcacaattgcccacccacatggctggacatcagaggccccaggaagcctctcctttgaatgatcacttctcttacctgctccaggaggcaacaaacagccacagaggctgcaagggcacctgggaaaggcatcgcggggcttccattcagactaggtgtcaatgactgacagggaggcctttggttgagggcaagcccacggggaactgcagatggatggaagggctctccctgaaggctgagaggaagagtgcagtcaattgcagccagtcctgctggagcccaactttctagagcccagcccggccttcccactctgttaactgctggatcggctaaccaggccggtctccagggcctttcaaacacttacccagcctttgccggccgtcttaccattgcttgcgtgcgtgttcatccc

SEQ ID NO: 94 - DNA, 404 bp, Artificial
  Synthetic oligonucleotide
tgggaagaggtgagtggctacgatgagaacatgaacacgatccgcacgtaccaggtgtgcaacgtgtttgagtcaagccagaacaactggctacggaccaagtttatccggcgccgtggcgcccaccgcatccacgtggagatgaagttttcggtgcgtgactgcagcagcatccccagcgtgcctggctcctgcaaggagaccttcaacctctattactatgaggctgactttgactcggccaccaagaccttccccaactggatggagaatccatgggtgaaggtggataccattgcagccgacgagagcttctcccaggtggacctgggtggccgcgtcatgaaaatcaacaccgaggtgcggagcttcggacctgtgtcccgcagcggcttctacctggc

SEQ ID NO: 95 - DNA, 184 bp, Artificial
  Synthetic oligonucleotide
cttccaggactatggcggctgcatgtccctcatcgccgtgcgtgtcttctaccgcaagtgcccccgcatcatccagaatggcgccatcttccaggaaaccctgtcgggggctgagagcacatcgctggtggctgcccggggcagctgcatcgccaatgcggaagaggtggatgtacccatcaag

SEQ ID NO: 96 - DNA, 97 bp, Artificial
  Synthetic oligonucleotide
ctctactgtaacggggacggcgagtggctggtgcccatcgggcgctgcatgtgcaaagcaggcttcgaggccgttgagaatggcaccgtctgccgag

SEQ ID NO: 97 - DNA, 91 bp, Artificial
  Synthetic oligonucleotide
gttgtccatctgggactttcaaggccaaccaaggggatgaggcctgtacccactgtcccatcaacagccggaccacttctgaaggggccac

SEQ ID NO: 98 - DNA, 65 bp, Artificial
  Synthetic oligonucleotide
caactgtgtctgccgcaatggctactacagagcagacctggaccccctggacatgccctgcacaa

SEQ ID NO: 99 - DNA, 65 bp, Artificial
  Synthetic oligonucleotide
aaacgctaatggactccactacagcgactgctgagctgggctggatggtgcatcctccatcaggg

SEQ ID NO: 100 - DNA, 255 bp, Artificial
  Synthetic oligonucleotide
atggcccagatgtccccaccatttccccctcaaaggccaattaccgtccaggggaaaatctgaacctctcctgccacgcagcctctaacccacctgcacagtactcttggtttatcaatgggacgttccagcaatccacacaagagctctttatccccaacatcactgtgaataatagcggatcctatatgtgccaagcccataactcagccactggcctcaataggaccacagtcacgatgatcacagtctctg

SEQ ID NO: 101 - DNA, 1896 bp, Artificial
  Synthetic oligonucleotide
gtaagtggatccatgaagcactagcatcacattttcaggtggagtctggctctcagagaagagccaggaagaaattttctttcccaacctgtgtccaaggggcacacgcaaatcccaaattctcccctgaaccctcccaattcacctctgcagactcttttccccttgtttttttgttttttgttgttttttgttttttgatttctcatgtctgactttgggtccatcctggaatgagaggagggggctccctcagcactgagccctgtgtagtgaaaggggcttcacagagaaaaaaggaggaagggtcctcagggtcaagttcctgctctctgtcaccaacaattccctttctgtcacttctttgtgttcttttacctactccataagctacaagggacaaggaggttttgaaatgagctcacactttttccttaaatgagaagaggaagccccttgggtgatggaggagcagctcagactctgcccccatctctgctcccagcacccccagtgactgactgaccccaccctgaagccacctaaggtggaaccagggcatatggagaaggtgcccaggtgtctgtcctgaatcaggctaaatcaagatgctaatcaacaccaaagcctcccctggatcaggccgcaggaaaatgggaagacatggagcctcatgacagactgctgagctgtgtcctggctctgaagtcactggctgtataagactgtgggcacagcacatgggacacagcacagaggacagcaagtgacgcacacttggagacatagggagattcagccatggggactctgcatggcagggaaggggcagtgccaaaaagtgtgtatttatagagaggataagactaccagccactatgtatctaatataggacttaccttttcaacccttccacgtgtgcaggtccgtagtattaaacacattcccgttgttctgctaccatcaccaccacccacccacagaactctcttcttcctcccaaaatgaaactctgttcccatcaaactcctgggcagagctgcccacctgtgacccacagcctgacccctgaactcacctctagacttgcttctggtctcccgctcaaacccccatccccatcatcacccatctccaggatgtccttaaatagcaaagcctcagaaaaaacacaccttggctgggtggtgtgggactgtgcagctgaaagaaacagcacctgcatgttccaggtgagtaccccaaaagaccaggcagtcagccagtcagggaagaaacaggagaggtgccagaggctgtggctgtcagtcctgtatctgcccaagactcaatgcttctgccctattcacatttgagaaagtctgtacttctcccacacaaagcaggtggcctcgatctccgagccctcagatcgttgtgcatccgtcttctgacacacacacctgccctgggctcttaaggacttgggtggactgaggggtgggagatgccaactctgactgaacgatgcctgcagaggaatcaaaggtgccacacacggcaatcttctctctgttttctgcacagcggagctgcccaagccctcggtcaccagcaacaactccaaccctgtagagttttctacatataagtttaagttatctgtgaacagagataattttacttctttccgatttggatgtctgtttatttgtttgtttgctgcctaatttctccagctaggacttaaaatactatgttgaagagaagtggggcaagcaggcatccttgtcttgctcctggtcttacagggaaagctttcagtctttctccattgagtatccctctattatgttgaggtggtttccttccattcacagagtgtttttatttataaaagaatgttgaattttgtc

SEQ ID NO: 102 - DNA, 1410 bp, Artificial
  Synthetic oligonucleotide
attggaccagaccctgaattcttctagctcctccaatcccattttatcccatggaaccactaaaaacaaggtctgctctgctcctgaagccctatatgctggagatggacaactcaatgaaaatttaaagggaaaaccctcaggcctgaggtgtgtgccactcagagacttcacctaactagagacaggcaaactgcaaaccatggtgagaaattgacgacttcacactatggacagcttttcccaagatgtcaaaacaagactcctcatcatgataaggctcttacccccttttaatttgtccttgcttatgcctgcctctttcgcttggcaggatgatgctgtcattagtatttcacaagaagtagcttcagagggtaacttaacagagtatcagatctatcttgtcaatcccaacgttttacataaaataagagatcctttagtgcacccagtgactgacattagcagcatctttaacacagccgtgtgttcaaatgtacagtggtccttttcagagttggacttctagactcacctgttctcactccctgttttaattcaacccagccatgcaatgccaaataatagaattgctccctaccagctgaacagggaggagtctgtgcagtttctgacacttgttgttgaacatggctaaatacaatgggtatcgctgagactaagttgtagaaattaacaaatgtgctgcttggttaaaatggctacactcatctgactcattctttattctattttagttggtttgtatcttgcctaaggtgcgtagtccaactcttggtattaccctcctaatagtcatactagtagtcatactccctggtgtagtgtattctctaaaagctttaaatgtctgcatgcagccagccatcaaatagtgaatggtctctctttggctggaattacaaaactcagagaaatgtgtcatcaggagaacatcataacccatgaaggataaaagccccaaatggtggtaactgataatagcactaatgctttaagatttggtcacactctcacctaggtgagcgcattgagccagtggtgctaaatgctacatactccaactgaaatgttaaggaagaagatagatccaattaaaaaaaattaaaaccaatttaaaaaaaaaaagaacacaggagattccagtctacttgagttagcataatacagaagtcccctctactttaacttttacaaaaaagtaacctgaactaatctgatgttaaccaatgtatttatttctgtggttctgtttccttgttccaatttgacaaaacccactgttcttgtattgtattgcccagggggagctatcactgtacttgtagagtggtgctgctttaattcataaatcacaaataaaagccaattagctctataactaaa

SEQ ID NO: 103 - DNA, 214 bp, Artificial
  Synthetic oligonucleotide
tgaccctgggaaatgcttctatccctgagaggaggctcagcacagaaggaggaaggacagcagggccaacagtcacagcagccctgaccagagcattcctggagctcaagctcctctacaaagaggtggacagagaagacagcagagaccatgggacccccctcagcccctccctgcagattgcatgtcccctggaaggaggtcctgctcacag

SEQ ID NO: 104 - DNA, 360 bp, Artificial
  Synthetic oligonucleotide
cctcacttctaaccttctggaacccacccaccactgccaagctcactattgaatccacgccgttcaatgtcgcagaggggaaggaggttcttctactcgcccacaacctgccccagaatcgtattggttacagctggtacaaaggcgaaagagtggatggcaacagtctaattgtaggatatgtaataggaactcaacaagctaccccagggcccgcatacagtggtcgagagacaatataccccaatgcatccctgctgatccagaacgtcacccagaatgacacaggattctataccctacaagtcataaagtcagatcttgtgaatgaagaagcaaccggacagttccatgtatacc

SEQ ID NO: 105 - DNA, 836 bp, Artificial
  Synthetic oligonucleotide
gtgagtatttccacatgacctctgggtgttgggggtcagttctacttcccacatacgggattgtcaggcctgggttgtgcctgtggccctctctgcattacatcctgtatcagggtttggacatttagtgcaggacacacacgggggagacaaacttccacagatcagaattcctttcctggatccagaccctgcagacactcgctgcagaggaaggacagtctgatggggggactcagcagggcgaggtcagtgtcagacaagcaccccatggtctccccatggacctgaccctgagaaagaccctggagaactggatcagggcctggcctgaggggtccccctagggacccctcagagagaagctcaactcttccctgaactgagcccctgtacaaagccctgtccctggttcctgattccaggtgatcctggggagtctgtgccagggctgtgtggtggcctcttgggcagggctggctgggagcaaggatgtgagctatccaagggccatgactcctggagttggtcaccagccaggtccgagcacccagagcctcatctagctgaggatagggcctcctccttcacttgaggctcagcatggaaaggacagatggaaaaaattactagtgcatgagcccactgccctgggggacacaggttactccctgggaagttcagagtccccaaggggaggaacagagaagagaggatgctcctggcagctccatgtccaccagggatcaggcccagggccctctgtcttggaagcaaataatcatagataactgttcacttgggcagctcctctgtgcagagctgagatcaagtaa

SEQ ID NO: 106 - DNA, 279 bp, Artificial
  Synthetic oligonucleotide
cggagctgcccaagccctccatctccagcaacaactccaaccccgtggaggacaaggatgctgtggccttcacctgtgaacctgaggttcagaacacaacctacctgtggtgggtaaatggtcagagcctcccggtcagtcccaggctgcagctgtccaatggcaacatgaccctcactctactcagcgtcaaaaggaacgatgcaggatcctatgaatgtgaaatacagaacccagcgagtgccaaccgcagtgacccagtcaccctgaatgtcctct

SEQ ID NO: 107 - DNA, 113 bp, Artificial
  Synthetic oligonucleotide
tgctcctgtcctctcagctgtggccaccgtcggcatcacgattggagtgctggccagggtggctctgatatagcagccctggtgtattttcgatatttcaggaagactggcag

SEQ ID NO: 108 - DNA, 573 bp, Artificial
  Synthetic oligonucleotide
ttatgctcccgcggaggccaagcggactccctgacaggacagaatctgaacgtgagagtgaaggtcttgcctgtccagaaactcttgtagccagcacaggtttaaacaagaagccaaattgttctggagagattgctgggggctttctttgtgcctcaagcttcttcagtgccctgagcacaggaaacactcaagcagagaagcagagccaaacccaggatacgggaggtcgaggctcttccgtagacctgcagcattggggtgggatgatgttcattctgtgtgtgttctggaccaagcccctctccagggacctatgggcagccccctttaagcaagatgcccggtggagtgggcatccaccatcacttaccctgggcttgggtgaatagattttccgtgccttaaatgggcagggagggggtaaacatggacggtccattggtacaaataaaagcctttggtgggttttgatcaattgcaaggatcgaaggagacctgtggacctgaggtcaactggcagcagagaagagtctgggttcgtgaaggcgccgccgcggtgccgcgccacgt

SEQ ID NO: 109 - DNA, 387 bp, Artificial
  Synthetic oligonucleotide
gtaagccttccctcttgcttccccactccctgctgggctgagacgctcccaggagatcccgcccctgccacgcatcccagtgcatccctgcttggggtgccagtagcgggaagggcagaagttctgcctgacctggtctgtcatcacaacaagcctgtatcaaatttgaggcacccctcccacgccgcccaagtctcgcgcattctcctcccgagttgtaccagctatacttaagggcagtttaaaaataaaacaaacaaacaaaaacaacaaaactaaaaaaacgaagaactgaacggcggtttaaaaaaaaatagatacacgattattgttaaagatgctagcactggagctgcgcagagcgttggaagtggtgtttggtggagg

SEQ ID NO: 110 - DNA, 249 bp, Artificial
  Synthetic oligonucleotide
atttgcataaaaaaggccaagaaaactctggctgtgccccagcaacggctcattctgctcccccgggtcggagccccccggagctgcgcgcgggcttgcagcgcctcgcccgcgctgtcctcccggtgtcccgcttctccgcgccccagccgccggctgccagcttttcggggccccgagtcgcacccagcgaagagagcgggcccgggacaagctcgaactccggccgcctcgcccttccccggctcc

SEQ ID NO: 111 - DNA, 10 bp, Artificial
  Synthetic oligonucleotide
gtgctggagc

SEQ ID NO: 112 - DNA, 35 bp, Artificial
  Synthetic oligonucleotide
aggccggcgcttggatcccgctggtcatgaagcag

SEQ ID NO: 113 - DNA, 21 bp, Artificial
  Synthetic oligonucleotide
tgccacccggacaccaagaag

SEQ ID NO: 114 - DNA, 92 bp, Artificial
  Synthetic oligonucleotide
ttcctgtgctcgctcttcgcccccgtctgcctcgatgacctagacgagaccatccagccatgccactcgctctgcgtgcaggtgaaggaccg

SEQ ID NO: 115 - DNA, 60 bp, Artificial
  Synthetic oligonucleotide
ctgcgccccggtcatgtccgccttcggcttcccctggcccgacatgcttgagtgcgaccg

SEQ ID NO: 116 - DNA, 71 bp, Artificial
  Synthetic oligonucleotide
tttcccccaggacaacgacctttgcatccccctcgctagcagcgaccacctcctgccagccaccgaggaag

SEQ ID NO: 117 - DNA, 70 bp, Artificial
  Synthetic oligonucleotide
gctccctctgccccctcggggtcgcgcgcccacgatgctgcagggccctggctcgctgctgctgctcttc

SEQ ID NO: 118 - DNA, 11 bp, Artificial
  Synthetic oligonucleotide
ctcgcctcgca

SEQ ID NO: 119 - DNA, 24 bp, Artificial
  Synthetic oligonucleotide
ctgctgcctgggctcggcgcgcgg

SEQ ID NO: 120 - DNA, 7 bp, Artificial
  Synthetic oligonucleotide
gctcttc

SEQ ID NO: 121 - DNA, 80 bp, Artificial
  Synthetic oligonucleotide
ctctttggccagcccgacttctcctacaagcgcagcaattgcaagcccatcccggccaacctgcagctgtgccacggcat

SEQ ID NO: 122 - DNA, 55 bp, Artificial
  Synthetic oligonucleotide
cgaataccagaacatgcggctgcccaacctgctgggccacgagaccatgaaggag

SEQ ID NO: 123 - DNA, 248 bp, Artificial
  Synthetic oligonucleotide
gccccccaaagatggcggacaaggtggtcccacggcaggtggcccggctgggccgcactgtgcggctgcagtgcccagtggagggggacccgccgccgctgaccatgtggaccaaggatggccgcaccatccacagcggctggagccgcttccgcgtgctgccgcaggggctgaaggtgaagcaggtggagcgggaggatgccggcgtgtacgtgtgcaaggccaccaacggcttcggcagcctgagc

SEQ ID NO: 124 - DNA, 285 bp, Artificial
  Synthetic oligonucleotide
cacgaccgcgcttcacacagccctccaagatgaggcgccgggtgatcgcacggcccgtgggtagctccgtgcggctcaagtgcgtggccagcgggcaccctcggcccgacatcacgtggatgaaggacgaccaggccttgacgcgcccagaggccgctgagcccaggaagaagaagtggacactgagcctgaagaacctgcggccggaggacagcggcaaatacacctgccgcgtgtcgaaccgcgcgggcgccatcaacgccacctacaaggtggatgtgatcc

SEQ ID NO: 125 - DNA, 265 bp, Artificial
  Synthetic oligonucleotide
gtgcgcagcgacgtgaagccggtgatccagtggctgaagcgcgtggagtacggcgccgagggccgccacaactccaccatcgatgtgggcggccagaagtttgtggtgctgcccacgggtgacgtgtggtcgcggcccgacggctcctacctcaataagctgctcatcacccgtgcccgccaggacgatgcgggcatgtacatctgccttggcgccaacaccatgggctacagcttccgcagcgccttcctcaccgtgctgccag

SEQ ID NO: 126 - DNA, 240 bp, Artificial
  Synthetic oligonucleotide
gtgcgcggctgccacgccacgccacaccatgctggtgcccggacccgccccctgggcccggcgtcccacccaccgggtggggccccacccttccctcccgggccgtgctggccaggtcatctgccgagggagggcagcccaggggcaccgtctccacagcccctgggatgggtctggggtgctctcctggtctttgtgtcggcgttcccctccctacctcctttcctctcgctcttgcag

SEQ ID NO: 127 - DNA, 900 bp, Artificial
  Synthetic oligonucleotide
acccaaaaccgccagggccacctgtggcctcctcgtcctcggccactagcctgccgtggcccgtggtcatcggcatcccagccggcgctgtcttcatcctgggcaccctgctcctgtggctttgccaggcccagaagaagccgtgcacccccgcgcctgcccctcccctgcctgggcaccgcccgccggggacggcccgcgaccgcagcggagacaaggaccttccctcgttggccgccctcagcgctggccctggtgtggggctgtgtgaggagcatgggtctccggcagccccccagcacttactgggcccaggcccagttgctggccctaagttgtaccccaaactctacacagacatccacacacacacacacacacactctcacacacactcacacgtggagggcaaggtccaccagcacatccactatcagtgctagacggcaccgtatctgcagtgggcacgggggggccggccagacaggcagactgggaggatggaggacggagctgcagacgaaggcaggggacccatggcgaggaggaatggccagcaccccaggcagtctgtgtgtgaggcatagcccctggacacacacacacagacacacacactacctggatgcatgtatgcacacacatgcgcgcacacgtgctccctgaaggcacacgtacgcacacacgcacatgcacagatatgccgcctgggcacacagataagctgcccaaatgcacgcacacgcacagagacatgccagaacatacaaggacatgctgcctgaacatacacacgcacacccatgcgcagatgtgctgcctggacacacacacacacacggatatgctgtctggacgcacacacgtgcagatatggtatccggacacacacgtgcacag

SEQ ID NO: 128 - DNA, 471 bp, Artificial
  Synthetic oligonucleotide
gcagatatgctgcctggacacacacacagataatgctgcctcaacactcacacacgtgcagatattgcctggacacacacatgtgcacagatatgctgtctggacatgcacacacgtgcagatatgctgtccggatacacacgcacgcacacatgcagatatgctgcctgggcacacacttccggacacacatgcacacacaggtgcagatatgctgcctggacacacgcagactgacgtgcttttgggagggtgtgccgtgaagcctgcagtacgtgtgccgtgaggctcatagttgatgagggactttccctgctccaccgtcactcccccaactctgcccgcctctgtccccgcctcagtccccgcctccatccccgcctctgtcccctggccttggcggctatttttgccacctgccttgggtgcccaggagtcccctactgctgtgggctggggttgggggcacag

SEQ ID NO: 129 - DNA, 171 bp, Artificial
  Synthetic oligonucleotide
cagccccaagcctgagaggctggagcccatggctagtggctcatccccactgcattctccccctgacacagagaaggggccttggtatttatatttaagaaatgaagataatattaataatgatggaaggaagactgggttgcagggactgtggtctctcctggggcccgg

SEQ ID NO: 130 - DNA, 174 bp, Artificial
  Synthetic oligonucleotide
gacccgcctggtctttcagccatgctgatgaccacaccccgtccaggccagacaccaccccccaccccactgtcgtggtggccccagatctctgtaattttatgtagagtttgagctgaagccccgtatatttaatttattttgttaaacatgaaagtgcatcctttccctcca

SEQ ID NO: 131 - DNA, 55 bp, Artificial
  Synthetic oligonucleotide
gtccggacaggccgagatgacgccgagccccctgttgctgctcctgctgccgccg

SEQ ID NO: 132 - DNA, 40 bp, Artificial
  Synthetic oligonucleotide
ctgctgctgggggccttcccgccggccgccgccgcccgag

SEQ ID NO: 133 - DNA, 25 bp, Artificial
  Synthetic oligonucleotide
gtcaactacaccctcgtcgtgctgg

SEQ ID NO: 134 - DNA, 51 bp, Artificial
  Synthetic oligonucleotide
atgacattagcccagggaaggagagcctggggcccgacagctcctctgggg

SEQ ID NO: 135 - DNA, 30 bp, Artificial
  Synthetic oligonucleotide
gtcaagaggaccccgccagccagcagtggg

SEQ ID NO: 136 - DNA, 89 bp, Artificial
  Synthetic oligonucleotide
agcggacccgttccaagcccgtgctcacaggcacgcaccccgtgaacacgacggtggacttcggggggaccacgtccttccagtgcaag

SEQ ID NO: 137 - DNA, 78 bp, Artificial
  Synthetic oligonucleotide
atatgctgcctggacacacagataatgctgccttgacacacacatgcacggatattgcctggacacacacacacacac

SEQ ID NO: 138 - DNA, 90 bp, Artificial
  Synthetic oligonucleotide
gcgtgcacagatatgctgtctggacacgcacacacatgcagatatgctgcctggacacacacttccagacacacgtgcacaggcgcagat

SEQ ID NO: 139 - DNA, 46 bp, Artificial
  Synthetic oligonucleotide
atgctgcctggacacacgcagatatgctgtctagtcacacacacac

SEQ ID NO: 140 - DNA, 27 bp, Artificial
  Synthetic oligonucleotide
gcagacatgctgtccggacacacacac

SEQ ID NO: 141 - DNA, 29 bp, Artificial
  Synthetic oligonucleotide
gcatgcacagatatgctgtccggacacac

SEQ ID NO: 142 - DNA, 8 bp, Artificial
  Synthetic oligonucleotide
acacgcac

SEQ ID NO: 143 - DNA, 257 bp, Artificial
  Synthetic oligonucleotide
agtggggagagatgagtgtagataaaaggagtgcagaaggcacgaggaagccacagtgctccggatcctccaatcttcgctcctccaatctccgctcctccacccagttcaggaacccgcgaccgctcgcagcgctctcttgaccactatgagcctcctgtccagccgcgcggcccgtgtccccggtccttcgagctccttgtgcgcgctgttggtgctgctgctgctgctgacgcagccagggcccatcgccagcg

SEQ ID NO: 144 - DNA, 133 bp, Artificial
  Synthetic oligonucleotide
ctggtcctgccgctgctgtgttgagagagctgcgttgcgtttgtttacagaccacgcagggagttcatcccaaaatgatcagtaatctgcaagtgttcgccataggcccacagtgctccaaggtggaagtggt

SEQ ID NO: 145 - DNA, 1786 bp, Artificial
  Synthetic oligonucleotide
tggaaacaaggaaaactgattaagagaaatgagcacgcatggaaaagtttcccagtcttcagcagagaagttttctggaggtctctgaacccagggaagacaagaaggaaagattttgttgttgtttgtttatttgtttttccagtagttagctttcttcctggattcctcactttgaagagtgtgaggaaaacctatgtttgccgcttaagctttcagctcagctaatgaagtgtttagcatagtacctctgctatttgctgttattttatctgctatgctattgaagttttggcaattgactatagtgtgagccaggaatcactggctgttaatctttcaaagtgtcttgaattgtaggtgactattatatttccaagaaatattccttaagatattaactgagaaggctgtggatttaatgtggaaatgatgtttcataagaattctgttgatggaaatacactgttatcttcacttttataagaaataggaaatattttaatgtttcttggggaatatgttagagaatttccttactcttgattgtgggatactatttaattatttcactttagaaagctgagtgtttcacaccttatctatgtagaatatatttccttattcagaatttctaaaagtttaagttctatgagggctaatatcttatcttcctataattttagacattctttatctttttagtatggcaaactgccatcatttacttttaaactttgattttatatgctatttattaagtattttattaggagtaccataattctggtagctaaatatatattttagatagatgaagaagctagaaaacaggcaaattcctgactgctagtttatatagaaatgtattcttttagtttttaaagtaaaggcaaacttaacaatgacttgtactctgaaagttttggaaacgtattcaaacaatttgaatataaatttatcatttagttataaaaatatatagcgacatcctcgaggccctagcatttctccttggataggggaccagagagagcttggaatgttaaaaacaaaacaaaacaaaaaaaaacaaggagaagttgtccaagggatgtcaattttttatccctctgtatgggttagattttccaaaatcataatttgaagaaggccagcatttatggtagaatatataattatatataaggtggccacgctggggcaagttccctccccactcacagctttggcccctttcacagagtagaacctgggttagaggattgcagaagacgagcggcagcggggagggcagggaagatgcctgtcgggtttttagcacagttcatttcactgggattttgaagcatttctgtctgaatgtaaagcctgttctagtcctggtgggacacactggggttgggggtgggggaagatgcggtaatgaaaccggttagtcagtgttgtcttaatatccttgataatgctgtaaagtttatttttacaaatatttctgtttaagctatttcacctttgtttggaaatccttcccttttaaagagaaaatgtgacacttgtgaaaaggcttgtaggaaagctcctccctttttttctttaaacctttaaatgacaaacctaggtaattaatggttgtgaatttctatttttgctttgtttttaatgaacatttgtctttcagaataggattctgtgataatatttaaatggcaaaaacaaaacataattttgtgcaattaacaaagctactgcaagaaaaataaaacatttcttggtaaaaacgtat

SEQ ID NO: 146 - DNA, 153 bp, Artificial
  Synthetic oligonucleotide
atataatatatattatatatttagcattgctgagctttttagatgcctattgtgtatcttttaaaggttttgaccattttgttatgagtaattacatatatattacattcactatattaaaattgtacttttttactatgtgtctcattggtt

SEQ ID NO: 147 - DNA, 110 bp, Artificial
  Synthetic oligonucleotide
gtaagttctgtgctgctgtgtccgctgtgaccttggcaagagagaaatcccgcagcctgggtcttcaaccttggtatctcatgagtgtatcttctttttctttccttcag

SEQ ID NO: 148 - DNA, 84 bp, Artificial
  Synthetic oligonucleotide
agcctccctgaagaacgggaaggaaatttgtcttgatccagaagccccttttctaaagaaagtcatccagaaaattttggacgg

SEQ ID NO: 149 - DNA, 23 bp, Artificial
  Synthetic oligonucleotide
gtatttatatattatatatttat

SEQ ID NO: 150 - DNA, 817 bp, Artificial
  Synthetic oligonucleotide
gtgagttgtaatttccatatacacaggcgactggagccgttggtcagaaatactggcatctgccccctaaaaataaaatcagggaaccccaagagttagctgaaggactagaaattgtgattattattttcacaattaaagttgccattaaggttattaatctgctctggtgccagaggatatttcagtatttcagtgtcttccatttccaggcctaacccctgggagggtaaatgtgggtttctagaatactaagtaaatttgactaacaatgccaaaatgccccctgcctgttttgggacgtttacctcagtccctaatgggcttcagacctgaaaaatgcaatgtctggtttgggcactttgggcctgtaagccttcttggtgaagagcagaaactttgcagtaacaccttcagtgagttcaaggctaggatccctgtcaacattatttaatctctttgagctttagcaaaatagggtagataatggtagttatttcatagggttgtgtgcagcttaagggagatcatgaatggacatttctaacccaatgtgacaatcagtgaccaatatgttttggctttttcaaaccaagaatctagttgagtccacagccacttctttcttgaaaaaaaaaaaaaaaaagcattcaggagtgcaagttttctgctatagaaggcagtgggtacagacagaccttccctgagtggagggctgggagagagtctgcatggggacatccctccaagcaacttcagagtgacagaagagcagccttccttagcacctgcaacagtaacccttttctcatcacag

SEQ ID NO: 151 - DNA, 160 bp, Artificial
  Synthetic oligonucleotide
ggggagcaccaactgacaggagagaagtaagaagcttatcagcgtatcattgacacttcctgcagggtggtccctgcccttaccagagctgaaaatgaaaaagagaacagcagctttctagggacagctggaaaggacttaatgtgtttgactatttctt

SEQ ID NO: 152 - DNA, 176 bp, Artificial
  Synthetic oligonucleotide
ttatttatgtatttatttttgaaagcttgtattttaatattttacatgctgttatttaaagatgtgagtgtgtttcatcaaacatagctcagtcctgattatttaattggaatatgatgggttttaaatgtgtcattaaactaatatttagtgggagaccataatgtgtcagccac

SEQ ID NO: 153 - DNA, 336 bp, Artificial
  Synthetic oligonucleotide
agggtggggaactggagggtggggggattgaaatgcaagcaattagtggatcactgttagggtaagggaatgtatgtacacatctattttttatactttttttttaaaaaaagaatgtcagttgttatttattcaaattatctcacattatgtgttcaacatttttatgctgaagtttcccttagacattttatgtcttgcttgtagggcataatgccttgtttaatgtccattctgcagcgtttctctttcccttggaaaagagaatttatcattactgttacatttgtacaaatgacatgataataaaagttttatgaaaaaaaaggcttatgt

SEQ ID NO: 154 - DNA, 222 bp, Artificial
  Synthetic oligonucleotide
tcgccttccttcgggactccggatcgatctggagctccgggaatttccctggcccggccgctccgggctttccagtctcaaccatgcataaaaagggttcgccgatcttggggagccacacagcccgggtcgcaggcacctccccgccagctctcccgcttctcgcacagcttcccgacgcgtctgctgagccccatggcccacgccacgctctccgccgcc

SEQ ID NO: 155 - DNA, 20 bp, Artificial
  Synthetic oligonucleotide
gagcgtccgtggtcactgaa

SEQ ID NO: 156 - DNA, 63 bp, Artificial
  Synthetic oligonucleotide
ctgcgctgccagtgcttgcagacactgcagggaattcacctcaagaacatccaaagtgtgaat

SEQ ID NO: 157 - DNA, 21 bp, Artificial
  Synthetic oligonucleotide
gtaaggtcccccggaccccac

SEQ ID NO: 158 - DNA, 20 bp, Artificial
  Synthetic oligonucleotide
tgcgcccaaaccgaagtcat

SEQ ID NO: 159 - DNA, 32 bp, Artificial
  Synthetic oligonucleotide
gtaagtcccgccccgcgcttccgctgccaccg

SEQ ID NO: 160 - DNA, 48 bp, Artificial
  Synthetic oligonucleotide
ctggggtccccgactctcccgctgccccaaccctgtccccagcccgac

SEQ ID NO: 161 - DNA, 33 bp, Artificial
  Synthetic oligonucleotide
ctcctgtctcacggaattcccttctctctgcag

SEQ ID NO: 162 - DNA, 84 bp, Artificial
  Synthetic oligonucleotide
agccacactcaagaatgggaagaaagcttgtctcaaccccgcatcccccatggttcagaaaatcatcgaaaagatactgaacaa

SEQ ID NO: 163 - DNA, 13 bp, Artificial
  Synthetic oligonucleotide
acgagggttctac

SEQ ID NO: 164 - DNA, 13 bp, Artificial
  Synthetic oligonucleotide
cttgataaatgac

SEQ ID NO: 165 - DNA, 48 bp, Artificial
  Synthetic oligonucleotide
cccagcaatccccggctcctgcgggtggcgctgctgctcctgctcctg

SEQ ID NO: 166 - DNA, 25 bp, Artificial
  Synthetic oligonucleotide
gtggccgccagccggcgcgcagcag

SEQ ID NO: 167 - DNA, 98 bp, Artificial
  Synthetic oligonucleotide
gtgggtcccggcgccctggggtccccgggccggacgcggctggggtgggcgccccgcgccgacagccccgctcaatcagcgagtctattcttccctag

SEQ ID NO: 168 - DNA, 139 bp, Artificial
  Synthetic oligonucleotide
gtgcgtctccatggcgacccgccggtgctataagtagggagcggcgtgccgtggggctttgtcagtccctcctgtagccgccgccgccgccgcccgccgcccctctgccagcagctccggcgccacctcgggccggcgt

SEQ ID NO: 169 - DNA, 135 bp, Artificial
  Synthetic oligonucleotide
gttggttttgcggattgccactgatgattccaaagcagtctgtcgtctcagtgtgaaattcggtgccacgctcagaaccagcaggctccttttggaacgggcgaaagagctaaatatcgatgttgttggtgtcag

SEQ ID NO: 170 - DNA, 163 bp, Artificial
  Synthetic oligonucleotide
atcaccggcgtaatcaacccagcgttggacaaatactttccgtcagactctggagtgagaatcatagctgagcccggcagatactatgttgcatcagctttcacgcttgcagttaatatcattgccaagaaaattgtattaaaggaacagacgggctctgatg

SEQ ID NO: 171 - DNA, 215 bp, Artificial
  Synthetic oligonucleotide
agacctaaaccagatgagaagtattattcatccagcatatggggaccaacatgtgatggcctcgatcggattgttgagcgctgtgacctgcctgaaatgcatgtgggtgattggatgctctttgaaaacatgggcgcttacactgttgctgctgcctctacgttcaatggcttccagaggccgacgatctactatgtgatgtcagggcctgcgtg

SEQ ID NO: 172 - DNA, 173 bp, Artificial
  Synthetic oligonucleotide
gatgccagcaccctgcctgtgtcttgtgcctgggagagtgggatgaaacgccacagagcagcctgtgcttcggctagtattaatgtgtagatagcactctggtagctgttaactgcaagtttagcttgaattaagggatttggggggaccatgtaacttaattactgctagtt

SEQ ID NO: 173 - DNA, 1096 bp, Artificial
  Synthetic oligonucleotide
ttgaatatttgttttatatggatttttattcactcttcagacacgctactcaagagtgcccctcagctgctgaacaagcatttgtagcttgtacaatggcagaatgggccaaaagcttagtgttgtgacctgtttttaaaataaagtatcttgaaataattaggcattgggacgtttttatggtgtgttcattccagacagttcacgaatcccgtatagctcgctctgattctcagagaacaatgagtgggtccacccacacacaggtaggaggacaggtgagacggaagccccatcctcccatgtggacggtgcacatctgctcagcccaccccacatgtccagagttggctgcaaactccttgtccagagcctctggtggtgggacctacttaagtctgacggacctgtcctgtccaggccagtgcccagggaaggtgtgggaggccctttgagcctggcctgcagagaccatccgtgtcccctcccaccttcatgcctgtgagaagttaggaatgtatacggtaccacatttggcagtcagcttattttaataaattcagcaacagcaagtccctaccatgttgtgtatcttcaccatcttgtctgaccatgaccactggccttgtgtgttcttttactcaacgtgtacccccgctctcccccaaagtgtggcaggctctcatgctccttaacccccattgtggcaatgtcttacgggtaacgctggagctgcaggaggagggaaggacacgtcagagccaccaggcagtgggagcatcttggagtccccaccagcctcatgagggggacaggaagagagcaaatgtgtagggaggaaggctgtggctcctcccggggtgggaaggtcaagccgatgctgtcacccatttaccaaagctgaagagagtgacttcctttctcaaaagcatcaccttcccctgaaccctgagtccagagaagccaggagccctcatgtggctgccgagttagctcagggcttggcttatcaccaactctggtctccctgggccagggttgccaaaacatgaaagattttttcaggagccagaggttggttctgactggaggggga

SEQ ID NO: 174 - DNA, 117 bp, Artificial
  Synthetic oligonucleotide
gacgtcggcccgccggcgccccaccagctccgcgcgggcccgggttggccaccgccgggcccccgcccctcccccggcggtgtcccggccggaaccgatcgtggctggtttgagctg

SEQ ID NO: 175 - DNA, 110 bp, Artificial
  Synthetic oligonucleotide
attgtcactgctgttccaagggcacacgcagagggatttggaattcctggagagttgcctttgtgagaagctggaaatatttctttcaattccatctcttagttttccat

SEQ ID NO: 176 - DNA, 92 bp, Artificial
  Synthetic oligonucleotide
aggaacatcaagaaatcatgaacaactttggtaatgaagagtttgactgccacttcctcgatgaaggttttactgccaaggacattctggac

SEQ ID NO: 177 - DNA, 27 bp, Artificial
  Synthetic oligonucleotide
cagaaaattaatgaagtttcttcttct

SEQ ID NO: 178 - DNA, 72 bp, Artificial
  Synthetic oligonucleotide
ctccggcgggcgggagccaggcgctgacgggcgcggcgggggcggccgagcgctcctgcggctgcgactcag

SEQ ID NO: 179 - DNA, 82 bp, Artificial
  Synthetic oligonucleotide
cttccatgtaggaagcggctgtaccgatcctgagaccttcgtgcaggcaatctctgatgcccgctgtgtttttgacatgggg

SEQ ID NO: 180 - DNA, 56 bp, Artificial
  Synthetic oligonucleotide
gctccggcgtctgcgcttccccatggggctggcctgcggcgcctgggcgctctgag

SEQ ID NO: 181 - DNA, 84 bp, Artificial
  Synthetic oligonucleotide
gctgaggttggtttcagcatgtatctgcttgatattggcggtggctttcctggatctgaggatgtgaaacttaaatttgaagag

SEQ ID NO: 182 - DNA, 113 bp, Artificial
  Synthetic oligonucleotide
acgaagatgagtcgagtgagcagacctttatgtattatgtgaatgatggcgtctatggatcatttaattgcatactctatgaccacgcacatgtaaagccccttctgcaaaag

SEQ ID NO: 183 - DNA, 55 bp, Artificial
  Synthetic oligonucleotide
gcaactcatgcagcaattccagaaccccgacttcccacccgaagtagaggaacag

SEQ ID NO: 184 - DNA, 94 bp, Artificial
  Synthetic oligonucleotide
ttgaaatgtctttgtaagagtagggtcgccatgatgcagccatatggaagactaggatatgggtcacacttatctgtgttcctatggaaactat

SEQ ID NO: 185 - DNA, 271 bp, Artificial
  Synthetic oligonucleotide
gcggccgcagagcactttgcccggagcccagcgtcctcccctgagttcgctgagtctcccgggaccagcaaaggctgcgcgccccgcatcggcccggaggcggggagccctgggaggcctggccgagctgcccgcagggaaatggcggagaaagcgcttctctgcccgagttcagccgggctggggacttggccctgggtcctgaactcggcatggccagttctgcctctggctgtggaccagggtgtggactggagaccgcgggggccag

SEQ ID NO: 186 - DNA, 172 bp, Artificial
  Synthetic oligonucleotide
gggatcgacattgagaccaagatgcacgtccgcttccttaacatggaaaccatggccctctgccactgacccaccgccacctccgcggagaaactgcactttgcaatggggccgcctccccgcgtagctggagcagcccaggcccggcggacagcctcttcctgcagcgccg

SEQ ID NO: 187 - DNA, 77 bp, Artificial
  Synthetic oligonucleotide
gagaacttcaacaatgtcccggacctggagctcaaccccatccgatccaaaattgttcgtgccttcttcgacaacag

SEQ ID NO: 188 - DNA, 115 bp, Artificial
  Synthetic oligonucleotide
gaacctgcgcaagggacccagtggcctggctgatgagatcaatttcgaggacttcctgaccatcatgtcctacttccggcccatcgacaccaccatggacgaggaacaggtggag

SEQ ID NO: 189 - DNA, 25 bp, Artificial
  Synthetic oligonucleotide
ctgtcccggaaggagaagctgagat

SEQ ID NO: 190 - DNA, 62 bp, Artificial
  Synthetic oligonucleotide
ttctgttccacatgtacgactcggacagcgacggccgcatcactctggaagaatatcgaaat

SEQ ID NO: 191 - DNA, 108 bp, Artificial
  Synthetic oligonucleotide
gtggtcgaggagctgctgtcgggaaaccctcacatcgagaaggagtccgctcgctccatcgccgacggggccatgatggaggcggccagcgtgtgcatggggcagatg

SEQ ID NO: 192 - DNA, 48 bp, Artificial
  Synthetic oligonucleotide
gagcctgatcaggtgtacgaggggatcaccttcgaggacttcctgaag

SEQ ID NO: 193 - DNA, 9 bp, Artificial
  Synthetic oligonucleotide
atctggcag

SEQ ID NO: 194 - DNA, 108 bp, Artificial
  Synthetic oligonucleotide
gtacatagccaaggctcgtctgcgcaccttgtgtcttgtagggtatggtatgtgggacttcgctgtttttatctccaataaaaaaaaaaaaaaggtttgttaattaat

SEQ ID NO: 195 - DNA, 70 bp, Artificial
  Synthetic oligonucleotide
tctcatcggatcagatcgagcagctccatcggagatttaagcagctgagtggagatcagcctaccattcg

SEQ ID NO: 196 - DNA, 4 bp, Artificial
  Synthetic oligonucleotide
caag

SEQ ID NO: 197 - DNA, 120 bp, Artificial
  Synthetic oligonucleotide
ctgtgcagtggctgtgaacagccactgggctcccgttcttttgtgcccgacaagggtgctcactactgcgtgccctgctatgagaacaagtttgctcctcgctgcgcccgctgcagcaag

SEQ ID NO: 198 - DNA, 131 bp, Artificial
  Synthetic oligonucleotide
acgctgacacagggtggagtgacataccgtgatcagccgtggcatcgagaatgtctggtctgtaccggatgccagacgcccctggcagggcagcagttcacctcccgggatgaagatccctactgtgtggc

SEQ ID NO: 199 - DNA, 217 bp, Artificial
  Synthetic oligonucleotide
gggaggagggggccgggccgactggcggccgaaagggaggtgggggcggggtctggcccccgcggcgggctggggggccggggtgcggggtccgggcggggcgggcccgcgctcacttcctcggggaggggttggggccgcgctcccactcgcccacacggtccgtctgcagtcggcagcctcgccggcagctcgctcggcccccgcttggcccggc

SEQ ID NO: 200 - DNA, 245 bp, Artificial
  Synthetic oligonucleotide
gactcggtggaggcaagtatgtgtcctttgaagaccgacactggcaccacaactgcttctcctgcgcccgctgctctacctccctggtgggccagggcttcgtaccggatggagaccaagtgctctgccagggctgtagccaggcagggccctaagccagggctcctggacccaggctttcccataccacgggcccaggactgtggctccttttctaaaccacctctgggactcagctccccccg

SEQ ID NO: 201 - DNA, 404 bp, Artificial
  Synthetic oligonucleotide
ccaaaaaaaatgggtctccttctgggctccaggattgtctccccactccagcatccccaaactggtactccctgacccaggcccccaatcctgggctcttacagagcctccatgagtcaagccccctccccacacctggactccagaattcaccctctcccctgcagtctgggttcccagactgagtcctctccccaaatcagggctctagacccgagccctccaaacctggactctgggacttaggcccccttaaatctagacttctctttataggtttcaggtctcctatgggtgcctgggaagtccttgaaagtggactgttctcaggcttgacctgccccaccccatccccgcggttgaggctgtgggggcagcagatcaggagcccactgataaggggc

SEQ ID NO: 202 - DNA, 150 bp, Artificial
  Synthetic oligonucleotide
cctagggtacagggtgctgcccagcaggtcgccaccgagtgtcttctcattttatttcagctccattttgcccatagatgggcagaggggtgagattggctcatcccccttccagattctgcaataaagcggtgtgaggaagcaggggcc

SEQ ID NO: 203 - DNA, 49 bp, Artificial
  Synthetic oligonucleotide
ctgccagcgctcactagccgatgaacccttcacctgccaggacagtgag

SEQ ID NO: 204 - DNA, 73 bp, Artificial
  Synthetic oligonucleotide
ctgctctgcaatgactgctactgcagtgcgttttcctcgcagtgctccgcttgtggggagactgtcatgcctg

SEQ ID NO: 205 - DNA, 50 bp, Artificial
  Synthetic oligonucleotide
ggtcccggaagctggaatatggaggccagacatggcatgagcactgcttc

SEQ ID NO: 206 - DNA, 52 bp, Artificial
  Synthetic oligonucleotide
ctgttttggagaactctttgcacctaagtgcagcagctgcaagcgccccatc

SEQ ID NO: 207 - DNA, 4 bp, Artificial
  Synthetic oligonucleotide
gtag

SEQ ID NO: 208 - DNA, 6 bp, Artificial
  Synthetic oligonucleotide
ccgcag

SEQ ID NO: 209 - DNA, 43 bp, Artificial
  Synthetic oligonucleotide
gtaggagccgccgagggacgcggcgcccggttcccggccccgc

SEQ ID NO: 210 - DNA, 39 bp, Artificial
  Synthetic oligonucleotide
ctgcgccgcgcgctccccgctcccgccgcccgcttcgag

SEQ ID NO: 211 - DNA, 53 bp, Artificial
  Synthetic oligonucleotide
gagctgttctatgaagaccgccatttccacgagggctgcttccgctgctgccg

SEQ ID NO: 212 - DNA, 997 bp, Artificial
  Synthetic oligonucleotide
tctgcaggaggggagctgggaacgacctgagctaaagctcggagctgtgcgaagaaaccggaaaagcccagagcacttgcaggggcgggtggggagctagatggtggggtggggtggggacggaggagggccagcaggagacattccgcagggaggggcaagcacgtgtgaggcgggcggggcgcgaagggtcaggcttttgctcaaaacaggcagaggacaaggtcagctcagccgcagaccgagccgctggtgactgtctccgccaccaggcagtgagagtgaagggagagcgcgagctctgaagcccgctagactaagcttgcaatctgagctccattcaccccctcctatttcttgagaccttgtcagttcccctgtgagcctcggactcctcacttgtaaaacgaggacagatgcccgtgccagaagtcaaccagagctttccccggcgtgggcaccagcccaagggcgttttgcttttctagtctcatctctgctctgacgctaagctcaaagagggactgggggacgggaagatatccaccatggcatgcgccctagctctcgggctggtgttggctgcttccttctcagattccagagtgcctagaggccaggaaagggagaaggtcctaccagcctggggtagggactcgggggccaggcactggcgctgacgcaggctagcagggcgccactggctggtccccacccacctcggtgggttgggggatgggcgcaccagcccctcctgggtgagccctagcctggggcttcctatttcgggagccgggggcgtgggccacgtctcctcatgtgatgcgagggctatttaaagcggcagcccgggcagggagccgccgtcggagcccttgcacgcctgctctcttgtagcttctctcagcctagcccagcatcactatggtggacgctttcctgggcacctggaagctagtggacagcaagaatttcgatgactacatgaagtcactcg

SEQ ID NO: 213 - DNA, 838 bp, Artificial
  Synthetic oligonucleotide
gtaagatgggcaactttggagctatatctgattggttattactactgctctttcagccaagcctgttctaaaaagccaagtcctcccctgagagctgtagaagctgggacaagagagtggttgtgggtcagggtggtatcaggtgggaattttctgtgtagtggctttggactcacacaggccggaactcaaatcttaccttataggctacatgactgtgggcaaatcaccttttccaagtgcaactgtaaaacgggtattaataataccaaccttgtagggctgctgggaagcctgtaagagacagtgtatgcacagcacaaagcatcactgattgaggaacacagcaggtgctccatgtcctttgtttgctcttcctgtgtttctaccttgcctcacctcaggaagaagtagaaaacagggccaaatctgatcccaggccctctaggaggggctcccattgcctatctcagcattccctttcctctcctccctaggactgcattgtcacttgcagggacaggctcgtgactggtggggacactgaatgacagtacagtcctttcttccccattctagtcctaccccattttcatgctttctatgtctggcctactgaaactacttgactactgcttgggtaggaagtaccacagccaggctggcagatctgttcaagcttggggacttcacttggagaatctagccttgactgaattccccccagacccagggagagcagccaactgtggattctgcctaaccacagggcctcaggttttcacctaggcatcttcactgcacaccttcttgggtcagcataacctgttaactgcat

SEQ ID NO: 214 - DNA, 2226 bp, Artificial
  Synthetic oligonucleotide
acactcacccacggcactgcagtttgcactcgcacttatgagaaagaggcatgacctgactgcactgttgctgactactactctgccaatcggctacccctcgactcagcaccacattgcctcatttcttcctctgcattttgtacaaatccacgaattcttctggggtcaggtgccactgaccgggatccagttccagttcccatggtgtatgtggttttttttttttttttttaactgcactcatagggtgctctgaggtcaataaagcagagccaaggccacccagttgcctttttgcctttggtaacataactctgggagtcttggtttatcctgtgtgtcagagagtgggcagaaataacggcctgaaggttactgaggaagaagcactggatgggagactgaaatggacagtctcggagcctgttaatcagctgatcaccttacacatttaataataaaagagctgtacctacacgttgcctttacactgccccccctccatggtcaaatgacctagttcagtcagtgatggggcttccccaggtttggctattgaactgtcacttcaggcccatcctacactgaaagctcttgggtctggctgttctctgtgaaatgctgtagtctctccctttccagaattcaggttcagggcacagaacccaggcttgtaccatggtggtgggagaaaatgaccactggccaagaggactgctgacctgtgcaccaggctagtacttatgactacaaattcttactgcttctctaatcaactctgagggaagagggcatctgatcattacaaaagggagggcttataagtgatctcccaagaaggcagtgatctgctagtgcctttggctctgtacctctgctgggcatctctccaaggtctaaggtaacatattaaatgtttttgtcagctaatgcaggctcagtgactttaagtctgtaagttacccaggaagaaggattataggaaaaataactcagtaagtttaaaaccaaacacatttccatttagtgacaggaatttaagcaaggacctgaagtagaatcaactgattcacacagtagtaaatacaaagtagaacaatgatcttggcttcgctgtctggttcagtggtctgctggaatgcaatacacaagttaagtcacactgcagactgttttctagctgtggccgctggatgccacttctagcatagtagaactatgttaggaggaatgggaaaagtgagcaccacttctcaccatgttcccccctcctgctgccagtctctgctcccatgttggatgcagcagagatcacccaccagttggcccaggacagaccaataggaagggtccaatcactctaactacagccgaactcacctccacaacagtctctgtggctctagcctggactcctttacaggaatccagctctggcagtggcagctggagagggtaatagggcctcctgctgaatgaaggaagttgggtgaatgaatgggtgagctgcagggttcacttgcaaagggaccaggagtgataaggaaacaacaactcattcaggcagctgcttttgacctctaactcccaaacctgcctgttgcatgaggggaagccatctcccatgggagcgaagttaatggggtgggaggctatattctcactattgagtctttccaggagtctcaaggcacaaggctcctggtttcttactctcaaccaccccctacactctttatactctcactccttgtgcttcttcttgtgcttcttcttctttttcttcttctttgctgccttgctgtcttttgatgtgtgccttgccctcttgcctgtatcactctcagagtctgagctgtcagagtcagatgacttcctatctctatgtttctttttcttcttctcctgaaaagaaaattttaaaaatcaacactgtatgtgtatatttgcttttaacaatcatagcacataattggccaggtgcagtggctcacacctgtaatcctagtactttgggaagccgaggtgggaggaatgcttgaggccaggagttcaagatcaacctggctaacatagcaagatctcatctctaaaaagagaaaaaaagaaaaattatagcacacaatcaataggggaccacttaattttcttttagacagtctcgctctgttgcccaggctagagtgcagtgcagtggcacgatcacagctcactgcaacctca

SEQ ID NO: 215 - DNA, 461 bp, Artificial
  Synthetic oligonucleotide
gatgttctgacagcctggccaagcatctacaggagacaagtcaaagttttaagagaagatgaaataacaattcttccttggcatctccaatggagtagagagaaggcaacaaagcttctcagacccacattaccgagctataacaaccatggctgggaggagctgagagttggcaaatcaatagtttagctatgttgctgaaccttcctggatggcaagaccatggaagtccatcacaagatattatggggtcaggagcctcactgggttctgccccttatataggtgaatatcctgggaaagtaaaaatgaaaatacagagtctggcaccagttccctgcaagcctggtccagcctggataaagaagtgaggagagtaataatactgccttacacctaaacagtgctttagtttatcaagctttttgcatccttatcttacaataatagtctgtagagtc

SEQ ID NO: 216 - DNA, 550 bp, Artificial
  Synthetic oligonucleotide
atggaaaaactgcaactcagaaatgtaaagtgagtcgaccaaggctaaagcggcaaaaccactatactttataacacagagtttggcactatttccactttgttctctctcaaagatgaaggctcaggaggagggaagataaaaacaaatcactggagagtcctggcatgctggaacatggactctagctagcaagaagggctcaaggaggtggccttctcctagacctcaactttgatgcaaaagctgttttgcagcctgaacaaagacaatccaatcctccagcaaatggcgtcattttccctacgtgtctagccttgagctacagaacaaaagaacaatcacatccgaagttgtagttcgcctggttgcggtggctcacgcctgtgatcccagcactttgggaggccaaggtgggtggatcacctgaggtcaggaggtcgagactagcctgaccaacatgaagaaaccccatctctactaaaaatacaaaattagctgggcgtggtggcacatgcctgtaatcccagctactcgggaggctgaggca

SEQ ID NO: 217 - DNA, 173 bp, Artificial
  Synthetic oligonucleotide
gtgtgggttttgctaccaggcaggtggccagcatgaccaagcctaccacaatcatcgaaaagaatggggacattctcaccctaaaaacacacagcaccttcaagaacacagagatcagctttaagttgggggtggagttcgatgagacaacagcagatgacaggaaggtcaag

SEQ ID NO: 218 - DNA, 102 bp, Artificial
  Synthetic oligonucleotide
tccattgtgacactggatggagggaaacttgttcacctgcagaaatgggacgggcaagagaccacacttgtgcgggagctaattgatggaaaactcatcctg

SEQ ID NO: 219 - DNA, 33 bp, Artificial
  Synthetic oligonucleotide
ctcatatactcataaccttccccctaccctcag

SEQ ID NO: 220 - DNA, 669 bp, Artificial
  Synthetic oligonucleotide
cctggaccctggggcgtgaggagggcgcggtgcgtcccgtggttgtgcttggaagccccccgagggtgcgcgcgcgtgggtatgagtgcgtgcgtgtgcctgggtgtgcgtgtgtgtaagtgtgcacgtgtgtgtgtgagagtgcgcgcggggaaggaggcacagagacagcccggacaggccactgcgcagccctggtggcccccgctccacctctcgctccgcagacccgcgccagggaggcctctgggccgcagcgggcaccggagcggagcgggcgcggcagcgggcgctgggaggtggggctgggggaggagagggggagggagagaggcgggcgggaggggaggatccgggaagctccggggtatttgacaggagcgagggcggacgcaaagaacgcggaggacctctgggtgcctgcaggggagctgctccagccgggccgccgggagcggtggggagagcatcgcggagccgcccctccacgcgcccgcccagccgcgctcgcccactgggctctcccggctgcagtgccagggcgcaggacgcggccgatctcccgctcccgccacctccgccaccatgctgctcccccagctctgctggctgccgctgctcgctgggctgctcccgccggtgcccgctcagaagttctcggcgctcacg

SEQ ID NO: 221 - DNA, 187 bp, Artificial
  Synthetic oligonucleotide
tgtcatcctgtgaccaagagcaccagtctgccctggaggaagccaagcagcccaagaacgacaatgtggtgatccctgagtgtgcgcacggcggcctctacaagccagtgcagtgccacccctccacggggtactgctggtgcgtcctggtggacacggggcgccccattcccggcacatccacaag

SEQ ID NO: 222 - DNA, 172 bp, Artificial
  Synthetic oligonucleotide
tttttgagagtggatcaagataaagacaaggattgtagcttggactgtgcgggttcgccccagaaacctctctgcgcatctgacggaaggaccttcctttcccgttgtgaatttcaacgtgccaagtgcaaagatccccagctagagattgcatatcgaggaaactgcaaag

SEQ ID NO: 223 - DNA, 275 bp, Artificial
  Synthetic oligonucleotide
gctctcagaacccgaccccagccataccctagaggagcgggtggtgcactggtacttcaaactactggataaaaactccagtggagacatcggcaaaaaggaaatcaaacccttcaagaggttccttcgcaaaaaatcaaagcccaaaaaatgtgtgaagaagtttgttgaatactgtgacgtgaataatgacaaatccatctccgtacaagaactgatgggctgcctgggcgtggcgaaagaggacggcaaagcggacaccaagaaacgccaca

SEQ ID NO: 224 - DNA, 1685 bp, Artificial
  Synthetic oligonucleotide
gatgcaatggtggtgtcctccagacccaaagccacaacccatcgcaagtcaagaacactttccagaagataaacatgagtgggttcatgtctctctccttcaaagccaggacaaaatccccacttctttgctgccgcgagtcaatttgtgatttattttgtctgcacctgtttgatgccaggtcgacatttcctaaggcaagcccctgtatttgttgtggatttaagtggaggcggccagcacacaccttggatgtaatttaaaaccatttcctgaggaaagatgtgtgatatgctttcctttgtttagcaaatgtttatggttttaactttaaatctcaccgcaaatcacttacacttgaaaacagggctggtctgaaagtaattaccctccctgagtgccaagacctccagaagttgttttcattcccgaatggcaatcactgtactcatgcgctccacgcatcttaaataaactcagttcaaagcacatgcctcctgcttcagctcttttttccaaaaagagaaacagaagcaggttccccctccttttatagtgcctgcgtggacacgcggacctccatgcctttcatgctgtggctatgtcagcaaactacgatattgggatgatcctaacgggcaagccagctgcggctcctaccggccgtggccattgaaggccaccatgttgctttgaaacatctcaaagaataacatagtgccagccagcaagggtttcaccatatgcatgacccagacaggaactatcaaaagaagggatcacgggaaggtgcatgatgctaatgtggaatccagaggagctctttcctgatctcttcagcttccgctgccactccagaatcatcagagctgatattaaataagttaaaatgttagtccaccgtctcctcctgcaatcctaaccatcttttgagactgttagaatactttgacgggttgtctttctgtgcaactaatttaaacctcaagtttagtgtaggagatgggtttgtcttctcacctcttcagatctttatcaagggggaataaaagccaacccagaaacctaaactttaaaatttaattatttgaaataataaaacagaagaagggatcaacatttgtcggaattggcactcttggaaaactaagtctaggagatcatatattgctttttttttttcattctaaattacttttaattgaaagtcaagatgctgagttacagttgtttatcattataataagcaaactttttaagttggatttcttcttaaagaggtaaactagtgaacaaaaaagataaaaaggaaaattaagaatcaactatgcctttatcaaatttgaagcataagttatattattaaaattatttttgtataatcaaggtgataagacattctggaaaacatttaatgtatttagtacttagaatatttacagtggatgttacttttttgaaacgatatatttttcccaatttttctatcatgtcaaggaaggaaactgttaagaagttaccagtgtccaaaatgtcttcattgtttcttactcatacttacacctcacatgacctgcccagccctctttggttcagttcattcccagaagccaagccttagtcttcacagatgagcgacacacacctctgaatataatgtctcttttttgttttttccttttcag

SEQ ID NO: 225 - DNA, 877 bp, Artificial
  Synthetic oligonucleotide
ccaaggaaacaaggataaatggctcataccccgaaggcagttcctagacacatgggaaatttccctcaccaaagagcaattaagaaaacaaaaacagaaacacatagtatttgcactttgtactttaaatgtaaattcactttgtagaaatgagctatttaaacagactgttttaatctgtgaaaatggagagctggcttcagaaaattaatcacatacaatgtatgtgtcctcttttgaccttggaaatctgtatgtggtggagaagtatttgaatgcatttaggcttaatttcttcgccttccatatgttaacagtagagctctatgcactccggctgcaatcgtatggctttctctaacccctgcagtcacttccagatgcctgtgcttacagcattgtggaatcatgttggaagctccacatgtccatggaagtttgtgatgtacggccgaccctacaggcagttaacatgcatgggctggtttgtttcttgggattttctgttagtttgtcttgttttgctttccagagatcttgctcatacaatgaatcacgcaaccactaaagctatccagttaagtgcaggtagttcccctggaggaaataatattttcaaactgtcgttggtgtgatactttggctcaaaggatctttgcttttccattttaagcttctgttttgagttttgccctggggcttgaatgagtcccagagagtcgttcggatggtgggaggctgcctaggaggcagtaaatccagtcacagtgcctgggaggggcccatccttccaaaatgtaaatccagtcgcggtgtgaccgagctggctaacaggcttgtctgcctggttttcctcctacacgtggacattattctc

SEQ ID NO: 226 - DNA, 252 bp, Artificial
  Synthetic oligonucleotide
gatacgtggtgcccccggggctggtgttggcagccggggggaggtgcctgagggtccccacggttcctttctgcttttctgaatgcatcaagggtacgagaacttgccaatgggaaattcatccgagtggcactggcagagaaggataggagtggaatgcccacacagtgaccaacagaactggtctgcgtgcataaccagctgccaccctcaggcctgggccccagagctcagggcacccagtgtcttaag

SEQ ID NO: 227 - DNA, 349 bp, Artificial
  Synthetic oligonucleotide
gaaccatttggaggacagtctgagagcaggaacttcaagctgtgattctatctcggctcagacttttggttggaaaaagatcttcatggccccaaatcccctgagacatgccttgtagaatgattttgtgatgttgtgatgcttgtggagcatcgcgtaaggcttcttgcttatttaaactgtgcaaggtaaaaatcaagcctttggagccacagaaccagctcaagtacatgccaatgttgtttaagaaacagttatgatcctaaactttttggataatcttttatatttctgacctttgaatttaatcattgttcttagattaaaataaaatatgctattgaaacta

SEQ ID NO: 228 - DNA, 233 bp, Artificial
  Synthetic oligonucleotide
cacctcataatcatgtgaaaaagacactcaaaaactaccatttgaatggatggatgaaaataacctccgtatattctacgaagatgtttaataataaataggtttcgttataagagaatgtgtgtcacttcgtctcttccctcacccccgagacttagtgacagttatttttgacttttccaactatactatttgcctagaaaatgtgtctattaaatagcgtattgagaaat

SEQ ID NO: 229 - DNA, 51 bp, Artificial
  Synthetic oligonucleotide
atgatgccgcagctccagcgttggagactcagcctcaaggagatgaagaag

SEQ ID NO: 230 - DNA, 75 bp, Artificial
  Synthetic oligonucleotide
atattgcatcacgttaccctaccctttggactgaacaggttaaaagtcggcagaacaaaaccaataagaattcag

SEQ ID NO: 231 - DNA, 83 bp, Artificial
  Synthetic oligonucleotide
gtacgagcagccgaaatgtgacaacacggccagggcccacccagccaaagcccgggacctgtacaagggccgccagctacaag

SEQ ID NO: 232 - DNA, 103 bp, Artificial
  Synthetic oligonucleotide
gttgtccgggtgccaaaaagcatgagtttctgaccagcgttctggacgcgctgtccacggacatggtccacgccgcctccgacccctcctcctcgtcaggcag

SEQ ID NO: 233 - DNA, 95 bp, Artificial
  Synthetic oligonucleotide
gaagtaagagaaacctgtgatggccagagcccagatgttcttaggaggcaagccaggagaagccgggtctgacttttcagctcagagacagcact

SEQ ID NO: 234 - DNA, 38 bp, Artificial
  Synthetic oligonucleotide
cccccagaggtcatgctgaaagtacgtctaatagacag

SEQ ID NO: 235 - DNA, 75 bp, Artificial
  Synthetic oligonucleotide
ctgatcctcctacctggtccaccccagggctaccggaaggtaaaatcttcacctgaaccaattatgagcagtctc

SEQ ID NO: 236 - DNA, 19 bp, Artificial
  Synthetic oligonucleotide
cttactgaaggtacagccg

SEQ ID NO: 237 - DNA, 65 bp, Artificial
  Synthetic oligonucleotide
ctactgtggttgagaggaaaggtgtctttttattgcttctagagacgttgaaagtgtgacctgag

SEQ ID NO: 238 - DNA, 107 bp, Artificial
  Synthetic oligonucleotide
acgtgtccaggtgtgtggccgaaaggaagtatacccaggagcaagcccggaaggagtttcagcaagtgttcattcctgagtgcaatgacgacggcacctacagtcag

SEQ ID NO: 239 - DNA, 100 bp, Artificial
  Synthetic oligonucleotide
gtccagtgtcacagctacacgggatactgctggtgcgtcacgcccaacgggaggcccatcagcggcactgccgtggcccacaagacgccccggtgcccgg

SEQ ID NO: 240 - DNA, 48 bp, Artificial
  Synthetic oligonucleotide
gttccgtaaatgaaaagttaccccaacgcgaaggcacaggaaaaacag

SEQ ID NO: 241 - DNA, 582 bp, Artificial
  Synthetic oligonucleotide
gtaagcaggggatgagggcacactgagctccctccagccctctcagcctcaaccctctggaggcccaggcatatgggcagggggactcctgaaccctactccaagcacagcctctgtctgactcccttgtccttcaagagaactgttctccaggtctcagggccaggatttccataggatcgcctgtggctttgattctattctagtgtctctgggtgggggtcctgggcaagtgtctttctgagtctcagtttctttatcggtaaaatgtacataatgagattgaaagtgctctgcaaagcactatgtgcactaagaatttattattcaggttgtttccatcatgttttctgaggtgaaatcacaaaggatcagtggagtttgaggattatctagttcaatgctttgagtttagagttttacggtgaaaatgagacttgtctcctgacactaagtctctctcaactatagcgctatcttgctattttctctatctcagaaggatccttgggcaggaggaaggatgtggatatgatttggctggtttctatgctgaagctcttatctgattttctctcacag

SEQ ID NO: 242 - DNA, 193 bp, Artificial
  Synthetic oligonucleotide
cttgattcctgccatatggaggaggctctggagtcctgctctgtgtggtccaggtcctttccaccctgagacttggctccaccactgatatcctcctttggggaaaggcttggcacacagcaggctttcaagaagtgccagttgatcaatgaataaataaacgagcctatttctctttgcaaaacctgcttct

SEQ ID NO: 243 - DNA, 190 bp, Artificial
  Synthetic oligonucleotide
gtgaaaagagacatcacaagcaattgagggaccaggaagtggatcctctagagatgaggaggcattctgctggatgacttttaaaaatgttttctccagagtcatctctctcattaacaatgttttttgtcttagaaatttcttgttgatttttaaacttacatgatttcttgttttggtatgaatacag

SEQ ID NO: 244 - DNA, 179 bp, Artificial
  Synthetic oligonucleotide
gctgcttcagtccttcaataagcccatcacactttttcaccatgtcatctatcagcactttttctgcagtgttacgaacatcagcttcatcactgtcagcctgcgttttgcctgcaacccatcaaatgaggtcaggagaggagttttccacttttggcttcatgttggtgctcaaaact

SEQ ID NO: 245 - DNA, 208 bp, Artificial
  Synthetic oligonucleotide
gtttcctgcttatgcaatagtagctgggagaggccgaaagaattctggtggggccacacccactggtgaaagaataaatagtgaggtttggcattggccatcagagtcactcctgccttcaccatgaagtccagcggcctcttccccttcctggtgctgcttgccctgggaactctggcaccttgggctgtggaaggctctggaaagt

SEQ ID NO: 246 - DNA, 37 bp, Artificial
  Synthetic oligonucleotide
ccttcaaagctggagtctgtcctcctaagaaatctgc

SEQ ID NO: 247 - DNA, 112 bp, Artificial
  Synthetic oligonucleotide
ccagtgccttagatacaagaaacctgagtgccagagtgactggcagtgtccagggaagaagagatgttgtcctgacacttgtggcatcaaatgcctggatcctgttgacacc

SEQ ID NO: 248 - DNA, 10 bp, Artificial
  Synthetic oligonucleotide
ccaaacccaa

SEQ ID NO: 249 - DNA, 4 bp, Artificial
  Synthetic oligonucleotide
caag

SEQ ID NO: 250 - DNA, 56 bp, Artificial
  Synthetic oligonucleotide
gaggaagcctgggaagtgcccagtgacttatggccaatgtttgatgcttaaccccc

SEQ ID NO: 251 - DNA, 90 bp, Artificial
  Synthetic oligonucleotide
ccaatttctgtgagatggatggccagtgcaagcgtgacttgaagtgttgcatgggcatgtgtgggaaatcctgcgtttcccctgtgaaag

SEQ ID NO: 252 - DNA, 340 bp, Artificial
  Synthetic oligonucleotide
cggagggagtgagagccagaggctgctgctgccgtttgcaagaactgcaggggaggaggacgctgccacccacagcctctagagctcattgcagctgggacagcccggagtgtggttagcagctcggcaagcgctgcccaggtcctggggtggtggcagccagcgggagcaggaaaggaagcatgttcccaggctgcccacgcctctgggtcctggtggtcttgggcaccagctgggtaggctgggggagccaagggacagaagcggcacagctaaggcagttctacgtggctgctcagggcatcagttggagctaccgacctgagcccacaaactcaag

SEQ ID NO: 253 - DNA, 123 bp, Artificial
  Synthetic oligonucleotide
gacttcttgggcctactttatatgctgaagtcggagacatcataaaagttcactttaaaaataaggcagataagcccttgagcatccatcctcaaggaattaggtacagtaaattatcagaag

SEQ ID NO: 254 - DNA, 213 bp, Artificial
  Synthetic oligonucleotide
gtgcttcttaccttgaccacacattccctgcggagaagatggacgacgctgtggctccaggccgagaatacacctatgaatggagtatcagtgaggacagtggacccacccatgatgaccctccatgcctcacacacatctattactcccatgaaaatctgatcgaggatttcaactcggggctgattgggcccctgcttatctgtaaaaaag

SEQ ID NO: 255 - DNA, 144 bp, Artificial
  Synthetic oligonucleotide
ggaccctaactgagggtgggacacagaagacgtttgacaagcaaatcgtgctactatttgctgtgtttgatgaaagcaagagctggagccagtcatcatccctaatgtacacagtcaatggatatgtgaatgggacaatgccag

SEQ ID NO: 256 - DNA, 222 bp, Artificial
  Synthetic oligonucleotide
atataacagtttgtgcccatgaccacatcagctggcatctgctgggaatgagctcggggccagaattattctccattcatttcaacggccaggtcctggagcagaaccatcataaggtctcagccatcacccttgtcagtgctacatccactaccgcaaatatgactgtgggcccagagggaaagtggatcatatcttctctcaccccaaaacatttgcaag

SEQ ID NO: 257 - DNA, 166 bp, Artificial
  Synthetic oligonucleotide
ctgggatgcaggcttacattgacattaaaaactgcccaaagaaaaccaggaatcttaagaaaataactcgtgagcagaggcggcacatgaagaggtgggaatacttcattgctgcagaggaagtcatttgggactatgcacctgtaataccagcgaatatggacaa

SEQ ID NO: 258 - DNA, 178 bp, Artificial
  Synthetic oligonucleotide
aaaatacaggtctcagcatttggataatttctcaaaccaaattggaaaacattataagaaagttatgtacacacagtacgaagatgagtccttcaccaaacatacagtgaatcccaatatgaaagaagatgggattttgggtcctattatcagagcccaggtcagagacacactcaaa

SEQ ID NO: 259 - DNA, 215 bp, Artificial
  Synthetic oligonucleotide
gcaggaacaacaccatgatcagagcagttcaaccaggggaaacctatacttataagtggaacatcttagagtttgatgaacccacagaaaatgatgcccagtgcttaacaagaccatactacagtgacgtggacatcatgagagacatcgcctctgggctaataggactacttctaatctgtaagagcagatccctggacaggcgaggaatacag

SEQ ID NO: 260 - DNA, 151 bp, Artificial
  Synthetic oligonucleotide
agggcagcagacatcgaacagcaggctgtgtttgctgtgtttgatgagaacaaaagctggtaccttgaggacaacatcaacaagttttgtgaaaatcctgatgaggtgaaacgtgatgaccccaagttttatgaatcaaacatcatgagca

SEQ ID NO: 261 - DNA, 153 bp, Artificial
  Synthetic oligonucleotide
gtaagtcagagtactatttttgttcatcagtttttcattcctgtggttgaaatatgactgtgcctagagtcagagacatggattaaaatctactcgctaaggggcacctccaatcctcacttccagtccaaagacttggtgatgaaatccgtg

SEQ ID NO: 262 - DNA, 213 bp, Artificial
  Synthetic oligonucleotide
ctatcaatggctatgtgcctgagagcataactactcttggattctgctttgatgacactgtccagtggcacttctgtagtgtggggacccagaatgaaattttgaccatccacttcactgggcactcattcatctatggaaagaggcatgaggacaccttgaccctcttccccatgcgtggagaatctgtgacggtcacaatggataatgttg

SEQ ID NO: 263 - DNA, 1609 bp, Artificial
  Synthetic oligonucleotide
gaacttggatgttaacttccatgaattctagtccaagaagcaaaaagctgaggctgaaattcagggatgttaaatgtatcccagatgatgatgaagactcatatgagatttttgaacctccagaatctacagtcatggctacacggaaaatgcatgatcgtttagaacctgaagatgaagagagtgatgctgactatgattaccagaacagactggctgcagcattaggaattaggtcattccgaaactcatcattgaaccaggaagaagaagagttcaatcttactgccctagctctggagaatggcactgaattcgtttcttcgaacacagatataattgttggttcaaattattcttccccaagtaatattagtaagttcactgtcaataaccttgcagaacctcagaaagccccttctcaccaacaagccaccacagctggttccccactgagacacctcattggcaagaactcagttctcaattcttccacagcagagcattccagcccatattctgaagaccctatagaggatcctctacagccagatgtcacagggatacgtctactttcacttggtgctggagaattcagaagtcaagaacatgctaagcgtaagggacccaaggtagaaagagatcaagcagcaaagcacaggttctcctggatgaaattactagcacataaagttgggagacacctaagccaagacactggttctccttccggaatgaggccctgggaggaccttcctagccaagacactggttctccttccagaatgaggccctggaaggaccctcctagtgatctgttactcttaaaacaaagtaactcatctaagattttggttgggagatggcatttggcttctgagaaaggtagctatgaaataatccaagatactgatgaagacacagctgttaacaattggctgatcagcccccagaatgcctcacgtgcttggggagaaagcacccctcttgccaacaagcctggaaagcagagtggccacccaaagtttcctagagttagacataaatctctacaagtaagacaggatggaggaaagagtagactgaagaaaagccagtttctcattaagacacgaaaaaagaaaaaagagaagcacacacaccatgctcctttatctccgaggacctttcaccctctaagaagtgaagcctacaacacattttcagaaagaagacttaagcattcgttggtgcttcataaatccaatgaaacatctcttcccacagacctcaatcagacattgccctctatggattttggctggatagcctcacttcctgaccataatcagaattcctcaaatgacactggtcaggcaagctgtcctccaggtctttatcagacagtgcccccagaggaacactatcaaacattccccattcaagaccctgatcaaatgcactctacttcagaccccagtcacagatcctcttctccagagctcagtgaaatgcttgagtatgaccgaagtcacaagtccttccccacagatataagtcaaatgtccccttcctcagaacatgaagtctggcagacagtcatctctccagacctcagccaggtgaccct

SEQ ID NO: 264 - DNA, 170 bp, Artificial
  Synthetic oligonucleotide
ctctccagaactcagccagacaaacctctctccagacctcagccacacgactctctctccagaactcattcagagaaacctttccccagccctcggtcagatgcccatttctccagacctcagccatacaaccctttctccagacctcagccatacaaccctttctttag

SEQ ID NO: 265 - DNA, 1042 bp, Artificial
  Synthetic oligonucleotide
acctcagccagacaaacctctctccagaactcagtcagacaaacctttctccagccctcggtcagatgcccctttctccagacctcagccatacaaccctttctctagacttcagccagacaaacctctctccagaactcagccatatgactctctctccagaactcagtcagacaaacctttccccagccctcggtcagatgcccatttctccagacctcagccatacaaccctttctctagacttcagccagacaaacctctctccagaactcagtcaaacaaacctttccccagccctcggtcagatgcccctttctccagaccccagccatacaaccctttctctagacctcagccagacaaacctctctccagaactcagtcagacaaacctttccccagacctcagtgagatgcccctctttgcagatctcagtcaaattccccttaccccagacctcgaccagatgacactttctccagaccttggtgagacagatctttccccaaactttggtcagatgtccctttccccagacctcagccaggtgactctctctccagacatcagtgacaccacccttctcccggatctcagccagatatcacctcctccagaccttgatcagatattctacccttctgaatctagtcagtcattgcttcttcaagaatttaatgagtcttttccttatccagaccttggtcagatgccatctccttcatctcctactctcaatgatacttttctatcaaaggaatttaatccactggttatagtgggcctcagtaaagatggtacagattacattgagatcattccaaaggaagaggtccagagcagtgaagatgactatgctgaaattgattatgtgccctatgatgacccctacaaaactgatgttaggacaaacatcaactcctccagagatcctgacaacattgcagcatggtacctccgcagcaacaatggaaacagaagaaattattacattgctgctgaagaaatatcctgggattattcagaatttgtacaaag

SEQ ID NO: 266 - DNA, 237 bp, Artificial
  Synthetic oligonucleotide
gttcgttttaaaaatttagcatccagaccgtattctctacatgcccatggactttcctatgaaaaatcatcagagggaaagacttatgaagatgactctcctgaatggtttaaggaagataatgctgttcagccaaatagcagttatacctacgtatggcatgccactgagcgatcagggccagaaagtcctggctctgcctgtcgggcttgggcctactactcagctgtgaaccca

SEQ ID NO: 267 - DNA, 211 bp, Artificial
  Synthetic oligonucleotide
gaaaaagatattcactcaggcttgataggtcccctcctaatctgccaaaaaggaatactacataaggacagcaacatgcctgtggacatgagagaatttgtcttactatttatgacctttgatgaaaagaagagctggtactatgaaaagaagtcccgaagttcttggagactcacatcctcagaaatgaaaaaatcccatgagtttcacg

SEQ ID NO: 268 - DNA, 180 bp, Artificial
  Synthetic oligonucleotide
ccattaatgggatgatctacagcttgcctggcctgaaaatgtatgagcaagagtgggtgaggttacacctgctgaacataggcggctcccaagacattcacgtggttcactttcacggccagaccttgctggaaaatggcaataaacagcaccagttaggggtctggccccttctgcctg

SEQ ID NO: 269 - DNA, 156 bp, Artificial
  Synthetic oligonucleotide
gtggacatgcaaaaggaagtcataatcacagggatccagacccaaggtgccaaacactacctgaagtcctgctataccacagagttctatgtagcttacagttccaaccagatcaactggcagatcttcaaagggaacagcacaaggaatgtgatg

SEQ ID NO: 270 - DNA, 138 bp, Artificial
  Synthetic oligonucleotide
tattttaatggcaattcagatgcctctacaataaaagagaatcagtttgacccacctattgtggctagatatattaggatctctccaactcgagcctataacagacctacccttcgattggaactgcaaggttgtgag

SEQ ID NO: 271 - DNA, 152 bp, Artificial
  Synthetic oligonucleotide
gatgttccacacccctgggtatggaaaatggaaagatagaaaacaagcaaatcacagcttcttcgtttaagaaatcttggtggggagattactgggaacccttccgtgcccgtctgaatgcccagggacgtgtgaatgcctggcaagccaag

SEQ ID NO: 272 - DNA, 136 bp, Artificial
  Synthetic oligonucleotide
gcaaacaacaataagcagtggctagaaattgatctactcaagatcaagaagataacggcaattataacacagggctgcaagtctctgtcctctgaaatgtatgtaaagagctataccatccactacagtgagcagg

SEQ ID NO: 273 - DNA, 1180 bp, Artificial
  Synthetic oligonucleotide
aaggaaatactaataccaaaggacatgtgaagaactttttcaaccccccaatcatttccaggtttatccgtgtcattcctaaaacatggaatcaaagtattgcacttcgcctggaactctttggctgtgatatttactagaattgaacattcaaaaacccctggaagagactctttaagacctcaaaccatttagaatgggcaatgtattttacgctgtgttaaatgttaacagttttccactatttctctttcttttctattagtgaataaaattttatacaagaagcttttataatgtaactccttgctaccagtaagtaagataatggctattacttctgcattaatttgaatacaggtaggaaaatatcaagaaccaacaagaaaagggcttatctttcttaatgattgaaaatgctatgaagtaatatttatgtagttaaaatgcttcattataactcttttaaatcctttacacactagtaaaacagatattactttaaataataattgatagacctggataactttcacaaacacatgattttttaatggtttttcttgagtgaagagaaaaacaatattatcaaatgaaataagtacttaaaatatcctgtctttcccatataacaatgatttttctgactttccatgagtaaaaaaacagccaagcatctttccagtagccccattgaaattgtgaatccgtcctggtctccctaaggactgcacacattgatattcaaggttggtggtcattagatatggaacagaactgaaataaccatggtagaactgaatgtgtaatgttggctttattctagctggtactacatggcacacagtttcaaaacataatttcacctactggaaagctcagacctgtaaaacagagcatgggaactgctggtctaaatgcagttgttcctgctcaaagagacctctggccaaactggcaagcagttaaagttttctttcagggccttcctctctatggcctcaacttcctcctctctcttcttccagcaacttcccctttcatcattcctttccctggggacttggcattcagtgatcctgtagatattgcacaactggggaacctttagacatccttaaaatcacatgagatagacagtcatttggggtgtctgaaataaaccaccccaaaacttagt

SEQ ID NO: 274 - DNA, 92 bp, Artificial
  Synthetic oligonucleotide
tttgaatctttctgtaacttcctttaagaaaattgtctacagagagtatgaaccatattttaagaaagaaaaaccacaatctaccatttcag

SEQ ID NO: 275 - DNA, 100 bp, Artificial
  Synthetic oligonucleotide
atcgtgttcaaaaatatggccagccgcccctatagcatttaccctcatggagtgaccttctcgccttatgaagatgaagtcaactcttctttcacctcag

SEQ ID NO: 276 - DNA, 55 bp, Artificial
  Synthetic oligonucleotide
ggaaacagatattgaagactctgatgatattccagaagataccacatataagaaa

SEQ ID NO: 277 - DNA, 52 bp, Artificial
  Synthetic oligonucleotide
gtagtttttcgaaagtacctcgacagcacttttaccaaacgtgatcctcgag

SEQ ID NO: 278 - DNA, 68 bp, Artificial
  Synthetic oligonucleotide
gggagtatgaagagcatctcggaattcttggtcctattatcagagctgaagtggatgatgttatccaa

SEQ ID NO: 279 - DNA, 117 bp, Artificial
  Synthetic oligonucleotide
gttcatttaaaactcttgaaatgaaggcatcaaaacctggctggtggctcctaaacacagaggttggagaaaaccagagagcagggatgcaaacgccatttcttatcatggacagag

SEQ ID NO: 280 - DNA, 72 bp, Artificial
  Synthetic oligonucleotide
actgtaggatgccaatgggactaagcactggtatcatatctgattcacagatcaaggcttcagagtttctgg

SEQ ID NO: 281 - DNA, 104 bp, Artificial
  Synthetic oligonucleotide
gttactgggagcccagattagcaagattaaacaatggtggatcttataatgcttggagtgtagaaaaacttgcagcagaatttgcctctaaaccttggatccag

SEQ ID NO: 282 - DNA, 7 bp, Artificial
  Synthetic oligonucleotide
gtaaatg

SEQ ID NO: 283 - DNA, 47 bp, Artificial
  Synthetic oligonucleotide
gagtggaatggaaaccatacaggctgaaatcctccatggtggacaag

SEQ ID NO: 284 - DNA, 7 bp, Artificial
  Synthetic oligonucleotide
atttttg

SEQ ID NO: 285 - DNA, 1543 bp, Artificial
  Synthetic oligonucleotide
agcacacatgatcttaactgggtctcttctcctgaatccctggggaaagagaaagacgcctacagcacttttttccactgcccctctgtggtcagcctttggtgaggggaactggaagggccttctagatcacacatccaactccctcaattataaatgagggcactgtggaccagaggagccaagggctttctccagggtcacacagtggaccaatgtcagggaccaggagggtccagatccctcagttcccaagccctacatcctcacgtccagcatgcacgtgcaaggccagcatgcccagcctggaactggagacgccgatcagagggcctggcaggctgctgccggtgcccatctcacaggccccgagggctgataaggatgcccttgaaggtgattgatggtttgcaaagcacccacttattagtatttccactggacctctgaaaacagtgatggagatagagagattgcatgtaacttgggacttgggaggtggcctgaaatgactgtgacccagctgatttctctgaggacttaggaggaaatatctgaagttggactcttcttgactgggccaaaaccagatgcttccccggcttctttgcacatacttttccccgtgctttcttgttgaaataagcagcattgtggagtgagaggcatttggaatgtgactcctccgtttacttactcctccacctaggcagaatactttgcttctgtttcctttgtgtaaaatgggaagacgatagaacctccttggttaggactgtggtgaggtgtcagtgaattaatgcgaaatccacatagaaccatgcactatcacaagcgtttgccattatcattcatagtgttagcattcataagcggcatgattgtcccagcagccttgagaaagggtggggagagcactttaatccgtgcttcacagatgaggaaactgaggcacagagaaggtccccagccttcccaagaccccacagtaggtgagttgcagggttagtctgctgtgtcccagatctgtgttctttctgccatgctgcattgccactcagagaggaacaacctgatctagaaagtgaaattttttccagccgcagctgctgcggctacatttgtgaatcagctctgtaaatacaagtttaatacgcgttgttcctgctcagtgggcgttgatagcccagccctggaagagcctttaagaacaggccttaaatagacacaccagctccatgcttcagttttgggaggctgtaccccataaaggaagggtgcaagggcctgtgggctgacaggaattacagaccggcttccaggtggccccaccacctgtgctgggcccctgctgggctcacttgactgtccctgagcccatcactcacccttttggagcaatttttgaaacagaccgctaagtacccaggttattagctggtctcatccctaccatgccggggaacagcatttggatcaccgcagtagcagcccaaggagacacacaagtagctgctttctcggactgtattattttctgaaa

SEQ ID NO: 286 - DNA, 385 bp, Artificial
  Synthetic oligonucleotide
gtaagaaactttccctgggcagaactctttctagttcccatggggatgggcaggataggcgagaggccgagcccccacttccaggtctctgggcagggcggggttaggcagcagcgggtgtcactcacacagtgactttcacttgtgctttcagtgctcaggacatgggcacctgccggcttccttctagcccggttggacagctccggcagctggtttggggaggtaaaattataggagcgtgatgtcacccgggccactcagggcagagcctggctgctgggcagaagggcacttgggccgggctgcttcagccgagagggccattcggtgtcctgcccacagagagagaaacagtgagagaccaagagagcaaaccagagag

SEQ ID NO: 287 - DNA, 250 bp, Artificial
  Synthetic oligonucleotide
atagggagggggaatgcaaggggtccctgggggactcaggagtcccagtggagaatgagaggcaggccccccgtggtggccggggccctggctgccagaggaccgggctggtgaggaggcgaggatgtggactttcgtcacccagctgttggtcacgctggtgctgctgagcttcttcctggtcagctgtcagaacgtgatgcacattgtcagggggtccctgtgctttgtgctaaagcacatccaccag

SEQ ID NO: 288 - DNA, 135 bp, Artificial
  Synthetic oligonucleotide
gtgggtgcagagtgttcccctctgtgctggggagaggcaggtgggctagaagctaaaaggtggtagaagccagtggcttctccctgctgccctcacagcaggtgagcacagccaggctggctgcccccgtgctca

SEQ ID NO: 289 - DNA, 135 bp, Artificial
  Synthetic oligonucleotide
gtggagctgagagggagtggcctacagccggacctgatagagggcaggaagggggcgcagatagtgaagcgggccagcctgaaaagggggaaacagtgaccccgagccgctctccttggagtagcctctcgggag

SEQ ID NO: 290 - DNA, 140 bp, Artificial
  Synthetic oligonucleotide
ctgccatgcacacaggaggagagctggacctgagggccaccgcagcggtgcacacattcctctgggctgacggcatgacctctgtaagggactcctgctagtcccctcttggcatgaatgactgactgtagacgcatgac

SEQ ID NO: 291 - DNA, 414 bp, Artificial
  Synthetic oligonucleotide
ggatagaaaacaagcgcaggagagcctgcgaacgcaaaagtgaatgagggctttttgtggctggggatgggttttggttttggggttttttttttaaattgttttgacttcgtacagggtactttttcccaacctcatctgtcagaaatccatgtgggcttcctggaaagaaaaaaaaaaaaaaagaaaactaggcatgaaatcagtttaacaccttaatcttaagccatgtcctcatctgcccaccctccccaacccacatacctccattccacttgtgacaccccctcgactccctggtgacgctcctcccagatcgctctacatgacattcaggacacacacacacacacacacacacacaccactcgcctccactgaatctacacacagattttactgtgacttctgaag

SEQ ID NO: 292 - DNA, 1190 bp, Artificial
  Synthetic oligonucleotide
ctgtggataaattggaattttttatgttgtctctctctctgccaatttcaatacgaatcatcttccaatggaaaatcattaccttgaagagtgcattcggggttccttgtgttagggacttaagaatctgaggcgaggacccccaggcttacctgtaggactcaaagggagccaggaccccatctgaaagggtctcctctctcagttgggggacaggccggtggctgacccaggattgcaccagcatgtccatagagaagaggttttctatgtcttcaagcactatatcatagtccgtgttcaaagtgtaaactgtacagtaatcagccttgtgtatatgaaaaacaataaatactatgcaaaccaatagaaacatttagcagtacgtacagagcctgacagcgcagctcctgaggacttctgcggctgcaggagaaggagctgtggcctgtctttcagtgaaagaggaaggaaaggagtagggctagtgaatgtatctgccaggtcttagaagtcaggaccacccagggtctcccagagtgaacttggtgctctaagtccaggcagcctgcaggctggggaccctgggtgcaggtgccaggctcgaggctgttccctgtcctgcctcagtgcctcccctctgcccagcccctgtggcctcttggagaggcgagccagggggctccccggaccgcatggccggtgagagtagagtcggaggcggagagcctggacgcccagaggccggggccaggctctgggtcaaggcaggaaggagacagacagctggcagttcctcgcctcggtgccatcagggaggagccttaagttccactagagcctccggcccagggaggccagaatcagcacaatcccggccccgccctcgcggcgggcgcccccagggccaggagagagagacagggctggctcctctcgcccctggagccgcggtgtggacggcccggccccgtccgccccgccgctctgcgggagtgtcctcgggacacacttaaaccttccaagtagcacagaagccccctccacgtcagaggccccctggccgcggggcctgtgagcggagaggggccctgcttcccacacaaatccgccccggtgcacccccggccaggcaggccccggggcggcctaggcgccttgtcggccgggggtggggctgcttttgcttc

SEQ ID NO: 293 - DNA, 359 bp, Artificial
  Synthetic oligonucleotide
ctttagaggggcgggcagggagaggaagctctagctccgggcctgagtttccccgaggctgcgtcggaggagctgcagggcgagcccggacggctgccgtctccgccagaggccaccccggcccggcctccagggcgcagaggcgcccccctccatcctcccccatcccgggggccacggcaggggggccgcacagcgcggctgggaccgattcggtgacggcccaaggaagctgggcgcagggctcgcctctcccgcctcgatcctgcaccttcctctcccaggtcgctgctgcagccaacccagtagcccccttagcgcccccgcggaccccgcagctccagactccgctttggcac

SEQ ID NO: 294 - DNA, 303 bp, Artificial
  Synthetic oligonucleotide
ctctgctccggctggcatggctgcacgctccggctgctagtaggagccgttaggggaggagtttggggtctccacacgatgcctagagaatgctgcagtctgcacattagacgctttttagaagttttgaaattaccttgatttttttaattgttatgaaaatggatcttttcttgactctcccacatgctctgttatgggagagaatcccctaccctactctgatgtatagaccattctcccttcaccagccgaaccaatgtcaaaattaataaagaaatggactaatggcacagggctcta

SEQ ID NO: 295 - DNA, 62 bp, Artificial
  Synthetic oligonucleotide
gagctggacaaggagctgggggagagcgagggcctcagtgacgacgaggagaccatctccac

SEQ ID NO: 296 - DNA, 31 bp, Artificial
  Synthetic oligonucleotide
cagggtggtccggcggcgggtcttcctgaag

SEQ ID NO: 297 - DNA, 77 bp, Artificial
  Synthetic oligonucleotide
gggaatgagtttcagaatattccaggggagcaggtgacagaggagcaattcacggatgagcagggcaacattgtcac

SEQ ID NO: 298 - DNA, 7 bp, Artificial
  Synthetic oligonucleotide
caagaag

SEQ ID NO: 299 - DNA, 32 bp, Artificial
  Synthetic oligonucleotide
atcattcgcaaggtggttcgacagatagactt

SEQ ID NO: 300 - DNA, 22 bp, Artificial
  Synthetic oligonucleotide
gtccagcgccgatgccgcccag

SEQ ID NO: 301 - DNA, 12 bp, Artificial
  Synthetic oligonucleotide
gagcacgaggag

SEQ ID NO: 302 - DNA, 42 bp, Artificial
  Synthetic oligonucleotide
gtgactgtagaggggcccctggaggatcccagtgagctggag

SEQ ID NO: 303 - DNA, 33 bp, Artificial
  Synthetic oligonucleotide
gtcgatattgattactttatgaaacactccaag

SEQ ID NO: 304 - DNA, 39 bp, Artificial
  Synthetic oligonucleotide
gatcacacctcgacacccaacccctgaaccccacacact

SEQ ID NO: 305 - DNA, 85 bp, Artificial
  Synthetic oligonucleotide
ctccaggcttcaatcctgcctcttgcaatgacagctgatctgtcggaaccaggacacaaaagcagcaagaagcggggagagagag

SEQ ID NO: 306 - DNA, 14 bp, Artificial
  Synthetic oligonucleotide
ctgtatagactctg

SEQ ID NO: 307 - DNA, 679 bp, Artificial
  Synthetic oligonucleotide
gagctggagagagcgagagcaaagagcgagcgagggagaggagagagagagagaggagagagaaagacacacgcacgcagagacacacggtcactggaattccattagaaaaaagtgagccgagcaagggttagcgggagaagatttttttgaatcttgtcttcgtcttggtgcgaaagaagcgactccagtctctcgtcctcgaagctccgactggattgttcttgggcgctgacacccgtctgtggatttcttttctatttgcattttattccgaccccctccctcgccgcttccttccagcccttcactcgcaaatcgcctctctccccacctccccaggcccctcctgggaagcgcaggggaattggacccgcggggactcacgccttcccggacgattggaggggagggctgaccccaggactgggctgttggcttagaaagccgatacacagatacgcgtatatttgattgtagcgggcaaggggggcgtcgagaggcagcagcccatcgcccgcctctcaccccaccccctccagccagaggcgagaatcgcaggactcgggatcttcatcgggtggactagctgggatctccgcattggatttggggctgattaccactgcttgcctattattattgttgttgttactactattatttttttttacccaag

SEQ ID NO: 308 - DNA, 274 bp, Artificial
  Synthetic oligonucleotide
ggccccgagctccacggctggcgccccccagtggactgtgtccgggccaatgagctgtgtgccgccgaatccaactgcagctctcgctaccgcactctgcggcagtgcctggcaggccgcgaccgcaacaccatgctggccaacaaggagtgccaggcggccttggaggtcttgcaggagagcccgctgtacgactgccgctgcaagcggggcatgaagaaggagctgcagtgtctgcagatctactggagcatccacctggggctgaccgagg

SEQ ID NO: 309 - DNA, 355 bp, Artificial
  Synthetic oligonucleotide
ggacaggggcagacccggtggtcagcgccaagagcaaccattgcctggatgctgccaaggcctgcaacctgaatgacaactgcaagaagctgcgctcctcctacatctccatctgcaaccgcgagatctcgcccaccgagcgctgcaaccgccgcaagtgccacaaggccctgcgccagttcttcgaccgggtgcccagcgagtacacctaccgcatgctcttctgctcctgccaagaccaggcgtgcgctgagcgccgccggcaaaccatcctgcccagctgctcctatgaggacaaggagaagcccaactgcctggacctgcgtggcgtgtgccggactgaccacctgtgtcg

SEQ ID NO: 310 - DNA, 141 bp, Artificial
  Synthetic oligonucleotide
ggtttgacatgacacctaactatgtggactccagccccactggcatcgtggtgtccccctggtgcagctgtcgtggcagcgggaacatggaggaggagtgtgagaagttcctcagggacttcaccgagaacccatgcctcc

SEQ ID NO: 311 - DNA, 173 bp, Artificial
  Synthetic oligonucleotide
ggaacgccatccaggcctttggcaacggcacggacgtgaacgtgtccccaaaaggcccctcgttccaggccacccaggcccctcgggtggagaagacgccttctttgccagatgacctcagtgacagtaccagcttggggaccagtgtcatcaccacctgcacgtctgtccag

SEQ ID NO: 312 - DNA, 1387 bp, Artificial
  Synthetic oligonucleotide
ctcacgacaaatatcatcccagggagtaacaaggtgatcaaacctaactcaggccccagcagagccagaccgtcggctgccttgaccgtgctgtctgtcctgatgctgaaacaggccttgtaggctgtgggaaccgagtcagaagatttttgaaagctacgcagacaagaacagccgcctgacgaaatggaaacacacacagacacacacacaccttgcaaaaaaaaaattgtttttcccaccttgtcgctgaacctgtctcctcccaggtttcttctctggagaagtttttgtaaaccaaacagacaagcaggcaggcagcctgagagctggcccaggggtcccctggcaggggaaactctggtgccggggagggcacgaggctctagaaatgcccttcactttctcctggtgtttttctctctggacccttctgaagcagagaccggacaagagcctgcagcggaagggactctgggctgtgcctgaggctggctgggggcaggacaacacagctgcttccccaggctgcccactctggggacccgctgggggctggcagagggcatcggtcagcggggcagcggggctggccatgagggtccaccttcagccctttggcttcaaggatggagatggttttgccctccctctctgccctcgggtggggctggtgggtctgcagctggtgtgggaacttccccacggatggcggtggagggggttcgcaccgtgctgggctccccctgactgtagcacggagtgttggggctgggggccagctccaggagggcttgagagctcagcctgcctgggagagcccttgtggcgaggcattaaaacttgggcaccagcttctttctcggtggcagaaattttgaagtcagagagaaacggtcctttgttggcttctttgctttctcgtgggtcctttggcaggcctccctttggggagagggaggggagagaccacagccgggtgtgtgtctgcagcaccgtgggccctcaagctttcctgctgtcttctccctcctcctcctttcccctttctctttcctcatttcctagacgtacgtcaactgtatgtacataccggggctcctctcctaacatatatgtatatacacatccatatacatatattgtgtggtttcccctttctttcctttttttaagcaacaaaactatggaaataataccccaacagatgagcgaaaatgtattattgtaaagtttattttttttaatactgttgtctataatggggaaaaaggacattggccccgcagtgccctgccccagtcagcctggctgggctctggtgggggctcctgatccgcatccaagcttaaccaaggctccaataaacgtgctaggaagcaagctg

SEQ ID NO: 313 - DNA, 75 bp, Artificial
  Synthetic oligonucleotide
ggagaaagacaaaaaaacggtgggatttatttaacatgatcttggcaaacgtcttctgcctcttcttctttctag

SEQ ID NO: 314 - DNA, 84 bp, Artificial
  Synthetic oligonucleotide
gtgaggagttctacgaagcctccccctatgagccggtgacctcccgcctctcggacatcttcaggcttgcttcaatcttctcag

SEQ ID NO: 315 - DNA, 110 bp, Artificial
  Synthetic oligonucleotide
gtcccggctggccgacttccatgccaattgtcgagcctcctaccagacggtcaccagctgccctgcggacaattaccaggcgtgtctgggctcttatgctggcatgattg

SEQ ID NO: 316 - DNA, 54 bp, Artificial
  Synthetic oligonucleotide
gagcaggggctgaaggccaacaactccaaagagttaagcatgtgcttcacagag

SEQ ID NO: 317 - DNA, 424 bp, Artificial
  Synthetic oligonucleotide
acacagtactctcagcttgttggtggaagcccctcatctgccttcattctgaaggcagggcccggcagaggaaggatcagagggtcgcggccggagggtcccggccggtggggccaactcagagggagaggaaagggctagagacacgaagaacgcaaaccatcaaatttagaagaaaaagccctttgactttttccccctctccctccccaatggctgtgtagcaaacatccctggcgataccttggaaaggacgaagttggtctgcagtcgcaatttcgtgggttgagttcacagttgtgagtgcggggctcggagatggagccgtggtcctctaggtggaaaacgaaacggtggctctgggatttcaccgtaacaaccctcgcattgaccttcctcttccaagctagagaggtcagaggag

SEQ ID NO: 318 - DNA, 168 bp, Artificial
  Synthetic oligonucleotide
ctgctccagttgatgtactaaaagcactagattttcacaattctccagagggaatatcaaaaacaacgggattttgcacaaacagaaagaattctaaaggctcagatactgcttacagagtttcaaagcaagcacaactcagtgccccaacaaaacagttatttccag

SEQ ID NO: 319 - DNA, 214 bp, Artificial
  Synthetic oligonucleotide
gtggaactttcccagaagacttttcaatactatttacagtaaaaccaaaaaaaggaattcagtctttccttttatctatatataatgagcatggtattcagcaaattggtgttgaggttgggagatcacctgtttttctgtttgaagaccacactggaaaacctgccccagaagactatcccctcttcagaactgttaacatcgctgacgggaa

SEQ ID NO: 320 - DNA, 163 bp, Artificial
  Synthetic oligonucleotide
gtggcatcgggtagcaatcagcgtggagaagaaaactgtgacaatgattgttgattgtaagaagaaaaccacgaaaccacttgatagaagtgagagagcaattgttgataccaatggaatcacggtttttggaacaaggattttggatgaagaagtttttgag

SEQ ID NO: 321 - DNA, 129 bp, Artificial
  Synthetic oligonucleotide
ggggacattcagcagtttttgatcacaggtgatcccaaggcagcatatgactactgtgagcattatagtccagactgtgactcttcagcacccaaggctgctcaagctcaggaacctcagatagatgag

SEQ ID NO: 322 - DNA, 215 bp, Artificial
  Synthetic oligonucleotide
gtgaggagcacaagaccagagaaggtcttcgtatttcagtgatatggacatagcagtgcagtttttgaacttatacttatttattccattttaattaagctatgctttgtattttaattgtgttgtaatatttccaggaaaaagtgacttgaatatatttggtacttgttttcttgctgtttaagcatttgattacataaatttattagcaataa

SEQ ID NO: 323 - DNA, 214 bp, Artificial
  Synthetic oligonucleotide
ccaaatccagttgaagaaatatttactgaagaatatctaacgggagaggattatgattcccagaggaaaaattctgaggatacactatatgaaaacaaagaaatagacggcagggattctgatcttctggtagatggagatttaggcgaatatgatttttatgaatataaagaatatgaagataaaccaacaagcccccctaatgaagaatttg

SEQ ID NO: 324 - DNA, 430 bp, Artificial
  Synthetic oligonucleotide
gtctccttttctttctcattattttacaaaaaagtaattaagtttgcttgtgacaaaagatttgtaggaagacatgatgaaaggaaagttgtgaagttgtcattgccattatatctcatatatgaatagcaaatgatgttcttgttaataactcaatgtctggatcaaaacaagaataaatctataattaaacacatgtctttttccctgatctccactgtgagattccttgagtaatattttgtcccctgtagtcatagcacatttctatctggctctttccaacaccttttttctttcattatttttgttgatttctacaaacatattaattaaaaaaaactaatagctttatcgaagtgtaatttaaatactataaatattcccttgttttaagtgtacaagtgaattatttttactaaatttacag

SEQ ID NO: 325 - DNA, 639 bp, Artificial
  Synthetic oligonucleotide
atgtgctgcaatctaagtttcggaatacttataccactccagaaataatcctcgtgttaatattcagtccatgtttccaccccctcagacctagctaacaattaatttgctttctgtctctgtagatttgagttttctgaatatttcatgtgaatgaaacttatgaataaatttatgatttaatcatatgaatgtgtatgtgacctttatgtctgacttctttcattttaggttcatccatgctgtagcatacatatattagtactttgctccttattttgttctcatagtattccattgattgggtataccaggttctgtttacttttacttggcagttgatagaataggtgtagtttatactttttcgctattctccataccggtgctgtagtgaataattgcatacaagtctttgtatagatgtgttttcattctttttggtatatacttagaagcagaattcttgtgttatggtaaacttatattcaatattttgtgaattccactcttttccatatcgattgtaccattttcccttccaagtaaccatgtatgaggatagtcatttctgcacattctcactaatgcttgttattgtctgtcttcttgattacgatcattctcgttggtgtgaaa

SEQ ID NO: 326 - DNA, 129 bp, Artificial
  Synthetic oligonucleotide
gtaagtatgatgataataaatagccagacaatcatggttgtgaattacagctcttctttcattactctcatgctgtgattccacagtgtgtgggagagaaaataaacacatgtcaatcaaatcagtcaa

SEQ ID NO: 327 - DNA, 117 bp, Artificial
  Synthetic oligonucleotide
tatgcaccagaggatataatcgaatatgactatgagtatggggaagcagagtataaagaggctgaaagtgtaacagagggacccactgtaactgaggagacaatagcacagacggag

SEQ ID NO: 328 - DNA, 93 bp, Artificial
  Synthetic oligonucleotide
gcaaacatcgttgatgattttcaagaatacaactatggaacaatggaaagttaccagacagaagctcctaggcatgtttctgggacaaatgag

SEQ ID NO: 329 - DNA, 41 bp, Artificial
  Synthetic oligonucleotide
gtccaggtgtaccagcagaaactgatattacagaaacaagc

SEQ ID NO: 330 - DNA, 63 bp, Artificial
  Synthetic oligonucleotide
ataaatggccatggtgcatatggagagaaaggacagaaaggagaaccagcagtggttgagcct

SEQ ID NO: 331 - DNA, 42 bp, Artificial
  Synthetic oligonucleotide
ggtatgcttgtcgaaggaccaccaggaccagcaggacctgca

SEQ ID NO: 332 - DNA, 63 bp, Artificial
  Synthetic oligonucleotide
ggtattatgggtcctccaggtctacaaggccccactggaccccctggtgaccctggcgatagg

SEQ ID NO: 333 - DNA, 75 bp, Artificial
  Synthetic oligonucleotide
ggccccccaggacgtcctggcttaccaggggctgatggtctacctggtcctcctggtactatgttgatgttaccg

SEQ ID NO: 334 - DNA, 84 bp, Artificial
  Synthetic oligonucleotide
ttccgttatggtggtgatggttccaaaggaccaaccatctctgctcaggaagctcaggctcaagctattcttcagcaggctcgg

SEQ ID NO: 335 - DNA, 57 bp, Artificial
  Synthetic oligonucleotide
attgctctgagaggcccacctggcccaatgggtctaactggaagaccaggtcctgtg

SEQ ID NO: 336 - DNA, 54 bp, Artificial
  Synthetic oligonucleotide
ggggggcctggttcatctggggccaaaggtgagagtggtgatccaggtcctcag

SEQ ID NO: 337 - DNA, 54 bp, Artificial
  Synthetic oligonucleotide
ggccctcgaggcgtccagggtccccctggtccaacgggaaaacctggaaaaagg

SEQ ID NO: 338 - DNA, 54 bp, Artificial
  Synthetic oligonucleotide
ggtcgtccaggtgcagatggaggaagaggaatgccaggagaacctggggcaaag

SEQ ID NO: 339 - DNA, 54 bp, Artificial
  Synthetic oligonucleotide
ggagatcgagggtttgatggacttccgggtctgccaggtgacaaaggtcacagg

SEQ ID NO: 340 - DNA, 54 bp, Artificial
  Synthetic oligonucleotide
ggtgaacgaggtcctcaaggtcctccaggtcctcctggtgatgatggaatgagg

SEQ ID NO: 341 - DNA, 45 bp, Artificial
  Synthetic oligonucleotide
ggagaagatggagaaattggaccaagaggtcttccaggtgaagct

SEQ ID NO: 342 - DNA, 54 bp, Artificial
  Synthetic oligonucleotide
ggcccacgaggtttgctgggtccaaggggaactccaggagctccagggcagcct

SEQ ID NO: 343 - DNA, 45 bp, Artificial
  Synthetic oligonucleotide
ggtatggcaggtgtagatggccccccaggaccaaaagggaacatg

SEQ ID NO: 344 - DNA, 54 bp, Artificial
  Synthetic oligonucleotide
ggtccccaaggggagcctgggcctccaggtcaacaagggaatccaggacctcag

SEQ ID NO: 345 - DNA, 45 bp, Artificial
  Synthetic oligonucleotide
ggtcttcctggtccacaaggtccaattggtcctcctggtgaaaaa

SEQ ID NO: 346 - DNA, 54 bp, Artificial
  Synthetic oligonucleotide
ggaccacaaggaaaaccaggacttgctggacttcctggtgctgatgggcctcct

SEQ ID NO: 347 - DNA, 45 bp, Artificial
  Synthetic oligonucleotide
ggtcatcctgggaaagaaggccagtctggagaaaagggggctctg

SEQ ID NO: 348 - DNA, 54 bp, Artificial
  Synthetic oligonucleotide
ggtccccctggtccacaaggtcctattggatacccgggcccccggggagtaaag

SEQ ID NO: 349 - DNA, 45 bp, Artificial
  Synthetic oligonucleotide
ggagcagatggtgtcagaggtctcaagggatctaaaggtgaaaag

SEQ ID NO: 350 - DNA, 54 bp, Artificial
  Synthetic oligonucleotide
ggtgaagatggttttccaggattcaaaggtgacatgggtctaaaaggtgacaga

SEQ ID NO: 351 - DNA, 108 bp, Artificial
  Synthetic oligonucleotide
ggagaagttggtcaaattggcccaagaggggaagatggccctgaaggacccaaaggtcgagcaggcccaactggagacccaggtccttcaggtcaagcaggagaaaag

SEQ ID NO: 352 - DNA, 54 bp, Artificial
  Synthetic oligonucleotide
ggaaaacttggagttccaggattaccaggatatccaggaagacaaggtccaaag

SEQ ID NO: 353 - DNA, 54 bp, Artificial
  Synthetic oligonucleotide
ggttccactggattccctgggtttccaggtgccaatggagagaaaggtgcacgg

SEQ ID NO: 354 - DNA, 45 bp, Artificial
  Synthetic oligonucleotide
ggagtagctggcaaaccaggccctcggggtcagcgtggtccaacg

SEQ ID NO: 355 - DNA, 54 bp, Artificial
  Synthetic oligonucleotide
ggtcctcgaggttcaagaggtgcaagaggtcccactgggaaacctgggccaaag

SEQ ID NO: 356 - DNA, 45 bp, Artificial
  Synthetic oligonucleotide
ggcacttcaggtggcgatggccctcctggccctccaggtgaaaga

SEQ ID NO: 357 - DNA, 54 bp, Artificial
  Synthetic oligonucleotide
ggtcctcaaggacctcagggtccagttggattccctggaccaaaaggccctcct

SEQ ID NO: 358 - DNA, 54 bp, Artificial
  Synthetic oligonucleotide
ggaccacctgggaaggatgggctgccaggacaccctgggcaacgtggggagact

SEQ ID NO: 359 - DNA, 54 bp, Artificial
  Synthetic oligonucleotide
ggatttcaaggcaagaccggccctcctgggccagggggagtggttggaccacag

SEQ ID NO: 360 - DNA, 108 bp, Artificial
  Synthetic oligonucleotide
ggaccaaccggtgagactggtccaataggggaacgtgggcatcctggccctcctggccctcctggtgagcaaggtcttcctggtgctgcaggaaaagaaggtgcaaag

SEQ ID NO: 361 - DNA, 90 bp, Artificial
  Synthetic oligonucleotide
ggtgatccaggtcctcaaggtatctcagggaaagatggaccagcaggattacgtggtttcccaggggaaagaggtcttcctggagctcag

SEQ ID NO: 362 - DNA, 54 bp, Artificial
  Synthetic oligonucleotide
ggtgcacctggactgaaaggaggggaaggtccccagggcccaccaggtccagtt

SEQ ID NO: 363 - DNA, 1133 bp, Artificial
  Synthetic oligonucleotide
tgagacaagatgtcactctgtcacccaggctggagtgcagtggcaggatcacggctcactgcagcctcgacctccctgggctcaggtgatcctcccacctcagcctaccgagtagctgggactacaggtgcatgtcaccatacccggttaatttttgtattttttttagagacaaggtctcaccatgttgcccaggctggtctcaaactcctgtgctcaggcaatgcgtcagcctcgacatctcaaagtgctgtgattacaggcgtgagccccgacacctggcctagttctattttctaaatgtgaattctgtaaagatatcttttaaaaataaagttctgtttttggtagaaaatgtaaaaatagataaatatggagggaagaaatcccccctggaatacagacgcttcctctcccttccagccttttccccatatgaacattgctgtgagtgagacttacatgcaatgtaatttctttttgagcttaacattacaacataaattctcaaactctgatgttcattaaacaccccagccccatcctgggaacttgggcttggggctcggggtgttctgataatgatcaaagtatgagaattgaacccatgaggactttgatccaagatactggggtgtggggaggggcaggcacaggtgtcctgggaacacactttgagaagcaatggcaaagctgggggtccagctaatgtgttacattagaatcacctcggggaggccctgggtgcccttctcagccctccctccggaggctgctgaagcccagcaaagccggagtcagagaacaatgtccgcctgagggcagggctgggctgggctggccttctggccctatctgctccgtgcccaacccagcgccccgcacagtcggagctttgtaaatacgaggtgactgtctgcctacaaactttgtaaacatcacttgaaatggccgcagggcattgcgacatggccataccactatttgtttgctattgaatttgtacttccctgccttacttttgctattgcaaaccatgctgtcactaaggtcttcatgcacacagttgtgtcttggtcagatgatatgtttctaccaattttaattgtgtttctttccacctggacacacag

SEQ ID NO: 364 - DNA, 790 bp, Artificial
  Synthetic oligonucleotide
ctctctggcccagggctgggtcatcagcacaccctgctgctgctgttcagatctgcatcctggtcccgcttggtcccacagtgagaacgctttgctatcacatgggcaggctctgagagccctgccggcctggccttctcaaagaagacctgagagcttgggacccaagcagagaggaagaacagggctcagggtgcttgctccatgctcgctccacacctggggctcaaccctggctttccccggctccctgtgtgacttcagggcaggtcccttgggccctctgggccttatcatcttcatctgtaacagggcgatgcctctgccgtgtctggtggtgttgaggagttcctgtttgtgtaagcagctagttcagtgccagcacgagatgggaggcccatgaagttagcagtgcacaaaaaatagagcaaagactggatgcatttcctgagaacaaccatcactgtaaagcactttacaaatccaaagacaacccccggcaaaaactcaaaatgaaactccctctcgcagagcacaattccaattcgctctaaaaacattacaagttagttcatgtcatgccagatagctgaaggcagctcacaagttcttaaggccaggaatgccatgtgtctgctatgcacagctggccctggccctgagcctgaatgacagcacaaaggtgacgcagatgtgggtgccctgctcctgcccagcagcagtgcttggtggaggctgaggccctgcacaggcaccctcactgctgaccttgagcctctctctcctctag

SEQ ID NO: 365 - DNA, 643 bp, Artificial
  Synthetic oligonucleotide
agtggaaaagacaaggatgccgtggataaattgctcaaggacctggacgccaatggagatgcccaggtggacttcagtgagttcatcgtgttcgtggctgcaatcacgtctgcctgtcacaagtactttgagaaggcaggactcaaatgatgccctggagatgtcacagattcctggcagagccatggtcccaggcttcccaaaagtgtttgttggcaattattcccctaggctgagcctgctcatgtacctctgattaataaatgcttatgaaatgatcctggtctcagagaaactggttatttccttaaaacctcagtgtcctctccccacaaaacagaattcactaattaaacttgtcatttcattactcattgcctgcctgcagtggtgagacagatgaagaagacaaggcagtcgataaaaatccatttgttggccatcttctgagtgcccactgagacacagtcccacctttggccgtgtgaatgccaccatgtcctggacccaagggaggctcgggtacacacatccatgtatttattcatctacttcgtaattcatttagtcggtcacgtagccactcattgaacctgggcccctccatctctccaaacagcatgttttcttcaagtaacatact

SEQ ID NO: 366 - DNA, 264 bp, Artificial
  Synthetic oligonucleotide
gggtctcccacttgtccagacagcggccgggcttgtcacggggctctgtgcagccttttccactctcccggctgccagcgtcccgccccgtcccctcccagcccccaagggaggaggggagagctgcagagaggaggaggggtcggggaggcccggctttataaaggcggctggaacaaccctgcccgccagaccccgtcgcccggatcccctgagctgcccgccatcccacgtgaccgcgccgccccccagctccaccgctga

SEQ ID NO: 367 - DNA, 156 bp, Artificial
  Synthetic oligonucleotide
ctatgatgggggctacatcaacgcctcagctgagggtgtgtccatccgcactggtctggagctctcccgggatcccgctggacggatgaaagtgtccaatgtctcctgccaggcctctgtctccagaatgcacgcggccttcgggggaaccttcaa

SEQ ID NO: 368 - DNA, 141 bp, Artificial
  Synthetic oligonucleotide
ctccccaaccgggcagtggagccccagctgcaggaggaagagcggatggtgtatgtggccttctctgagttcttcttcgactctgccatggagagctacttccgggcgggggccctgcagctgttgctggtgggggacaag

SEQ ID NO: 369 - DNA, 419 bp, Artificial
  Synthetic oligonucleotide
ctatcaattacagtccgtccaccacctccctgtgggctgtcctgagctctgttgggttcctgggatggaatcagtgcatcataaagggcattctttaagcagagaaggggccaggccaccccattcaggaactgctgcgggaataaagtgctaacttgcccccaggctgtctatgggagaccctgggcccagtctgggatgtacagggctctgggaagggggcagtcctggcggcagaacccggcctgcaggggcactttgcttagaagaggactctcctagcgggagaggctgggaggggctgcatcaggccgtggagctggttgctgtggtcatcagtatggctgcttgttcaggaagcgggagaacatggtgaaggcagcgaggggcttgtcggtgggaaccatgtggccggcgcc

SEQ ID NO: 370 - DNA, 232 bp, Artificial
  Synthetic oligonucleotide
gttcgtgagctcctgaccccaccattccctcctccccatataactgctcactcgggggcaattccttcatcccaaaccctttattcttcccagaaccctccccacccctctccaaaaaaacttgcccatacaggggccagatggtgacccatgacccagcctaaaaggcagccagagggaaaggacgggtgggtcctgctcctttgcctccggcccagttatctctcagcag

SEQ ID NO: 371 - DNA, 280 bp, Artificial
  Synthetic oligonucleotide
cttctggttgagggaatccacaaaccactcatcccccatgaaattgcaggccatgtctacatctccattatataataggatctggtatttctaaagcaggatggggtaaaaatgaggggtgtggaacaagcccagtccccagcccttccctagttcaaggcctacccctcaggaaattcaaggggccaagctagataacacgaaccagggaattttcatgttttctaacgacttactgcatgtccagtattctactaaatgttttatctgtgaaagtaga

SEQ ID NO: 372 - DNA, 73 bp, Artificial
  Synthetic oligonucleotide
gcccgctcgccatggccctcttcggggccctcttcctagcgctgctggcaggcgcacatgcagagttcccagg

SEQ ID NO: 373 - DNA, 18 bp, Artificial
  Synthetic oligonucleotide
ctgcaagatccgcgtcac

SEQ ID NO: 374 - DNA, 20 bp, Artificial
  Synthetic oligonucleotide
ctccaaggcgctggagctgg

SEQ ID NO: 375 - DNA, 8 bp, Artificial
  Synthetic oligonucleotide
tgaagcag

SEQ ID NO: 376 - DNA, 6 bp, Artificial
  Synthetic oligonucleotide
gagggg

SEQ ID NO: 377 - DNA, 35 bp, Artificial
  Synthetic oligonucleotide
ctgcgctttctggagcaagagctggagactatcac

SEQ ID NO: 378 - DNA, 51 bp, Artificial
  Synthetic oligonucleotide
cattccggacctgcggggcaaagaaggccacttctactacaacatctctga

SEQ ID NO: 379 - DNA, 92 bp, Artificial
  Synthetic oligonucleotide
gcctggacttgaaaggggagcagacaaatttcctgtcgttgggggaagttccctcttcttggccctggatctgaccctgaggcctcctgtag

SEQ ID NO: 380 - DNA, 16 bp, Artificial
  Synthetic oligonucleotide
ggtgaaggtcacagag

SEQ ID NO: 381 - DNA, 89 bp, Artificial
  Synthetic oligonucleotide
ctgcaactgacatcttccgagctcgatttccagccacagcaggagctgatgcttcaaatcaccaatgcctccttggggctgcgcttccg

SEQ ID NO: 382 - DNA, 24 bp, Artificial
  Synthetic oligonucleotide
gagacagctgctctactggttctt

SEQ ID NO: 383 - DNA, 52 bp, Artificial
  Synthetic oligonucleotide
gaaggtgtatgattttctctccacgttcatcacctcagggatgcgcttcctc

SEQ ID NO: 384 - DNA, 12 bp, Artificial
  Synthetic oligonucleotide
ctcaaccagcag

SEQ ID NO: 385 - DNA, 85 bp, Artificial
  Synthetic oligonucleotide
gtgtgggcagcgacaggtcgcagggtggcaagggtgggcatgctctcactttgagaaggccctgactctggctcccacctcgcag

SEQ ID NO: 386 - DNA, 64 bp, Artificial
  Synthetic oligonucleotide
atctgccctgtcctctaccacgcagggacggtcctgctcaactccctcctggacaccgtgcctg

SEQ ID NO: 387 - DNA, 7 bp, Artificial
  Synthetic oligonucleotide
tgcgcag

SEQ ID NO: 388 - DNA, 85 bp, Artificial
  Synthetic oligonucleotide
ttctgtggacgagcttgttggcattgactattccctcatgaaggatcctgtggcttccaccagcaacctggacatggacttccgg

SEQ ID NO: 389 - DNA, 36 bp, Artificial
  Synthetic oligonucleotide
ggggccttcttccccctgactgagaggaactggagc

SEQ ID NO: 390 - DNA, 45 bp, Artificial
  Synthetic oligonucleotide
gtgccccacgacctggacatgctgctgagggccacctactttggg

SEQ ID NO: 391 - DNA, 15 bp, Artificial
  Synthetic oligonucleotide
agcattgtcctgctg

SEQ ID NO: 392 - DNA, 30 bp, Artificial
  Synthetic oligonucleotide
agcccagcagtgattgactccccattgaag

SEQ ID NO: 393 - DNA, 87 bp, Artificial
  Synthetic oligonucleotide
ctggagctgcgggtcctggccccaccgcgctgcaccatcaagccctctggcaccaccatctctgtcactgctagcgtcaccattgcc

SEQ ID NO: 394 - DNA, 30 bp, Artificial
  Synthetic oligonucleotide
ctggtcccaccagaccagcctgaggtccag

SEQ ID NO: 395 - DNA, 18 bp, Artificial
  Synthetic oligonucleotide
ctgtccagcatgactatg

SEQ ID NO: 396 - DNA, 27 bp, Artificial
  Synthetic oligonucleotide
gacgcccgtctcagcgccaagatggct

SEQ ID NO: 397 - DNA, 41 bp, Artificial
  Synthetic oligonucleotide
ctccgggggaaggccctgcgcacgcagctggacctgcgcag

SEQ ID NO: 398 - DNA, 43 bp, Artificial
  Synthetic oligonucleotide
gttccgaatctattccaaccattctgcactggagtcgctggct

SEQ ID NO: 399 - DNA, 15 bp, Artificial
  Synthetic oligonucleotide
ctgatcccattacag

SEQ ID NO: 400 - DNA, 49 bp, Artificial
  Synthetic oligonucleotide
gcccctctgaagaccatgctgcagattggggtgatgcccatgctcaatg

SEQ ID NO: 401 - DNA, 83 bp, Artificial
  Synthetic oligonucleotide
gtaaggctggggtgtgaggatggaggaagaaaggaggggtgaactgggcgggcccagactgagcggggtgctcccacccacag

SEQ ID NO: 402 - DNA, 41 bp, Artificial
  Synthetic oligonucleotide
agcggacctggcgtggggtgcagatcccactacctgagggc

SEQ ID NO: 403 - DNA, 36 bp, Artificial
  Synthetic oligonucleotide
atcaactttgtgcatgaggtggtgacgaaccatgcg

SEQ ID NO: 404 - DNA, 24 bp, Artificial
  Synthetic oligonucleotide
ggattcctcaccatcggggctgat

SEQ ID NO: 405 - DNA, 36 bp, Artificial
  Synthetic oligonucleotide
ctccactttgccaaagggctgcgagaggtgattgag

SEQ ID NO: 406 - DNA, 23 bp, Artificial
  Synthetic oligonucleotide
aagaaccggcctgctgatgtcag

SEQ ID NO: 407 - DNA, 9 bp, Artificial
  Synthetic oligonucleotide
ggcgtccac

SEQ ID NO: 408 - DNA, 23 bp, Artificial
  Synthetic oligonucleotide
tgcccccacaccgtccacagcag

SEQ ID NO: 409 - DNA, 24 bp, Artificial
  Synthetic oligonucleotide
ctgtctgagccctcaatccccaag

SEQ ID NO: 410 - DNA, 7 bp, Artificial
  Synthetic oligonucleotide
ctggcag

SEQ ID NO: 411 - DNA, 20 bp, Artificial
  Synthetic oligonucleotide
ctgtcattcaggaccccaac

SEQ ID NO: 412 - DNA, 90 bp, Artificial
  Synthetic oligonucleotide
ccctctcagcccctcttttcccacattcatagcctgtagtgccccctctaacccccagtgccacagagaagacgggatttgaagctgtac

SEQ ID NO: 413 - DNA, 22 bp, Artificial
  Synthetic oligonucleotide
ccaatttaattccataatcaat

SEQ ID NO: 414 - DNA, 12 bp, Artificial
  Synthetic oligonucleotide
ctgaggagcaat

SEQ ID NO: 415 - DNA, 13 bp, Artificial
  Synthetic oligonucleotide
gcccagtccctac

SEQ ID NO: 416 - DNA, 105 bp, Artificial
  Synthetic oligonucleotide
cttgatcgtgagaaaggcgatgtgggagaactccttcacgaagccggcaatctgctccccgctgtccccgtacttcactaaccagggccggcgctgcacctccat

SEQ ID NO: 417 - DNA, 108 bp, Artificial
  Synthetic oligonucleotide
ctgccccaccaggaaagacatcagcctacagcagctgcatccttgctcacagctaccagcaagaccttagggctgggaattcctccacacttgccctctgtgggccag

SEQ ID NO: 418 - DNA, 90 bp, Artificial
  Synthetic oligonucleotide
agccaggcagccagctggccactcccaggcatacccgctcccaatcctccacagcagcccctatcccagggccaggaatctctaccttac

SEQ ID NO: 419 - DNA, 226 bp, Artificial
  Synthetic oligonucleotide
gtgagagcgaggcaacctttccagagggtcaggacagagattacctgggttctccgctggaaaagagcgaaattccaacttttggagaggactggggtcagaggtcatggtccccatgtgattctccgaggatcctgagggtcgtggtttatggagatgccttcaggaccgaggggcggcgtgtctggccagatgggatctctgctcaccctcttctttccttcag

SEQ ID NO: 420 - DNA, 374 bp, Artificial
  Synthetic oligonucleotide
gtgagaaacctcttctgcccaccctgggccagccagatgaccaatccctcacgacatgcaatgtcgggaggacttcctttgggcctgcccgcactgttagctcccgactctgtaggccagacctgacagggcccaggctgctgaccatcatccccatgttaccaccttttcctatgcatctcacaggccccattcttgggaatctcccctgcccactctcagccctacctctcagtctgcatagagatggctattctgctggctccgattctcatgactctcccctccattcaggggcctagtcttgcattcctgttctcttgggttttcttaccagtgacacctcagccttctgaggacttatttcttggtag

SEQ ID NO: 421 - DNA, 132 bp, Artificial
  Synthetic oligonucleotide
gtgaggggttcagggtgacatgggtgctctgaggctattaggatgtggttgctgtagatccagagcttagtagaaagaactggttgggacctagaggcctgactttccccgttttctctcctggttctacag

SEQ ID NO: 422 - DNA, 149 bp, Artificial
  Synthetic oligonucleotide
gtaagcagatctgagccagagttagggtttgaagacacaaacctgacactcttaatcttttctgaaggtcaagatcagtcccaggcccttctcagtgtaggcccttgataggtaggttgaggctgtggggcttacacctctttttccag

SEQ ID NO: 423 - DNA, 144 bp, Artificial
  Synthetic oligonucleotide
gtgggggccaaggaggggtgggaaaagggcctcagggctccagtaccaggaggatccagacttccctcctgttatgatgggtagagttgcatgtctgtatcagtctcccttggcttgttgattgggattgttgtgggcttccag

SEQ ID NO: 424 - DNA, 145 bp, Artificial
  Synthetic oligonucleotide
gtggaggcagagcggcggaaacgggccacagttctagagtctgaggggacccgagagtcggccatcaatgtggcagaagggaagaaacaggcccagatcctggcctccgaagcagaaaaggctgaacagataaatcaggcagcag

SEQ ID NO: 425 - DNA, 123 bp, Artificial
  Synthetic oligonucleotide
gtcaggagagggtagaggctgagggaggagcaaggcatgggcctttgaagattggtgctggggcaggatctttggggtactttgacttcatgggtcaagcaagctctgtcccttctcttgcag

SEQ ID NO: 426 - DNA, 205 bp, Artificial
  Synthetic oligonucleotide
gtgagaggcccctgggtgggaatggggacaggaattgacagtggaaggggttctcttatctacgcttgaggagagttccgcctctgtgggctctgttgagccagattacatggtcctttttattgtgaactgctttcttcattccccatcccccccttcttctccgtatcggtgatctctgatttttatccccctgtgatcacag

SEQ ID NO: 427 - DNA, 129 bp, Artificial
  Synthetic oligonucleotide
aatggagatgcagcagcttcactgactgtggccgagcagtatgtcagcgcgttctccaaactggccaaggactccaacactatcctactgccctccaaccctggcgatgtcaccagcatggtggctcag

SEQ ID NO: 428 - DNA, 420 bp, Artificial
  Synthetic oligonucleotide
gttagagctctctgaggacccagcacagagcactggtgccagggaccaaactgagaccccaccaccgtcatcaacacttacataccataaaggtcttcagagtgccttggccctagacctcccttcgttctttgtagagatggaatctaagaatgaaacatctccactcagtcctgcaaatatggaagttcttgagatacctttttttggtagatacttgtgctggtattctgagagtcactttactctgatggtttgcaagattcctaaaatcaactccagagcttacaagacaggtttgagagagggagaaaggaaaaccaacttactggcccccatgccatcttttcccgtttagccattggtaggctgggctgcacctctgtcaagtgtcctcatggtattctctctgttcctctc

SEQ ID NO: 429 - DNA, 120 bp, Artificial
  Synthetic oligonucleotide
tccagactcactctccagtgggagcagcagagatgtccagggtacagatgcaagtcttgatgaggaacttgatcgagtcaagatgagttagtggagctgggcttggccagggagtctggg

SEQ ID NO: 430 - DNA, 230 bp, Artificial
  Synthetic oligonucleotide
gacaaggaagcagattttcctgattctggctctagcttccctgccaagattttggtttttatttttttatttgaactttagtcgtgtaataaactcaccagtggcaaaccaaaaaaaaaaatctttgattggggaatgaagttgggaaagtcactagcattttccttggatccagtcctgtcagcatgatgcctccatgaataagagtgaacttcttgtaaagtgaaact

SEQ ID NO: 431 - DNA, 41 bp, Artificial
  Synthetic oligonucleotide
agtacatccgggggagcggaactgcaagaggaaaggctcgg

SEQ ID NO: 432 - DNA, 69 bp, Artificial
  Synthetic oligonucleotide
gtaggcttctgggagcgaccgctccgctcgtctcgttggttccggaggtcgctgcggcggtgggaaatg

SEQ ID NO: 433 - DNA, 42 bp, Artificial
  Synthetic oligonucleotide
ctggcgcgcgcggcgcggggcactggggcccttttgctgagg

SEQ ID NO: 434 - DNA, 33 bp, Artificial
  Synthetic oligonucleotide
ggctctctactggcttctggccgcgctccgcgc

SEQ ID NO: 435 - DNA, 105 bp, Artificial
  Synthetic oligonucleotide
cgcgcctcctctggattgccccgaaacaccgtggtactgttcgtgccgcagcaggaggcctgggtggtggagcgaatgggccgattccaccggatcctggagcct

SEQ ID NO: 436 - DNA, 117 bp, Artificial
  Synthetic oligonucleotide
gagctgctgcttttctgggcatgttccatgtgttgactccctacatactccaggactagcttaggtcccaacccaatagttcccagccttctgaggacccatgactcctctttccag

SEQ ID NO: 437 - DNA, 100 bp, Artificial
  Synthetic oligonucleotide
ggtttgaacatcctcatccctgtgttagaccggatccgatatgtgcagagtctcaaggaaattgtcatcaacgtgcctgagcagtcggctgtgactctcg

SEQ ID NO: 438 - DNA, 59 bp, Artificial
  Synthetic oligonucleotide
acaatgtaactctgcaaatcgatggagtcctttacctgcgcatcatggacccttacaag

SEQ ID NO: 439 - DNA, 33 bp, Artificial
  Synthetic oligonucleotide
gcaagctacggtgtggaggaccctgagtatgcc

SEQ ID NO: 440 - DNA, 13 bp, Artificial
  Synthetic oligonucleotide
gtcacccagctag

SEQ ID NO: 441 - DNA, 16 bp, Artificial
  Synthetic oligonucleotide
ctcaaacaaccatgag

SEQ ID NO: 442 - DNA, 22 bp, Artificial
  Synthetic oligonucleotide
atcagagctcggcaaactctct

SEQ ID NO: 443 - DNA, 18 bp, Artificial
  Synthetic oligonucleotide
ctggacaaagtcttccgg

SEQ ID NO: 444 - DNA, 31 bp, Artificial
  Synthetic oligonucleotide
gaacgggagtccctgaatgccagcattgtgg

SEQ ID NO: 445 - DNA, 5 bp, Artificial
  Synthetic oligonucleotide
atgcc

SEQ ID NO: 446 - DNA, 99 bp, Artificial
  Synthetic oligonucleotide
atcaaccaagctgctgactgctggggtatccgctgcctccgttatgagatcaaggatatccatgtgccaccccgggtgaaagagtctatgcagatgcag

SEQ ID NO: 447 - DNA, 80 bp, Artificial
  Synthetic oligonucleotide
gagaggccagtgcagttctggcgaaggccaaggctaaagctgaagctattcgaatcctggctgcagctctgacacaacat

SEQ ID NO: 448 - DNA, 5 bp, Artificial
  Synthetic oligonucleotide
ctcag

SEQ ID NO: 449 - DNA, 47 bp, Artificial
  Synthetic oligonucleotide
gccatgggtgtatatggagccctcaccaaagccccagtgccagggac

SEQ ID NO: 450 - DNA, 153 bp, Artificial
  Synthetic oligonucleotide
acactaaaagaacaaacaccttgctcttcgagatgagacattttgccaagcagttgaccacttagttctcaagaagcaactatctctttcatgtgccttctgaggaagtattcagagggggaatatcaaatgtctttcccttggactctccca

SEQ ID NO: 451 - DNA, 744 bp, Artificial
  Synthetic oligonucleotide
ggtctcactgtgtcacgaggctggagtgcagtggaacaatttcagcacactgcaacctctgcctcccaggctcaaatgatcatcccacctaagcctccggagtagctgggaccacaggcaagcgccaccatgcccagctgataccaatgtcttttaaaaaatgttgtatgtggaaataaattgagacttatagaaaagctgcaaaaatagtgcagtttctatatatccttcccccatctttggctagtgttaacaatctacataaccgcagtacgatgatcaaggctaggaaattaacattggcacagtactgttaatgaaaccatgctttgttttgagattcccacagttttgcctttttctgttccaagatcctatccaggatcccacgttgcatttcattgtcatgtctccttctcctctaacctctgacaatgcatcattctttccatgtcttttgtgatgttgacacttttgaagaggactggtccagatttttgtacactgtccctcagtttgggattgtctgctgttttctcatgaacagatagaggttttgcatttttgacaagaatcctcagaagagatgcacccttctcagtgcactgtagcaaggggcgcatgctgtcaatgtcttactggtgatgttaactttgatcgcttttgattcagatagtatctgctgggtttttccactgtaaagttactattttttccattgtaattaataaataacttgaggga

SEQ ID NO: 452 - DNA, 174 bp, Artificial
  Synthetic oligonucleotide
gtaccagtccttctgctccccagggaaactgaactcagtttgcatcagctgctgcaacacccctctttgtaacgggccaaggcccaagaaaaggggaagttctgcctcggccctcaggccagggctccgcaccaccatcctgttcctcaaattagccctcttctcggcacactg

SEQ ID NO: 453 - DNA, 309 bp, Artificial
  Synthetic oligonucleotide
agaagaggaagacaggaagggggtggggatgtgaagcgaccgtcccagccttccccgcccgccacccccaccccaactcggcagccgtcacgtgatgcctggagtgggaggtggggagaaaaggcgagacttttgtgggtgctcccgatcgccagtagttccttcagtctcagccgccaactccggaggcgcggtgctcggcccgggagcgcgagcgggaggagcagagacccgcagccgggagcccgagcgcgggcgatgcaggctccgcgagcggcacctgcggctcctctaagctacgaccgtcgt

SEQ ID NO: 454 - DNA, 487 bp, Artificial
  Synthetic oligonucleotide
gtgagtttcttctgggtgtccttttattctgggtagggagcgggagtccgtgttctcttttgttcctgtgcaaataatgaaagagctcggtaaagcattctgaataaattcagcctgactgaattttcagtatgtacttgaaggaaggaggtggagtgaaagttcacccccatgtctgtgtaaccggagtcaaggccaggctggcagagtcagtccttagaagtcactgaggtgggcatctgccttttgtaaagcctccagtgtccattccatccctgatgggggcatagtttgagactgcagagtgagagtgacgttttcttagggctggagggccagttcccactcaaggctccctcgcttgacattcaaacttcatgctcctgaaaaccattctctgcagcagaattggctggtttcgcgcctgagttgggctctagtgactcgagactcaatgactgggacttagactggggctcggcctcgc

SEQ ID NO: 455 - DNA, 418 bp, Artificial
  Synthetic oligonucleotide
ggagagacagagaaaagaaaaacacagcatgagaacacagtaaataaataaaaccataaaatatttagcccctctgttctgtgcttactggccaggaaatggtaccaatttttcagtgttggacttgacagcttcttttgccacaagcaagagagaatttaacactgtttcaaacccgggggagttggctgtgttaaagaaagaccattaaatgctttagacagtgtatttataccagttgatgtctgttaattttaaaaaaatgttttcattggtgtttgtttgcgtatccagaaagcagttcatgttatccataaatctggttttgtctttttttgttttaaagaaaaagatgtatacatacagtatagctgcattagataaagcagtgtttgtattttaaaggatgtctgcacaa

SEQ ID NO: 456 - DNA, 44 bp, Artificial
  Synthetic oligonucleotide
gctttgcgctgcaaatccagtgctaccagtgtgaagaattccag

SEQ ID NO: 457 - DNA, 94 bp, Artificial
  Synthetic oligonucleotide
ctgaacaacgactgctcctcccccgagttcattgtgaattgcacggtgaacgttcaagacatgtgtcagaaagaagtgatggagcaaagtgccg

SEQ ID NO: 458 - DNA, 4 bp, Artificial
  Synthetic oligonucleotide
acag

SEQ ID NO: 459 - DNA, 58 bp, Artificial
  Synthetic oligonucleotide
ggatcatgtaccgcaagtcctgtgcatcatcagcggcctgtctcatcgcctctgccgg

SEQ ID NO: 460 - DNA, 11 bp, Artificial
  Synthetic oligonucleotide
ctgaagctgaa

SEQ ID NO: 461 - DNA, 63 bp, Artificial
  Synthetic oligonucleotide
ggagatgccaccccctcctgcattgttcttccagccctcgcccccaaccccccacctccctga

SEQ ID NO: 462 - DNA, 30 bp, Artificial
  Synthetic oligonucleotide
tctgaaaagtgcttaagaaaatcttctcag

SEQ ID NO: 463 - DNA, 84 bp, Artificial
  Synthetic oligonucleotide
ttctccttgcagaggactggcgccgggacgcgaagagcaacgggcgctgcacaaagcgggcgctgtcggtggtggagtgcgcat

SEQ ID NO: 464 - DNA, 26 bp, Artificial
  Synthetic oligonucleotide
gtacgcgcaggcgcttctcgtggttg

SEQ ID NO: 465 - DNA, 113 bp, Artificial
  Synthetic oligonucleotide
gcgtgctgcagcgacaggcggcagcacagcacctgcacgaacacccgccgaaactgctgcgaggacaccgtgtacaggagcgggttgatgaccgagctgaggtagaaaaacgt

SEQ ID NO: 466 - DNA, 82 bp, Artificial
  Synthetic oligonucleotide
ctccgagaaggggaggaggatcatgtacgcccggaagtaggacctcgtccagtcgtgcttgggtttggccgcagccatgatc

SEQ ID NO: 467 - DNA, 24 bp, Artificial
  Synthetic oligonucleotide
ctccgaatctggttgggcatccag

SEQ ID NO: 468 - DNA, 28 bp, Artificial
  Synthetic oligonucleotide
catacggccaatgtcacaacaatcagcc

SEQ ID NO: 469 - DNA, 10 bp, Artificial
  Synthetic oligonucleotide
ctccgcggca

SEQ ID NO: 470 - DNA, 21 bp, Artificial
  Synthetic oligonucleotide
ctgggcagacacgagcaggag

SEQ ID NO: 471 - DNA, 52 bp, Artificial
  Synthetic oligonucleotide
gcagcgcgggccccagcagcctcggcagccacagccgctgcagccggggcag

SEQ ID NO: 472 - DNA, 43 bp, Artificial
  Synthetic oligonucleotide
cctccgctgctgtcgcctcctctgatgcgcttgccctctcccg

SEQ ID NO: 473 - DNA, 32 bp, Artificial
  Synthetic oligonucleotide
gccccgggactccgggagaatgtgggtcctag

SEQ ID NO: 474 - DNA, 39 bp, Artificial
  Synthetic oligonucleotide
gcatcgcggcaactttttgcggattgttcttgcttccag

SEQ ID NO: 475 - DNA, 34 bp, Artificial
  Synthetic oligonucleotide
gtgagaatacccagaggccagcagccgaggccag

SEQ ID NO: 476 - DNA, 161 bp, Artificial
  Synthetic oligonucleotide
cccggatgaagagtaacgccattaccgccggagccgccgagagccttagccgacggaaactggacactggaccggcagcgccatgagactcctcccccgcttgctgctgcttctcttactcgtgttccctgccactgtcttgttccgaggcggccccagag

SEQ ID NO: 477 - DNA, 150 bp, Artificial
  Synthetic oligonucleotide
gtaatacagaagtattagttttaattcagatgtaggcattttaaaacgatgagcttgttcatatatatctgaatacccatatctgtaaagtaatattgttggcatttaaagggaatacgtaggtgatatagacacaataaaaaataaacc

SEQ ID NO: 478 - DNA, 161 bp, Artificial
  Synthetic oligonucleotide
caacaagggtacagaagattttattgttgaatccttagatgcctcattccgttatcctcaggactaccagttttatatccagaatttcacagctcttcctctgaacactgtagtgccaccccagagacaggcaacttttgagtactctttcattcctgcag

SEQ ID NO: 479 - DNA, 193 bp, Artificial
  Synthetic oligonucleotide
gtaagatcctctaaaccttctttttgtttaagttagagatggatgggggcggtgacgttgtttaatagaatatatctgttcattcagttgcctgttttgtggttgaacctgtgatagccaccagggaagcaaagataaattgcacgtttcttcttcaagtctaatccagtgggggaggcatatgaaaacaggc

SEQ ID NO: 480 - DNA, 185 bp, Artificial
  Synthetic oligonucleotide
gtaaatgttcctttgtgcaacaattcggtctttacttaacctgccctaatatttttcggcctgatgggaattagtgcagagaagccatgtcaccatagaaggcaactcctacttgtgtgtggactgagcaatcagagtctgtggcgataatattgctgaaaatgcactgcattcatttttctaaa

SEQ ID NO: 481 - DNA, 409 bp, Artificial
  Synthetic oligonucleotide
gtaacaaatttggtttttttttaaaccattaaaatctatgtgtgtgcgtgtgtatgtatgtgagcagttggtcttaccagaatcattgttgaactacctgaaacaagtctttagaatactaaatataatgctgttgtctcttcctttttgacattttctgatttttttcccccaaaactcagttaatatttacccactatgattattgatgtcctgccttgaacagttttaaagaaaacaatttttggaatagctcaaatttcaattgatggcacaaatcagcattttgttgttgttactgtattacaattagtattctaaaggcagaagcagaagtagctgctttttagcaatagaattgtttcagtattttgctgctgtttaatgcgcatcttcagaaaacttccca

SEQ ID NO: 482 - DNA, 342 bp, Artificial
  Synthetic oligonucleotide
gtggcttcaaggaatttggggatctctctggcaacaaattgtgaaacatgaaatttctgctgactttaatatatgaaacctaatcctacccccttttttaacaaaaagaaactagtacatttgtgaaaattgtgttgtgttgtccattgttgctctagttctgacccagaggtagctctggagtgattttagacctactcactcagttgtgtgtaggtttttttgttttgttttgagagagaatttttctctccttaatagaagcatcctttttaaagagaagttgccttggtccacacactaagcagaaaaccaagttatcaggacagagatatttcccag

SEQ ID NO: 483 - DNA, 498 bp, Artificial
  Synthetic oligonucleotide
ttactcctaatcaatgaagaaagtgagttggatatttttaaagcagttaactaattttttcttacctaatcttttgggagttttgcttgttgatataacctttttagttaacctgaaagattccaaaaattgttcttaagtgcttgagactggaaccaaaattaaattgtacttcataaaatcctcttatagagttactcttgccctagattgtaaattaagtttggcattattgtcagactggatggagggtgaagtaaaatagtatgaacaattaagaggctctccccctcttgtctttaagccatattctcctacatgtattttataagaaaatgttaagtcaaattttagtggctctttaattcctgacctcttcattctccttttcagtataacctcccctatgctcatgcccacacagacaaaaaaacaaaacgaaatacacacagaaaaaagtctttccaaactgtttaagtatttaaacatctgagccaa

SEQ ID NO: 484 - DNA, 512 bp, Artificial
  Synthetic oligonucleotide
agcagatagaagttattgtataattgttaatcactttgcaaataggggctatcaaattacctatattggcattgctggattataaactctatatctgtaatataaagtgtttgagtttttaattgggctgttatgatcagtagttgattttgagaaagctctatgagctctaagtaactgcatggttttttgtttaatgtaatataggagacccttcacattcccaaggaatatattccaaaacatttttgtgaatatctaagtttgtgaaactactagggcatgatacagtaaggtgtaattacagaatttacgaaatgtaaatggcctctacagagttttatggaatacctggtactaacgtaggcagctgcaaaaccacactgagttacagctgtcagccctcctcattcctaaataacttgccttacatatcagccctcccacttctgaagttcaaattagtgcctcggaaatgtagaatttattatttgtcatttttttttttttag

SEQ ID NO: 485 - DNA, 748 bp, Artificial
  Synthetic oligonucleotide
atgtctttttaaaatgtaaatatttggatgaagtttttctttgttttgatatattcatttgctacaccaactatgttttcagaattcatcttttgaacaacttggtttcagaatatgtaaaatgactttaaggatcttgtgtatcaaacctatccccggatgtgtgagaataatgtgttcataaagcatggatctcgctttggttgtatagcttcctcatttacttcatggtcttacatagctggtgactttcagggctaatctgccctctaaagcattgtcccaggagaggaaaaggaaatgggacctcagaagtagaagcctcagggaaggagtaaagtagaaatcagaagaaaagaagcttcacttgatagtaataaggtttttaacttcaagtaccttcagaaaatgtgattttgataagaggaaagggcaaatttagaccttaaaaaatatggaagaactactgccttaaaagtgcatttgtagcacatcagcctagaactgtatcatggctgtgctggggagaagtaaatggtggtaatgtaacattgccacctttacttaatgatgtgttattttcgaggtacagtagatcaatatagtaataggcgagcctcatatatagcattcatcttgtacaatgatatccatacccttgatatgaaggaaaattgacttggtttgtgcatttgaatactgaaataattttttaaaactcagtgacacataccatctcttgccaaga

SEQ ID NO: 486 - DNA, 370 bp, Artificial
  Synthetic oligonucleotide
ctagaccctgtattttagttcctaaattagatgtttaaatttaaaaacattttcagatgtacttaagtacttccatagtacttttttttttttttttttttttgccccctgagacggagtctctgtgtcacccaggctggagtgcagtggtgcgatctcggctcactgcaacttctgcctcttgggttcaagcagttctccctgtctcagcctcctgagtagcttggattacaggcgcccgtcaccgcacctgcctaatttttgcatttttagtagagacggggtttcgtcatttggccaggctggtcttgaactcctgaccacaggtgatacgcctgccttggcctcccaaagtgtgctgggattacag

SEQ ID NO: 487 - DNA, 986 bp, Artificial
  Synthetic oligonucleotide
gcgtgagccactgtgcccggcccactgttcactttttgaatggcatcattttatagctgtagaactaaaatcaatgtttgccccaattttcttaagtaaaactctactttgagctcttacctccaacttagtaaaaagcagcttcacacacaaacaagattcttactggtggaatgttaggtttcgttgttaagttaatctgtctataagctcatccttagaggatatttgaggaggaagaacaccttgcagctgacttgcaaacatctaaataatttatttcgggtgcttatgaatgttactaatggattttgtatgaatttttatcccttttcatttatacaaaaacctgggcttttatgttaattatatcatctgaggttctaaggttttttttttagattttgaaatttagggataatagctcttaggtttgggtaccactttgctgcagtttaagaaagggggaagggaactcatttattaaacatcaatcacgtgctgtgttctgtttgttttctagtcatcatatcacacacctttacgacagctcactgaaggaaggtgatactgttcccattttgtagatggaatagacaaaacctgaatttaagtagcttgctcaaggttccatattgaatatggaaagttcaaatcatctcagtaatgaatataccatatatacttgctgtattgtatctatgataattcagttacccacaatacccttttaaatttctgttaatgacatacctttaaatgtctccttgatgaacagaatcatggtctttaaaaacattttcatgggttgattgcattttcaagctctaaaggattgaaagataaatcttcacgttaaaggtgagagtgaagtatctgctcttgggttacagaaccagatagtactagaactaagattacagggtaaagctgcttttatcttttttctttttctttttcttttttttttgacatggggtctcact

SEQ ID NO: 488 - DNA, 951 bp, Artificial
  Synthetic oligonucleotide
gtattgcccaggctggaatgcagtggcatgatctcagctcacggcagcctctgcctcttgggctcaagcgattctcctgcttcagctttccaagtatttgggaccacaggcgcacaccacaggcctggctaatgtttttgttttgtttttggtagagacggggtttcaccatgttgccaggctggtctcgaactcctgagctcaagtgattcacccaccttggcctcacaaagtgtcaggcttacaggcgtgagccactgcgcccggctcacagggtaaggcttctgtctggtgtgttgtattacggattttgcttaataggcacagtgaggcattaaaaagaaaattcagtatgcctgtagaaaggataatccttgtttaaagtctccaaattgcagtcaaagatgttttgactgtgcctttttttgttcccctgctgtcccttatgtagacttctgtcagtacccatggcagcctgtcatcttgttgacatctccttctggactgtgagctctgtatctggcttgtttttcatccccagcttctagttcacaattaggtagaaccctattactctttgaagaaggaacaagaaaatgtgggccagttttcatttgccattcttccatgtgagttagtatggttcgtaagtattcctggtgatacgctagtattggcaattctgtgaggttgaacaaaggggtggtatggtgtgctagcgtgggaattaggagacctctgggtcttgacagtgccctggccactaagcaaaggcagttcatccttggagtctcaatgtgcttttttgttaattgagatatgcttgaagtatcagccctaaatagtctgattctgtgacctacaaacccttacttaattcagtgttactataaatgattcttcccttaaacctactttttacttagcaaaagagaaaaaaaaaaaaaggaa

SEQ ID NO: 489 - DNA, 186 bp, Artificial
  Synthetic oligonucleotide
acgctcatgtcaggctgcctgggtttgaaccccagatcccctcttagttggaggcaagttgtatgatgcttcagcttttggttcctgcctcctaaggttgttaggagttactgtgtgtagctgcttagaacattgcctgggtctcagtaagccgcttaagtgactgctctcattttcgctgtaaag

SEQ ID NO: 490 - DNA, 1223 bp, Artificial
  Synthetic oligonucleotide
caccatactgtaataacatcccatgaagcatggggcggggaagagtatatggtaccttatggactttgatgtggtggggtagtaggtaaattctgaatatgtaagctacatagtattctttttgtaactaaaggataaaagttttaagatgggcatgtaatatggctagcactggattttaatgatgagccagagtaataaggctggcaaggggagtttttgttttgtaataaatctcttacacctgcacatccagttctttttaaaaacacgtttgaagaggctccatatttctcagtgaagctgttggggttcatgttatttttgaaaatcatcttgcaatttatttcagcatcagactgaaccacccaaagaaaattagtctatttctgaacagttttttcagaaaccatattggtctgatcacccaacatttatagaaataggcgcttaaggcctagaggcatttcagaaaggagaatgagaaatactgtggtcaagagtagtgttcagatggagaacatcaagcatctgctctgcccttccacacacatcctcatttcatcttcacaactgccctaggtaaccttgttatctgtaatgaaacagcctcaaggagcacagaggcactcactcctcacgtttggtctgttgccatttccggcttggttggaatagggtaggagccttttggcagggagcacattctcagtaatgcagagtgcactcacctgggttctagcttcaacacttaggatttgcttgatattttgtattctctgaggcactgcctgtatttgtttctgctatcacagtccagagtcaagcttcatttataaagactgggcagggcatggtggctcactcctgtaattccagcactttgggaggctgaggtgggtggatcactttaggtcaggagttcaagaccagcctggccaacatggtgaaaccccatctctactaaaaaatacaaaaaggccgggcacggtggctcacacctgtaatcccaacactttgggaggccaaggtgggcagaacacctgaggtcaggagttcaagaccatcctggcgaacatagtgaaacctcgcctctactaaaaatacaaaaattagccaggtgtggtggtgcatgcctgtaatcccagctacttgggaggctgaggcaggagaattgcttaaacctgggaggtggagattgtggtgagctgagatcgtgccac

SEQ ID NO: 491 - DNA, 2249 bp, Artificial
  Synthetic oligonucleotide
tgcactccagcctgggagatagaacgagactccatctcaaaaaagaacaaaaacaattagccgagcgaggtggtgcacgcctgtaatcccagctactcatgaggctgaggcaggagaatcacttgaacccaggaggaggaggttgtagtgagtcaaggttgcaccactgcactccagcctgggtgacagagtgagactgtctcaaaaaataagtacataaataataagtaaaagctactaacaattaaaaaataaataaataaagacaagactgtctggaaaatggctctcctaaaaggaccagttgccatcatccacagtggaagattcaaagcagttggtccttggtacgtatgagaagcggatttcattcccttgaattctacagagcagtttattagagtgaatgcattttaaggccttgcatttgatatgtcatccagttcataatcaagttgcctttttctggctaaaacataatgattatgtatttttctcatttggtcctacaagctgctggccctttgtccctccactgtgggaatcagatctagagcaggctgagcctgcagacacagcagtggccaaaaggtcactctaagtgttttgtcttgactccttacttgaagtccacccagctagcacacatctggtttatactgaagccccctgcctagaaatactcatttcaggaaccaccagtaagcatctgtgaccacacaggctttttgactgatggcttcccggatctggtttcaagggataaccccgtctgtgtgcatctatggtcttctctctacagcgaggactttgcagtgctgcttgtggtccacacaaggggctcagagctgagtctgaactgcttcatggtcaccagctcctgtcccttccagtcttgagaggcttttttctccagatggaacctttccttcccgccgttttctcggtctctggctgtttttctcttgtgcccgtctaattggacacctcctggcttccatctctgtggttctcctgcctcacttcctgttctgttgtttttccgttttgtcaaaatatctcctatgttcttggcttccttttcgtcgccaggttttcagctttcctttagctcttcttctaatatggcttctgcccacaaaagcctgctctgtcaggatctcatggttctccacttgccagaaccttcttcagcctcagttcctcggcctcaacttgtacgtttaacccattgaccaccaccccccaaattcaccttcatttctttgaccctgctcctcactccttttctgttgaggaatctgttgactaactccaggctcactcaggctcaccgtcctgctctctgcaccagcctttccagagcgtgccagttctcatggcttcatctgttaactgttgatcgcttcagtcctgatttttagacctaaatggtttccttaacgccattctaactgcctgtgactcattttcacttacagtgtttattgtaacgccaaaccaacaaatcacaggtgcttgcttctctccataaatctccccagtctaactttttgtcattcaacatgactcgtttatccaacctgaaatcgcatatagccccaagtatggtgttttgtacacaggtatttaataagtgacttccagttttggctctgctatgaataaaaagagatttcagttctcttcactttgaaatctaacaactcagagaacattgaagaaattggaatttagttgggatgaaatacttgtggtttaaaatatttctgttcatattttctaatttgttgccggaggtcttgggttttctatttgagtgcttgcaaactcaatgtgatttctgtcagcatatcttaggtttgtttgttatgaaacttatgcagtgtgaggttctatctgaaaatgttatttagctatcttctgggactatttaatgaaagtggggtcatgaatccttaaaattcttgtgcagctttgagaaacatttctgttatttgggtatcagtttgtaagtgtggtaaagccaagatggaaacgagcactttgctttcttggttgttgttactggtctaacctcctgcttgaactagtctgctgtcctgtcaaatgcatctttttatttacatgtcccttaaattaaagctgatcatgaaagtatttgtgtgcaacatgaaatgttttctaaagtaccagtgcatattcctgcttggtctcaagacgcacgaggaatccaaaatagaagcaaa

SEQ ID NO: 492 - DNA, 117 bp, Artificial
  Synthetic oligonucleotide
ggcctgctctccccacctctccgcgctgagcagccacgtcggcggcggtccctggtccagggaggggcgtggcaaaggcccgtgcgcggtacgtgtcccgcccctcgctgcccggag

SEQ ID NO: 493 - DNA, 113 bp, Artificial
  Synthetic oligonucleotide
gcttgttagcagtggcacaagatcttacagaggatgaagaaacagtagaagattccataattgaggatgaagatgatgaagccgaggtagaagaagatgaacccacagatttg

SEQ ID NO: 494 - DNA, 4 bp, Artificial
  Synthetic oligonucleotide
gtag

SEQ ID NO: 495 - DNA, 73 bp, Artificial
  Synthetic oligonucleotide
aagataaagaggaagaagatgtgtctggtgaacctgaagcttcaccgagtgcagatacaactatactgtttgt

SEQ ID NO: 496 - DNA, 5 bp, Artificial
  Synthetic oligonucleotide
aaaag

SEQ ID NO: 497 - DNA, 6 bp, Artificial
  Synthetic oligonucleotide
gagaag

SEQ ID NO: 498 - DNA, 43 bp, Artificial
  Synthetic oligonucleotide
attttccagcaaataacattgtgaagttcctggtaggctttac

SEQ ID NO: 499 - DNA, 59 bp, Artificial
  Synthetic oligonucleotide
agcccatgggcggacgaccatttggtttggtcatcaatctgaactacaaagatttgaac

SEQ ID NO: 500 - DNA, 77 bp, Artificial
  Synthetic oligonucleotide
ggcaatgtattccaagatgcagtcttcaatcaaacagttacagttattgaaagagaggatgggttagatggagaaac

SEQ ID NO: 501 - DNA, 94 bp, Artificial
  Synthetic oligonucleotide
cgtaagagacccatacagaaagtagaaatgggtacatcaagtcagaatgatgttgacatgagttggattcctcaggaaacattgaatcaaatca

SEQ ID NO: 502 - DNA, 64 bp, Artificial
  Synthetic oligonucleotide
ataaagcttcaccaagaaggttgcccaggaaacgggcacagaagagatcagtgggatctgatga

SEQ ID NO: 503 - DNA, 61 bp, Artificial
  Synthetic oligonucleotide
catagattgagaacagttgaactcttaaatcctcagatgccaggggtctgctctagcatca

SEQ ID NO: 504 - DNA, 94 bp, Artificial
  Synthetic oligonucleotide
gtaagtatttagcagaaactaactccgtaatgaatggaattcaattccacacatggtttgttcaagcacacttaataagtagcctattttttaa

SEQ ID NO: 505 - DNA, 2359 bp, Homo sapiens
caagcccagcagccccggggcggatggctccggccgcctggctccgcagcgcggccgcgcgcgccctcctgcccccgatgctgctgctgctgctccagccgccgccgctgctggcccgggctctgccgccggacgtccaccacctccatgccgagaggagggggccacagccctggcatgcagccctgcccagtagcccggcacctgcccctgccacgcaggaagccccccggcctgccagcagcctcaggcctccccgctgtggcgtgcccgacccatctgatgggctgagtgcccgcaaccgacagaagaggttcgtgctttctggcgggcgctgggagaagacggacctcacctacaggatccttcggttcccatggcagttggtgcaggagcaggtgcggcagacgatggcagaggccctaaaggtatggagcgatgtgacgccactcacctttactgaggtgcacgagggccgtgctgacatcatgatcgacttcgccaggtactggcatggggacgacctgccgtttgatgggcctgggggcatcctggcccatgccttcttccccaagactcaccgagaaggggatgtccacttcgactatgatgagacctggactatcggggatgaccagggcacagacctgctgcaggtggcagcccatgaatttggccacgtgctggggctgcagcacacaacagcagccaaggccctgatgtccgccttctacacctttcgctacccactgagtctcagcccagatgactgcaggggcgttcaacacctatatggccagccctggcccactgtcacctccaggaccccagccctgggcccccaggctgggatagacaccaatgagattgcaccgctggaggtgaggccctgcctgccagtccccctactcctctgctggccactgtgactgcagcatatgccctcagcatgtgtccctctctcccaccccagccagacgccccgccagatgcctgtgaggcctcctttgacgcggtctccaccatccgaggcgagctctttttcttcaaagcgggctttgtgtggcgcctccgtgggggccagctgcagcccggctacccagcattggcctctcgccactggcagggactgcccagccctgtggacgctgccttcgaggatgcccagggccacatttggttcttccaaggtgctcagtactgggtgtacgacggtgaaaagccagtcctgggccccgcacccctcaccgagctgggcctggtgaggttcccggtccatgctgccttggtctggggtcccgagaagaacaagatctacttcttccgaggcagggactactggcgtttccaccccagcacccggcgtgtagacagtcccgtgccccgcagggccactgactggagaggggtgccctctgagatcgacgctgccttccaggatgctgatggctatgcctacttcctgcgcggccgcctctactggaagtttgaccctgtgaaggtgaaggctctggaaggcttcccccgtctcgtgggtcctgacttctttggctgtgccgagcctgccaacactttcctctgaccatggcttggatgccctcaggggtgctgacccctgccaggccacgaatatcaggctagagacccatggccatctttgtggctgtgggcaccaggcatgggactgagcccatgtctcctcagggggatggggtggggtacaaccaccatgacaactgccgggagggccacgcaggtcgtggtcacctgccagcgactgtctcagactgggcagggaggctttggcatgacttaagaggaagggcagtcttgggcccgctatgcaggtcctggcaaacctggctgccctgtctccatccctgtccctcagggtagcaccatggcaggactgggggaactggagtgtccttgctgtatccctgttgtgaggttccttccaggggctggcactgaagcaagggtgctggggccccatggccttcagccctggctgagcaactgggctgtagggcagggccacttcctgaggtcaggtcttggtaggtgcctgcatctgtctgccttctggctgacaatcctggaaatctgttctccagaatccaggccaaaaagttcacagtcaaatggggaggggtattcttcatgcaggagaccccaggccctggaggctgcaacatacctcaatcctgtcccaggccggatcctcctgaagcccttttcgcagcactgctatcctccaaagccattgtaaatgtgtgtacagtgtgtataaaccttcttcttcttttttttttttaaactgaggattgtcattaaacacagttgttttctacctgcc

SEQ ID NO: 506 - DNA, 2077 bp, Homo sapiens
caagcccagcagccccggggcggatggctccggccgcctggctccgcagcgcggccgcgcgcgccctcctgcccccgatgctgctgctgctgctccagccgccgccgctgctggcccgggctctgccgccggacgtccaccacctccatgccgagaggagggggccacagccctggcatgcagccctgcccagtagcccggcacctgcccctgccacgcaggaagccccccggcctgccagcagcctcaggcctccccgctgtggcgtgcccgacccatctgatgggctgagtgcccgcaaccgacagaagaggatccttcggttcccatggcagttggtgcaggagcaggtgcggcagacgatggcagaggccctaaaggtatggagcgatgtgacgccactcacctttactgaggtgcacgagggccgtgctgacatcatgatcgacttcgccaggtactggcatggggacgacctgccgtttgatgggcctgggggcatcctggcccatgccttcttccccaagactcaccgagaaggggatgtccacttcgactatgatgagacctggactatcggggatgaccagggcacagacctgctgcaggtggcagcccatgaatttggccacgtgctggggctgcagcacacaacagcagccaaggccctgatgtccgccttctacacctttcgctacccactgagtctcagcccagatgactgcaggggcgttcaacacctatatggccagccctggcccactgtcacctccaggaccccagccctgggcccccaggctgggatagacaccaatgagattgcaccgctggagccagacgccccgccagatgcctgtgaggcctcctttgacgcggtctccaccatccgaggcgagctctttttcttcaaagcgggctttgtgtggcgcctccgtgggggccagctgcagcccggctacccagcattggcctctcgccactggcagggactgcccagccctgtggacgctgccttcgaggatgcccagggccacatttggttcttccaagggactactggcgtttccaccccagcacccggcgtgtagacagtcccgtgccccgcagggccactgactggagaggggtgccctctgagatcgacgctgccttccaggatgctgatggctatgcctacttcctgcgcggccgcctctactggaagtttgaccctgtgaaggtgaaggctctggaaggcttcccccgtctcgtgggtcctgacttctttggctgtgccgagcctgccaacactttcctctgaccatggcttggatgccctcaggggtgctgacccctgccaggccacgaatatcaggctagagacccatggccatctttgtggctgtgggcaccaggcatgggactgagcccatgtctcctcagggggatggggtggggtacaaccaccatgacaactgccgggagggccacgcaggtcgtggtcacctgccagcgactgtctcagactgggcagggaggctttggcatgacttaagaggaagggcagtcttgggcccgctatgcaggtcctggcaaacctggctgccctgtctccatccctgtccctcagggtagcaccatggcaggactgggggaactggagtgtccttgctgtatccctgttgtgaggttccttccaggggctggcactgaagcaagggtgctggggccccatggccttcagccctggctgagcaactgggctgtagggcagggccacttcctgaggtcaggtcttggtaggtgcctgcatctgtctgccttctggctgacaatcctggaaatctgttctccagaatccaggccaaaaagttcacagtcaaatggggaggggtattcttcatgcaggagaccccaggccctggaggctgcaacatacctcaatcctgtcccaggccggatcctcctgaagcccttttcgcagcactgctatcctccaaagccattgtaaatgtgtgtacagtgtgtataaaccttcttcttcttttttttttttaaactgaggattgtcattaaacacagttgttttctacctgcc

SEQ ID NO: 507 - DNA, 131 bp, Artificial
  Synthetic oligonucleotide
caagcccagcagccccggggcggatggctccggccgcctggctccgcagcgcggccgcgcgcgccctcctgcccccgatgctgctgctgctgctccagccgccgccgctgctggcccgggctctgccgccg

SEQ ID NO: 508 - DNA, 182 bp, Artificial
  Synthetic oligonucleotide
gacgtccaccacctccatgccgagaggagggggccacagccctggcatgcagccctgcccagtagcccggcacctgcccctgccacgcaggaagccccccggcctgccagcagcctcaggcctccccgctgtggcgtgcccgacccatctgatgggctgagtgcccgcaaccgacagaagag

SEQ ID NO: 509 - DNA, 144 bp, Artificial
  Synthetic oligonucleotide
gatccttcggttcccatggcagttggtgcaggagcaggtgcggcagacgatggcagaggccctaaaggtatggagcgatgtgacgccactcacctttactgaggtgcacgagggccgtgctgacatcatgatcgacttcgccag

SEQ ID NO: 510 - DNA, 134 bp, Artificial
  Synthetic oligonucleotide
gtactggcatggggacgacctgccgtttgatgggcctgggggcatcctggcccatgccttcttccccaagactcaccgagaaggggatgtccacttcgactatgatgagacctggactatcggggatgaccagg

SEQ ID NO: 511 - DNA, 183 bp, Artificial
  Synthetic oligonucleotide
acaacagcagccaaggccctgatgtccgccttctacacctttcgctacccactgagtctcagcccagatgactgcaggggcgttcaacacctatatggccagccctggcccactgtcacctccaggaccccagccctgggcccccaggctgggatagacaccaatgagattgcaccgctggag

SEQ ID NO: 512 - DNA, 217 bp, Artificial
  Synthetic oligonucleotide
ccagacgccccgccagatgcctgtgaggcctcctttgacgcggtctccaccatccgaggcgagctctttttcttcaaagcgggctttgtgtggcgcctccgtgggggccagctgcagcccggctacccagcattggcctctcgccactggcagggactgcccagccctgtggacgctgccttcgaggatgcccagggccacatttggttcttccaag

SEQ ID NO: 513 - DNA, 138 bp, Artificial
  Synthetic oligonucleotide
agctgggatttccatcctcaactggcagagatgagagcctggagcattgcagatgccagggacttcacaaatgaaggcacagcatgggaaacctgcgtgggttccagggcagtccagcctgcaggggcccagggagtg

SEQ ID NO: 514 - DNA, 300 bp, Artificial
  Synthetic oligonucleotide
gtcagtaggcatttgtcacagccaaatgccagtggaaggagcagccgcccaggcagccctctactgatgagagtaacctcacccgtgcactagtttacagagcattcactgccccagcttatcccaggcctcccgcttccctctgcgggtggggtgctgagcaggcattattggcctgcatgttttactgatgaggaaactgaggctgggagagtctgtggtaggggtcaagcaggtccacagtggcggggcatggcagtggtggctgggcaggtccttgcagccttccctctccggcag

SEQ ID NO: 515 - DNA, 142 bp, Artificial
  Synthetic oligonucleotide
gtgctcagtactgggtgtacgacggtgaaaagccagtcctgggccccgcacccctcaccgagctgggcctggtgaggttcccggtccatgctgccttggtctggggtcccgagaagaacaagatctacttcttccgaggcag

SEQ ID NO: 516 - DNA, 927 bp, Artificial
  Synthetic oligonucleotide
gtgcgttgggggtgaggcagctggtgggaggtgggcacagcagccgcttctcccacctggtggtggctgggctcccacatgcctgccacaggaagtctggctcttcatcacaggtcctttgtccagagccatctgccctcctctcggtggccggctagtgctacattccatattgcagatgaggaaactgagggtcagagaagtgcaaggtcttaccctggtttttcagccacagccagtagaacaataaactgctgtacactgagggccaacaatgctctaagctccttactggtctcatccagttctcagaacagccctctgatgtgacacctgttgtgaacccagtttccagaggagcaaacagaggctcaggcaatgaggcccctaacctggactaccctggtggtccctgctcctaaccactgacccacccagcctcccacaaccacagggggctagagccagtccagtgctccctcccctgctaggctcctcttctgtgctctttctcccacatcaggacccactgggagagctatcctagggtagcctccagctccaggactccagggtgcccgtcaatagcctggctaatttaatagatgcaggagagagtgatgtggagggtggtgggggcaacgggacttgctttcctgagaggtgggactcaggcctctgaggctctgggtacctgtcaggctgggtattagcccagcccagattccggggcaggcagaagggctccctagagggaagagaggttctgaaaggccggccctggatcctgcaggactcgaggaactcagcagtggccaagggcttcccactcagccctcccttagtgcccatccctgggcacagcctgacaggcaggagtagggcccagtgtccactcgcccaggcttgaccaccttctcttctcag

SEQ ID NO: 517 - DNA, 911 bp, Artificial
  Synthetic oligonucleotide
gctatgcctacttcctgcgcggccgcctctactggaagtttgaccctgtgaaggtgaaggctctggaaggcttcccccgtctcgtgggtcctgacttctttggctgtgccgagcctgccaacactttcctctgaccatggcttggatgccctcaggggtgctgacccctgccaggccacgaatatcaggctagagacccatggccatctttgtggctgtgggcaccaggcatgggactgagcccatgtctcctcagggggatggggtggggtacaaccaccatgacaactgccgggagggccacgcaggtcgtggtcacctgccagcgactgtctcagactgggcagggaggctttggcatgacttaagaggaagggcagtcttgggcccgctatgcaggtcctggcaaacctggctgccctgtctccatccctgtccctcagggtagcaccatggcaggactgggggaactggagtgtccttgctgtatccctgttgtgaggttccttccaggggctggcactgaagcaagggtgctggggccccatggccttcagccctggctgagcaactgggctgtagggcagggccacttcctgaggtcaggtcttggtaggtgcctgcatctgtctgccttctggctgacaatcctggaaatctgttctccagaatccaggccaaaaagttcacagtcaaatggggaggggtattcttcatgcaggagaccccaggccctggaggctgcaacatacctcaatcctgtcccaggccggatcctcctgaagcccttttcgcagcactgctatcctccaaagccattgtaaatgtgtgtacagtgtgtataaaccttcttcttcttttttttttttaaactgaggattgtcattaaacacagttgttttctacctgcc

SEQ ID NO: 518 - DNA, 48 bp, Artificial
  Synthetic oligonucleotide
gttcgtgctttctggcgggcgctgggagaagacggacctcacctacag

SEQ ID NO: 519 - DNA, 41 bp, Artificial
  Synthetic oligonucleotide
gcacagacctgctgcaggtggcagcccatgaatttggccac

SEQ ID NO: 520 - DNA, 18 bp, Artificial
  Synthetic oligonucleotide
gtgctggggctgcagcac

SEQ ID NO: 521 - DNA, 92 bp, Artificial
  Synthetic oligonucleotide
gtgaggccctgcctgccagtccccctactcctctgctggccactgtgactgcagcatatgccctcagcatgtgtccctctctcccaccccag

SEQ ID NO: 522 - DNA, 116 bp, Artificial
  Synthetic oligonucleotide
ggactactggcgtttccaccccagcacccggcgtgtagacagtcccgtgccccgcagggccactgactggagaggggtgccctctgagatcgacgctgccttccaggatgctgatg

SEQ ID NO: 523 - protein, 488 aa, Homo sapiens [sequence omitted]

SEQ ID NO: 524 - protein, 496 aa, Homo sapiens
MAPAAWLRSAAARALLPPMLLLLLQPPPLLARALPPDVHHLHAERRGPQPWHAALPSSPAPAPATQEAPRPASSLRPPRCGVPDPSDGLSARNRQKRFVLSGGRWEKTDLTYRILRFPWQLVQEQVRQTMAEALKVWSDVTPLTFTEVHEGRADIMIDFARYWHGDDLPFDGPGGILAHAFFPKTHREGDVHFDYDETWTIGDDQGTDLLQVAAHEFGHVLGLQHTTAAKALMSAFYTFRYPLSLSPDDCRGVQHLYGQPWPTVTSRTPALGPQAGIDTNEIAPLEPDAPPDACEASFDAVSTIRGELFFFKAGFVWRLRGGQLQPGYPALASRHWQGLPSPVDAAFEDAQGHIWFFQGAQYWVYDGEKPVLGPAPLTELGLVRFPVHAALVWGPEKNKIYFFRGRDYWRFHPSTRRVDSPVPRRATDWRGVPSEIDAAFQDADGALGVRQLVGGGHSSRFSHLVVAGLPHACHRKSGSSSQVLCPEPSALLSVAG

SEQ ID NO: 525 - protein, 382 aa, Homo sapiens
MAPAAWLRSAAARALLPPMLLLLLQPPPLLARALPPDVHHLHAERRGPQPWHAALPSSPAPAPATQEAPRPASSLRPPRCGVPDPSDGLSARNRQKRFVLSGGRWEKTDLTYRILRFPWQLVQEQVRQTMAEALKVWSDVTPLTFTEVHEGRADIMIDFARYWHGDDLPFDGPGGILAHAFFPKTHREGDVHFDYDETWTIGDDQGTDLLQVAAHEFGHVLGLQHTTAAKALMSAFYTFRYPLSLSPDDCRGVQHLYGQPWPTVTSRTPALGPQAGIDTNEIAPLEPDAPPDACEASFDAVSTIRGELFFFKAGFVWRLRGGQLQPGYPALASRHWQGLPSPVDAAFEDAQGHIWFFQELGFPSSTGRDESLEHCRCQGLHK

SEQ ID NO: 526 - protein, 370 aa, Homo sapiens
MAPAAWLRSAAARALLPPMLLLLLQPPPLLARALPPDVHHLHAERRGPQPWHAALPSSPAPAPATQEAPRPASSLRPPRCGVPDPSDGLSARNRQKRFVLSGGRWEKTDLTYRILRFPWQLVQEQVRQTMAEALKVWSDVTPLTFTEVHEGRADIMIDFARYWHGDDLPFDGPGGILAHAFFPKTHREGDVHFDYDETWTIGDDQGTDLLQVAAHEFGHVLGLQHTTAAKALMSAFYTFRYPLSLSPDDCRGVQHLYGQPWPTVTSRTPALGPQAGIDTNEIAPLEPDAPPDACEASFDAVSTIRGELFFFKAGFVWRLRGGQLQPGYPALASRHWQGLPSPVDAAFEDAQGHIWFFQGTTGVSTPAPGV

SEQ ID NO: 527 - protein, 301 aa, Homo sapiens
MAPAAWLRSAAARALLPPMLLLLLQPPPLLARALPPDVHHLHAERRGPQPWHAALPSSPAPAPATQEAPRPASSLRPPRCGVPDPSDGLSARNRQKRFVLSGGRWEKTDLTYRILRFPWQLVQEQVRQTMAEALKVWSDVTPLTFTEVHEGRADIMIDFARYWHGDDLPFDGPGGILAHAFFPKTHREGDVHFDYDETWTIGDDQGTDLLQVAAHEFGHVLGLQHTTAAKALMSAFYTFRYPLSLSPDDCRGVQHLYGQPWPTVTSRTPALGPQAGIDTNEIAPLEVRPCLPVPLLLCWPL

SEQ ID NO: 528 - protein, 354 aa, Homo sapiens [sequence omitted]

SEQ ID NO: 529 - DNA, 19 bp, Artificial
  Synthetic oligonucleotide
tgagagtgattcgcgtggg

SEQ ID NO: 530 - DNA, 21 bp, Artificial
  Synthetic oligonucleotide
ccagggtacgaggctttcaat

SEQ ID NO: 531 - DNA, 91 bp, Artificial
  Synthetic oligonucleotide
tgagagtgattcgcgtgggtacccgcaagagccagcttgctcgcatacagacggacagtgtggtggcaacattgaaagcctcgtaccctgg

SEQ ID NO: 532 - DNA, 21 bp, Artificial
  Synthetic oligonucleotide
tgacactggcaaaacaatgca

SEQ ID NO: 533 - DNA, 21 bp, Artificial
  Synthetic oligonucleotide
ggtccttttcaccagcaagct

SEQ ID NO: 534 - protein, 496 aa, Homo sapiens
MALRRLGAALLLLPLLAAVEETLMDSTTATAELGWMVHPPSGWEEVSGYDENMNTIRTYQVCNVFESSQNNWLRTKFIRRRGAHRIHVEMKFSVRDCSSIPSVPGSCKETFNLYYYEADFDSATKTFPNWMENPWVKVDTIAADESFSQVDLGGRVMKINTEVRSFGPVSRSGFYLAFQDYGGCMSLIAVRVFYRKCPRIIQNGAIFQETLSGAESTSLVAARGSCIANAEEVDVPIKLYCNGDGEWLVPIGRCMCKAGFEAVENGTVCRGCPSGTFKANQGDEACTHCPINSRTTSEGATNCVCRNGYYRADLDPLDMPCTTIPSAPQAVISSVNETSLMLEWTPPRDSGGREDLVYNIICKSCGSGRGACTRCGDNVQYAPRQLGLTEPRIYISDLLAHTQYTFEIQAVNGVTDQSPFSPQFASVNITTNQAAPSAVSIMHQVSRTVDSITLSWSQPDQPNGVILDYELQYYEKVPIGWVLSPSPTSLRAPLPG

SEQ ID NO: 535 - protein, 301 aa, Homo sapiens
MALRRLGAALLLLPLLAAVEETLMDSTTATAELGWMVHPPSGWEEVSGYDENMNTIRTYQVCNVFESSQNNWLRTKFIRRRGAHRIHVEMKFSVRDCSSIPSVPGSCKETFNLYYYEADFDSATKTFPNWMENPWVKVDTIAADESFSQVDLGGRVMKINTEVRSFGPVSRSGFYLAFQDYGGCMSLIAVRVFYRKCPRIIQNGAIFQETLSGAESTSLVAARGSCIANAEEVDVPIKLYCNGDGEWLVPIGRCMCKAGFEAVENGTVCRERQDLTMLSRLVLNSWPQMILPPQPPKVLEL

SEQ ID NO: 536 - protein, 324 aa, Homo sapiens
MGPPSAPPCRLHVPWKEVLLTASLLTFWNPPTTAKLTIESTPFNVAEGKEVLLLAHNLPQNRIGYSWYKGERVDGNSLIVGYVIGTQQATPGPAYSGRETIYPNASLLIQNVTQNDTGFYTLQVIKSDLVNEEATGQFHVYPELPKPSISSNNSNPVEDKDAVAFTCEPEVQNTTYLWWVNGQSLPVSPRLQLSNGNMTLTLLSVKRNDAGSYECEIQNPASANRSDPVTLNVLYGPDVPTISPSKANYRPGENLNLSCHAASNPPAQYSWFINGTFQQSTQELFIPNITVNNSGSYMCQAHNSATGLNRTTVTMITVSDWTRP

SEQ ID NO: 537 - protein, 256 aa, Homo sapiens
MGPPSAPPCRLHVPWKEVLLTASLLTFWNPPTTAKLTIESTPFNVAEGKEVLLLAHNLPQNRIGYSWYKGERVDGNSLIVGYVIGTQQATPGPAYSGRETIYPNASLLIQNVTQNDTGFYTLQVIKSDLVNEEATGQFHVYPELPKPSISSNNSNPVEDKDAVAFTCEPEVQNTTYLWWVNGQSLPVSPRLQLSNGNMTLTLLSVKRNDAGSYECEIQNPASANRSDPVTLNVLLLLSSQLWPPSASRLECWPGWL

SEQ ID NO: 538 - protein, 390 aa, Homo sapiens
MGPPSAPPCRLHVPWKEVLLTASLLTFWNPPTTAKLTIESTPFNVAEGKEVLLLAHNLPQNRIGYSWYKGERVDGNSLIVGYVIGTQQATPGPAYSGRETIYPNASLLIQNVTQNDTGFYTLQVIKSDLVNEEATGQFHVYPELPKPSISSNNSNPVEDKDAVAFTCEPEVQNTTYLWWVNGQSLPVSPRLQLSNGNMTLTLLSVKRNDAGSYECEIQNPASANRSDPVTLNVLYGPDVPTISPSKANYRPGENLNLSCHAASNPPAQYSWFINGTFQQSTQELFIPNITVNNSGSYMCQAHNSATGLNRTTVTMITVSGKWIHEALASHFQVESGSQRRARKKFSFPTCVQGAHANPKFSPEPSQFTSADSFPLVFLFFVVFCFLISHV

SEQ ID NO: 539 - protein, 183 aa, Homo sapiens
MGPPSAPPCRLHVPWKEVLLTASLLTFWNPPTTAKLTIESTPFNVAEGKEVLLLAHNLPQNRIGYSWYKGERVDGNSLIVGYVIGTQQATPGPAYSGRETIYPNASLLIQNVTQNDTGFYTLQVIKSDLVNEEATGQFHVYREYFHMTSGCWGSVLLPTYGIVRPGLCLWPSLHYILYQGLDI

SEQ ID NO: 540 - protein, 180 aa, Homo sapiens [sequence omitted]

SEQ ID NO: 541 - protein, 584 aa, Homo sapiens
MTPSPLLLLLLPPLLLGAFPPAAAARGPPKMADKVVPRQVARLGRTVRLQCPVEGDPPPLTMWTKDGRTIHSGWSRFRVLPQGLKVKQVEREDAGVYVCKATNGFGSLSVNYTLVVLDDISPGKESLGPDSSSGGQEDPASQQWARPRFTQPSKMRRRVIARPVGSSVRLKCVASGHPRPDITWMKDDQALTRPEAAEPRKKKWTLSLKNLRPEDSGKYTCRVSNRAGAINATYKVDVIQRTRSKPVLTGTHPVNTTVDFGGTTSFQCKVRSDVKPVIQWLKRVEYGAEGRHNSTIDVGGQKFVVLPTGDVWSRPDGSYLNKLLITRARQDDAGMYICLGANTMGYSFRSAFLTVLPGARLPRHATPCWCPDPPPGPGVPPTGWGPTLPSRAVLARSSAEGGQPRGTVSTAPGMGLGCSPGLCVGVPLPTSFPLALADPKPPGPPVASSSSATSLPWPVVIGIPAGAVFILGTLLLWLCQAQKKPCTPAPAPPLPGHRPPGTARDRSGDKDLPSLAALSAGPGVGLCEEHGSPAAPQHLLGPGPVAGPKLYPKLYTDIHTHTHTHSHTHSHVEGKVHQHIHYQC

SEQ ID NO: 542 - protein, 490 aa, Homo sapiens
MTPSPLLLLLLPPLLLGAFPPAAAARGPPKMADKVVPRQVARLGRTVRLQCPVEGDPPPLTMWTKDGRTIHSGWSRFRVLPQGLKVKQVEREDAGVYVCKATNGFGSLSVNYTLVVLDDISPGKESLGPDSSSGGQEDPASQQWARPRFTQPSKMRRRVIARPVGSSVRLKCVASGHPRPDITWMKDDQALTRPEAAEPRKKKWTLSLKNLRPEDSGKYTCRVSNRAGAINATYKVDVIQRTRSKPVLTGTHPVNTTVDFGGTTSFQCKTQNRQGHLWPPRPRPLACRGPWSSASQPALSSSWAPCSCGFARPRRSRAPPRLPLPCLGTARRGRPATAAETRTFPRWPPSALALVWGCVRSMGLRQPPSTYWAQAQLLALSCTPNSTQTSTHTHTHTLTHTHTWRARSTSTSTISARRHRICSGHGGAGQTGRLGGWRTELQTKAGDPWRGGMASTPGSLCVRHSPWTHTHRHTHYLDACMHTHARTRAP

SEQ ID NO: 543 - protein, 81 aa, Homo sapiens
MSLLSSRAARVPGPSSSLCALLVLLLLLTQPGPIASAGPAAAVLRELRCVCLQTTQGVHPKMISNLQVFAIGPQCSKVEVV

SEQ ID NO: 544 - protein, 75 aa, Homo sapiens
MAHATLSAAPSNPRLLRVALLLLLLVAASRRAAGASVVTELRCQCLQTLQGIHLKNIQSVNVRSPGPHCAQTEVM

SEQ ID NO: 545 - protein, 103 aa, Homo sapiens
MAHATLSAAPSNPRLLRVALLLLLLVAASRRAAGASVVTELRCQCLQTLQGIHLKNIQSVNVRSPGPHCAQTEVIATLKNGKKACLNPASPMVQKIIEKILNK

SEQ ID NO: 546 - protein, 98 aa, Homo sapiens
MAHATLSAAPSNPRLLRVALLLLLLVAASRRAAGASVVTELRCQCLQTLQGIHLKNIQSVNSHTQEWEESLSQPRIPHGSENHRKDTEQGEHQLTGEK

SEQ ID NO: 547 - protein, 177 aa, Homo sapiens
MHKKGSPILGSHTARVAGTSPPALPLLAQLPDASAEPHGPRHALRRPQQSPAPAGGAAAPAPGGRQPARSRWVPAPWGPRAGRGWGGRPAPTAPLNQRVYSSLGASVVTELRCQCLQTLQGIHLKNIQSVNVRSPGPHCAQTEVIATLKNGKKACLNPASPMVQKIIEKILNKGSTN

SEQ ID NO: 548 - protein, 340 aa, Homo sapiens
MKSLTATSSMKVLLPRTFWTRKLMKFLLLLVLRIATDDSKAVCRLSVKFGATLRTSRLLLERAKELNIDVVGVSFHVGSGCTDPETFVQAISDARCVFDMGAEVGFSMYLLDIGGGFPGSEDVKLKFEEITGVINPALDKYFPSDSGVRIIAEPGRYYVASAFTLAVNIIAKKIVLKEQTGSDDEDESSEQTFMYYVNDGVYGSFNCILYDHAHVKPLLQKRPKPDEKYYSSSIWGPTCDGLDRIVERCDLPEMHVGDWMLFENMGAYTVAAASTFNGFQRPTIYYVMSGPAWQLMQQFQNPDFPPEVEEQDASTLPVSCAWESGMKRHRAACASASINV

SEQ ID NO: 549 - protein, 238 aa, Homo sapiens
MAEKALLCPSSAGLGTWPWVLNSAWPVLPLAVDQGVDWRPRGPVSSDQIEQLHRRFKQLSGDQPTIRKENFNNVPDLELNPIRSKIVRAFFDNRNLRKGPSGLADEINFEDFLTIMSYFRPIDTTMDEEQVELSRKEKLRFLFHMYDSDSDGRITLEEYRNVVEELLSGNPHIEKESARSIADGAMMEAASVCMGQMEPDQVYEGITFEDFLKIWQGIDIETKMHVRFLNMETMALCH

SEQ ID NO: 550 - protein, 302 aa, Homo sapiens
GGGGRADWRPKGRWGRGLAPAAGWGAGVRGPGGAGPRSLPRGGVGAALPLAHTVRLQSAASPAARSAPAWPGPQELFYEDRHFHEGCFRCCRCQRSLADEPFTCQDSELLCNDCYCSAFSSQCSACGETVMPGSRKLEYGGQTWHEHCFLCSGCEQPLGSRSFVPDKGAHYCVPCYENKFAPRCARCSKTLTQGGVTYRDQPWHRECLVCTGCQTPLAGQQFTSRDEDPYCVACFGELFAPKCSSCKRPIVGLGGGKYVSFEDRHWHHNCFSCARCSTSLVGQGFVPDGDQVLCQGCSQAGP

SEQ ID NO: 551 - protein, 147 aa, Homo sapiens
MNPSPARTVSCSAMTATAVRFPRSAPLVGRLSCLTLTQGGVTYRDQPWHRECLVCTGCQTPLAGQQFTSRDEDPYCVACFGELFAPKCSSCKRPIVGLGGGKYVSFEDRHWHHNCFSCARCSTSLVGQGFVPDGDQVLCQGCSQAGP

SEQ ID NO: 552 - protein, 215 aa, Homo sapiens
MVDAFLGTWKLVDSKNFDDYMKSLGVGFATRQVASMTKPTTIIEKNGDILTLKTHSTFKNTEISFKLGVEFDETTADDRKVKSIVTLDGGKLVHLQKWDGQETTLVRELIDGKLILVRWATLELYLIGYYYCSFSQACSKKPSPPLRAVEAGTREWLWVRVVSGGNFLCSGFGLTQAGTQILPYRLHDCGQITFSKCNCKTGINNTNLVGLLGSL

SEQ ID NO: 553 - protein, 178 aa, Homo sapiens
MVDAFLGTWKLVDSKNFDDYMKSLGVGFATRQVASMTKPTTIIEKNGDILTLKTHSTFKNTEISFKLGVEFDETTADDRKVKSIVTLDGGKLVHLQKWDGQETTLVRELIDGKLILDVLTAWPSIYRRQVKVLREDEITILPWHLQWSREKATKLLRPTLPSYNNHGWEELRVGKSIV

SEQ ID NO: 554 - protein, 126 aa, Homo sapiens
MVDAFLGTWKLVDSKNFDDYMKSLGVGFATRQVASMTKPTTIIEKNGDILTLKTHSTFKNTEISFKLGVEFDETTADDRKVKSIVTLDGGKLVHLQKWDGQETTLVRELIDGKLILMEKLQLRNVK

SEQ ID NO: 555 - protein, 144 aa, Homo sapiens
MVDAFLGTWKLVDSKNFDDYMKSLAHILITFPLPSGVGFATRQVASMTKPTTIIEKNGDILTLKTHSTFKNTEISFKLGVEFDETTADDRKVKSIVTLDGGKLVHLQKWDGQETTLVRELIDGKLILTLTHGTAVCTRTYEKEA

SEQ ID NO: 556 - protein, 464 aa, Homo sapiens
MLLPQLCWLPLLAGLLPPVPAQKFSALTFLRVDQDKDKDCSLDCAGSPQKPLCASDGRTFLSRCEFQRAKCKDPQLEIAYRGNCKDVSRCVAERKYTQEQARKEFQQVFIPECNDDGTYSQVQCHSYTGYCWCVTPNGRPISGTAVAHKTPRCPGSVNEKLPQREGTGKTDDAAAPALETQPQGDEEDIASRYPTLWTEQVKSRQNKTNKNSVSSCDQEHQSALEEAKQPKNDNVVIPECAHGGLYKPVQCHPSTGYCWCVLVDTGRPIPGTSTRYEQPKCDNTARAHPAKARDLYKGRQLQGCPGAKKHEFLTSVLDALSTDMVHAASDPSSSSGRLSEPDPSHTLEERVVHWYFKLLDKNSSGDIGKKEIKPFKRFLRKKSKPKKCVKKFVEYCDVNNDKSISVQELMGCLGVAKEDGKADTKKRHTPRGHAESTSNRQDAMVVSSRPKATTHRKSRTLSRR

SEQ ID NO: 557 - protein, 434 aa, Homo sapiens
MLLPQLCWLPLLAGLLPPVPAQKFSALTFLRVDQDKDKDCSLDCAGSPQKPLCASDGRTFLSRCEFQRAKCKDPQLEIAYRGNCKDVSRCVAERKYTQEQARKEFQQVFIPECNDDGTYSQVQCHSYTGYCWCVTPNGRPISGTAVAHKTPRCPGSVNEKLPQREGTGKTDDAAAPALETQPQGDEEDIASRYPTLWTEQVKSRQNKTNKNSVSSCDQEHQSALEEAKQPKNDNVVIPECAHGGLYKPVQCHPSTGYCWCVLVDTGRPIPGTSTRYEQPKCDNTARAHPAKARDLYKGRQLQGCPGAKKHEFLTSVLDALSTDMVHAASDPSSSSGRLSEPDPSHTLEERVVHWYFKLLDKNSSGDIGKKEIKPFKRFLRKKSKPKKCVKKFVEYCDVNNDKSISVQELMGCLGVAKEDGKADTKKRHRSKRNL

SEQ ID NO: 558 - protein, 454 aa, Homo sapiens
MLLPQLCWLPLLAGLLPPVPAQKFSALTFLRVDQDKDKDCSLDCAGSPQKPLCASDGRTFLSRCEFQRAKCKDPQLEIAYRGNCKDVSRCVAERKYTQEQARKEFQQVFIPECNDDGTYSQVQCHSYTGYCWCVTPNGRPISGTAVAHKTPRCPGSVNEKLPQREGTGKTDDAAAPALETQPQGDEEDIASRYPTLWTEQVKSRQNKTNKNSVSSCDQEHQSALEEAKQPKNDNVVIPECAHGGLYKPVQCHPSTGYCWCVLVDTGRPIPGTSTRYEQPKCDNTARAHPAKARDLYKGRQLQGCPGAKKHEFLTSVLDALSTDMVHAASDPSSSSGRLSEPDPSHTLEERVVHWYFKLLDKNSSGDIGKKEIKPFKRFLRKKSKPKKCVKKFVEYCDVNNDKSISVQELMGCLGVAKEDGKADTKKRHTPRGHAESTSNRQLLWLRGKVSFYCF

SEQ ID NO: 559 - protein, 429 aa, Homo sapiens
MLLPQLCWLPLLAGLLPPVPAQKFSALTFLRVDQDKDKDCSLDCAGSPQKPLCASDGRTFLSRCEFQRAKCKDPQLEIAYRGNCKDVSRCVAERKYTQEQARKEFQQVFIPECNDDGTYSQVQCHSYTGYCWCVTPNGRPISGTAVAHKTPRCPGSVNEKLPQREGTGKTDIASRYPTLWTEQVKSRQNKTNKNSVSSCDQEHQSALEEAKQPKNDNVVIPECAHGGLYKPVQCHPSTGYCWCVLVDTGRPIPGTSTRYEQPKCDNTARAHPAKARDLYKGRQLQGCPGAKKHEFLTSVLDALSTDMVHAASDPSSSSGRLSEPDPSHTLEERVVHWYFKLLDKNSSGDIGKKEIKPFKRFLRKKSKPKKCVKKFVEYCDVNNDKSISVQELMGCLGVAKEDGKADTKKRHTPRGHAESTSNRQPRKQG

SEQ ID NO: 560 - protein, 139 aa, Homo sapiens
MKSSGLFPFLVLLALGTLAPWAVEGSGKSFKAGVCPPKKSAQCLRYKKPECQSDWQCPGKKRCCPDTCGIKCLDPVDTPNPTRRKPGKCPVTYGQCLMLNPPNFCEMDGQCKRDLKCCMGMCGKSCVSPVKGKQGMRAH

SEQ ID NO: 561 - protein, 156 aa, Homo sapiens
MKSSGLFPFLVLLALGTLAPWAVEGSGKSFKAGVCPPKKSAQCLRYKKPECQSDWQCPGKKRCCPDTCGIKCLDPVDTPNPTRRKPGKCPVTYGQCLMLNPPNFCEMDGQCKRDLKCCMGMCGKSCVSPVKGEKRHHKQLRDQEVDPLEMRRHSAG

SEQ ID NO: 562 - protein, 89 aa, Homo sapiens
MKSSGLFPFLVLLALGTLAPWAVEGSGKSFKAGVCPPKKSAQCLRYKKPECQSDWQCPGKKRCCPDTCGIKCLDPVDTPNPRGSLGSAQ

SEQ ID NO: 563 - protein, 82 aa, Homo sapiens
MKSSGLFPFLVLLALGTLAPWAVEGSGKSFKAGVCPPKKSAQCLRYKKPECQSDWQCPGKKRCCPDTCGIKCLDPVDTPNPT

SEQ ID NO: 564 - protein, 1645 aa, Homo sapiens
MFPGCPRLWVLVVLGTSWVGWGSQGTEAAQLRQFYVAAQGISWSYRPEPTNSSLNLSVTSFKKIVYREYEPYFKKEKPQSTISGLLGPTLYAEVGDIIKVHFKNKADKPLSIHPQGIRYSKLSEGASYLDHTFPAEKMDDAVAPGREYTYEWSISEDSGPTHDDPPCLTHIYYSHENLIEDFNSGLIGPLLICKKGTLTEGGTQKTFDKQIVLLFAVFDESKSWSQSSSLMYTVNGYVNGTMPDITVCAHDHISWHLLGMSSGPELFSIHFNGQVLEQNHHKVSAITLVSATSTTANMTVGPEGKWIISSLTPKHLQAGMQAYIDIKNCPKKTRNLKKITREQRRHMKRWEYFIAAEEVIWDYAPVIPANMDKKYRSQHLDNFSNQIGKHYKKVMYTQYEDESFTKHTVNPNMKEDGILGPIIRAQVRDTLKIVFKNMASRPYSIYPHGVTFSPYEDEVNSSFTSGRNNTMIRAVQPGETYTYKWNILEFDEPTENDAQCLTRPYYSDVDIMRDIASGLIGLLLICKSRSLDRRGIQRAADIEQQAVFAVFDENKSWYLEDNINKFCENPDEVKRDDPKFYESNIMSTINGYVPESITTLGFCFDDTVQWHFCSVGTQNEILTIHFTGHSFIYGKRHEDTLTLFPMRGESVTVTMDNVGTWMLTSMNSSPRSKKLRLKFRDVKCIPDDDEDSYEIFEPPESTVMATRKMHDRLEPEDEESDADYDYQNRLAAALGIRSFRNSSLNQEEEEFNLTALALENGTEFVSSNTDIIVGSNYSSPSNISKFTVNNLAEPQKAPSHQQATTAGSPLRHLIGKNSVLNSSTAEHSSPYSEDPIEDPLQPDVTGIRLLSLGAGEFRSQEHAKRKGPKVERDQAAKHRFSWMKLLAHKVGRHLSQDTGSPSGMRPWEDLPSQDTGSPSRMRPWKDPPSDLLLLKQSNSSKILVGRWHLASEKGSYEIIQDTDEDTAVNNWLISPQNASRAWGESTPLANKPGKQSGHPKFPRVRHKSLQVRQDGGKSRLKKSQFLIKTRKKKKEKHTHHAPLSPRTFHPLRSEAYNTFSERRLKHSLVLHKSNETSLPTDLNQTLPSMDFGWIASLPDHNQNSSNDTGQASCPPGLYQTVPPEEHYQTFPIQDPDQMHSTSDPSHRSSSPELSEMLEYDRSHKSFPTDISQMSPSSEHEVWQTVISPDLSQVTLSPELSQTNLSPDLSHTTLSPELIQRNLSPALGQMPISPDLSHTTLSPDLSHTTLSLDLSQTNLSPELSQTNLSPALGQMPLSPDLSHTTLSLDFSQTNLSPELSHMTLSPELSQTNLSPALGQMPISPDLSHTTLSLDFSQTNLSPELSQTNLSPALGQMPLSPDPSHTTLSLDLSQTNLSPELSQTNLSPDLSEMPLFADLSQIPLTPDLDQMTLSPDLGETDLSPNFGQMSLSPDLSQVTLSPDISDTTLLPDLSQISPPPDLDQIFYPSESSQSLLLQEFNESFPYPDLGQMPSPSSPTLNDTFLSKEFNPLVIVGLSKDGTDYIEIIPKEEVQSSEDDYAEIDYVPYDDPYKTDVRTNINSSRDPDNIAAWYLRSNNGNRRNYYIAAEEISWDYSEFVQRETDIEDSDDIPEDTTYKKGSMKSISEFLVLLSELKWMMLSKFVLKI

SEQ ID NO: 565 - protein, 2074 aa, Homo sapiens
MFPGCPRLWVLVVLGTSWVGWGSQGTEAAQLRQFYVAAQGISWSYRPEPTNSSLNLSVTSFKKIVYREYEPYFKKEKPQSTISGLLGPTLYAEVGDIIKVHFKNKADKPLSIHPQGIRYSKLSEGASYLDHTFPAEKMDDAVAPGREYTYEWSISEDSGPTHDDPPCLTHIYYSHENLIEDFNSGLIGPLLICKKGTLTEGGTQKTFDKQIVLLFAVFDESKSWSQSSSLMYTVNGYVNGTMPDITVCAHDHISWHLLGMSSGPELFSIHFNGQVLEQNHHKVSAITLVSATSTTANMTVGPEGKWIISSLTPKHLQAGMQAYIDIKNCPKKTRNLKKITREQRRHMKRWEYFIAAEEVIWDYAPVIPANMDKKYRSQHLDNFSNQIGKHYKKVMYTQYEDESFTKHTVNPNMKEDGILGPIIRAQVRDTLKIVFKNMASRPYSIYPHGVTFSPYEDEVNSSFTSGRNNTMIRAVQPGETYTYKWNILEFDEPTENDAQCLTRPYYSDVDIMRDIASGLIGLLLICKSRSLDRRGIQRAADIEQQAVFAVFDENKSWYLEDNINKFCENPDEVKRDDPKFYESNIMSTINGYVPESITTLGFCFDDTVQWHFCSVGTQNEILTIHFTGHSFIYGKRHEDTLTLFPMRGESVTVTMDNVGTWMLTSMNSSPRSKKLRLKFRDVKCIPDDDEDSYEIFEPPESTVMATRKMHDRLEPEDEESDADYDYQNRLAAALGIRSFRNSSLNQEEEEFNLTALALENGTEFVSSNTDIIVGSNYSSPSNISKFTVNNLAEPQKAPSHQQATTAGSPLRHLIGKNSVLNSSTAEHSSPYSEDPIEDPLQPDVTGIRLLSLGAGEFRSQEHAKRKGPKVERDQAAKHRFSWMKLLAHKVGRHLSQDTGSPSGMRPWEDLPSQDTGSPSRMRPWKDPPSDLLLLKQSNSSKILVGRWHLASEKGSYEIIQDTDEDTAVNNWLISPQNASRAWGESTPLANKPGKQSGHPKFPRVRHKSLQVRQDGGKSRLKKSQFLIKTRKKKKEKHTHHAPLSPRTFHPLRSEAYNTFSERRLKHSLVLHKSNETSLPTDLNQTLPSMDFGWIASLPDHNQNSSNDTGQASCPPGLYQTVPPEEHYQTFPIQDPDQMHSTSDPSHRSSSPELSEMLEYDRSHKSFPTDISQMSPSSEHEVWQTVISPDLSQVTLSPELSQTNLSPDLSHTTLSPELIQRNLSPALGQMPISPDLSHTTLSPDLSHTTLSLDLSQTNLSPELSQTNLSPALGQMPLSPDLSHTTLSLDFSQTNLSPELSHMTLSPELSQTNLSPALGQMPISPDLSHTTLSLDFSQTNLSPELSQTNLSPALGQMPLSPDPSHTTLSLDLSQTNLSPELSQTNLSPDLSEMPLFADLSQIPLTPDLDQMTLSPDLGETDLSPNFGQMSLSPDLSQVTLSPDISDTTLLPDLSQISPPPDLDQIFYPSESSQSLLLQEFNESFPYPDLGQMPSPSSPTLNDTFLSKEFNPLVIVGLSKDGTDYIEIIPKEEVQSSEDDYAEIDYVPYDDPYKTDVRTNINSSRDPDNIAAWYLRSNNGNRRNYYIAAEEISWDYSEFVQRETDIEDSDDIPEDTTYKKVVFRKYLDSTFTKRDPRGEYEEHLGILGPIIRAEVDDVIQVRFKNLASRPYSLHAHGLSYEKSSEGKTYEDDSPEWFKEDNAVQPNSSYTYVWHATERSGPESPGSACRAWAYYSAVNPEKDIHSGLIGPLLICQKGILHKDSNMPVDMREFVLLFMTFDEKKSWYYEKKSRSSWRLTSSEMKKSHEFHAINGMIYSLPGLKMYEQEWVRLHLLNIGGSQDIHVVHFHGQTLLENGNKQHQLGVWPLLPGSFKTLEMKASKPGWWLLNTEVGENQRAGMQTPFLIMDRDCRMPMGLSTGIISDSQIKASEFLGYWEPRLARLNNGGSYNAWSVEKLAAEFASKPWIQVDMQKEVIITGIQTQGAKHYLKSCYTTEFYVAYSSNQINWQIFKGNSTRNVMYFNGNSDASTIKENQFDPPIVARYIRISPTRAYNRPTLRLELQGCEDVPHPWVWKMER

SEQ ID NO: 566 - protein, 603 aa, Homo sapiens
MFPGCPRLWVLVVLGTSWVGWGSQGTEAAQLRQFYVAAQGISWSYRPEPTNSSLNLSVTSFKKIVYREYEPYFKKEKPQSTISGLLGPTLYAEVGDIIKVHFKNKADKPLSIHPQGIRYSKLSEGASYLDHTFPAEKMDDAVAPGREYTYEWSISEDSGPTHDDPPCLTHIYYSHENLIEDFNSGLIGPLLICKKGTLTEGGTQKTFDKQIVLLFAVFDESKSWSQSSSLMYTVNGYVNGTMPDITVCAHDHISWHLLGMSSGPELFSIHFNGQVLEQNHHKVSAITLVSATSTTANMTVGPEGKWIISSLTPKHLQAGMQAYIDIKNCPKKTRNLKKITREQRRHMKRWEYFIAAEEVIWDYAPVIPANMDKKYRSQHLDNFSNQIGKHYKKVMYTQYEDESFTKHTVNPNMKEDGILGPIIRAQVRDTLKIVFKNMASRPYSIYPHGVTFSPYEDEVNSSFTSGRNNTMIRAVQPGETYTYKWNILEFDEPTENDAQCLTRPYYSDVDIMRDIASGLIGLLLICKSRSLDRRGIQRAADIEQQAVFAVFDENKSWYLEDNINKFCENPDEVKRDDPKFYESNIMSSKSEYYFCSSVFHSCG

SEQ ID NO: 567 - protein, 156 aa, Homo sapiens
MWTFVTQLLVTLVLLSFFLVSCQNVMHIVRGSLCFVLKHIHQELDKELGESEGLSDDEETISTRVVRRRVFLKGNEFQNIPGEQVTEEQFTDEQGNIVTKKIIRKVVRQIDLSSADAAQEHEEVTVEGPLEDPSELEVDIDYFMKHSKDHTSTPNP

SEQ ID NO: 568 - protein, 169 aa, Homo sapiens
MWTFVTQLLVTLVLLSFFLVSCQNVMHIVRGSLCFVLKHIHQELDKELGESEGLSDDEETISTRVVRRRVFLKGNEFQNIPGEQVTEEQFTDEQGNIVTKKIIRKVVRQIDLSSADAAQEHEEVTVEGPLEDPSELEVELRGSGLQPDLIEGRKGAQIVKRASLKRGKQ

SEQ ID NO: 569 - protein, 180 aa, Homo sapiens
MWTFVTQLLVTLVLLSFFLVSCQNVMHIVRGSLCFVLKHIHQELDKELGESEGLSDDEETISTRVVRRRVFLKGNEFQNIPGEQVTEEQFTDEQGNIVTKKIIRKVVRQIDLSSADAAQEHEEVTVEGPLEDPSELEVDIDYFMKHSKVELRGSGLQPDLIEGRKGAQIVKRASLKRGKQ

SEQ ID NO: 570 - protein, 145 aa, Homo sapiens
MWTFVTQLLVTLVLLSFFLVSCQNVMHIVRGSLCFVLKHIHQELDKELGESEGLSDDEETISTRVVRRRVFLKGNEFQNIPGEQVTEEQFTDEQGNIVTKKIIRKVVRQIDLSSADAAQEHEEVTVEGPLEDPSELEDHTSTPNP

SEQ ID NO: 571 - protein, 122 aa, Homo sapiens
MWTFVTQLLVTLVLLSFFLVSCQNVMHIVRGSLCFVLKHIHQELDKELGESEGLSDDEETISTRVVRRRVFLKGNEFQNIPGEQVTEEQFTDEQGNIVTKKVGAECSPLCWGEAGGLEAKRW

SEQ ID NO: 572 - protein, 155 aa, Homo sapiens
MWTFVTQLLVTLVLLSFFLVSCQNVMHIVRGSLCFVLKHIHQELDKELGESEGLSDDEETISPRVVRRRVFLKGNEFQNIPGEQVTEEQFTDEQGNIVTKKIIRKVVRQIDLSSADAAQEHEEVELRGSGLQPDLIEGRKGAQIVKRASLKRGKQ

SEQ ID NO: 573 - protein, 109 aa, Homo sapiens
MWTFVTQLLVTLVLLSFFLVSCQNVMHIVRGSLCFVLKHIHQELDKELGESEGLSDDEETISPRVVRRRVFLKGNEFQNIPGEQVTEEQFTDEQGNIVTKKDHTSTPNP

SEQ ID NO: 574 - protein, 133 aa, Homo sapiens
MWTFVTQLLVTLVLLSFFLVSCQNVMHIVRGSLCFVLKHIHQELDKELGESEGLSDDEETISPRVVRRRVFLKGNEFQNIPGEQVTEEQFTDEQGNIVTKKVELRGSGLQPDLIEGRKGAQIVKRASLKRGKQ

SEQ ID NO: 575 - protein, 30 aa, Homo sapiens
MILANVFCLFFFLGPRAPRLAPPSGLCPGQ

SEQ ID NO: 576 - protein, 1081 aa, Homo sapiens
MEPWSSRWKTKRWLWDFTVTTLALTFLFQAREVRGAAPVDVLKALDFHNSPEGISKTTGFCTNRKNSKGSDTAYRVSKQAQLSAPTKQLFPGGTFPEDFSILFTVKPKKGIQSFLLSIYNEHGIQQIGVEVGRSPVFLFEDHTGKPAPEDYPLFRTVNIADGKWHRVAISVEKKTVTMIVDCKKKTTKPLDRSERAIVDTNGITVFGTRILDEEVFEGDIQQFLITGDPKAAYDYCEHYSPDCDSSAPKAAQAQEPQIDEYAPEDIIEYDYEYGEAEYKEAESVTEGPTVTEETIAQTEANIVDDFQEYNYGTMESYQTEAPRHVSGTNEPNPVEEIFTEEYLTGEDYDSQRKNSEDTLYENKEIDGRDSDLLVDGDLGEYDFYEYKEYEDKPTSPPNEEFGPGVPAETDITETSINGHGAYGEKGQKGEPAVVEPGMLVEGPPGPAGPAGIMGPPGLQGPTGPPGDPGDRGPPGRPGLPGADGLPGPPGTMLMLPFRYGGDGSKGPTISAQEAQAQAILQQARIALRGPPGPMGLTGRPGPVGGPGSSGAKGESGDPGPQGPRGVQGPPGPTGKPGKRGRPGADGGRGMPGEPGAKGDRGFDGLPGLPGDKGHRGERGPQGPPGPPGDDGMRGEDGEIGPRGLPGEAGPRGLLGPRGTPGAPGQPGMAGVDGPPGPKGNMGPQGEPGPPGQQGNPGPQGLPGPQGPIGPPGEKGPQGKPGLAGLPGADGPPGHPGKEGQSGEKGALGPPGPQGPIGYPGPRGVKGADGVRGLKGSKGEKGEDGFPGFKGDMGLKGDRGEVGQIGPRGEDGPEGPKGRAGPTGDPGPSGQAGEKGKLGVPGLPGYPGRQGPKGSTGFPGFPGANGEKGARGVAGKPGPRGQRGPTGPRGSRGARGPTGKPGPKGTSGGDGPPGPPGERGPQGPQGPVGFPGPKGPPGPPGKDGLPGHPGQRGETGFQGKTGPPGPGGVVGPQGPTGETGPIGERGHPGPPGPPGEQGLPGAAGKEGAKGDPGPQGISGKDGPAGLRGFPGERGLPGAQGAPGLKGGEGPQGPPGPVVSMMIINSQTIMVVNYSSSFITLML

SEQ ID NO: 577 - protein, 729 aa, Homo sapiens
MEPWSSRWKTKRWLWDFTVTTLALTFLFQAREVRGAAPVDVLKALDFHNSPEGISKTTGFCTNRKNSKGSDTAYRVSKQAQLSAPTKQLFPGGTFPEDFSILFTVKPKKGIQSFLLSIYNEHGIQQIGVEVGRSPVFLFEDHTGKPAPEDYPLFRTVNIADGKWHRVAISVEKKTVTMIVDCKKKTTKPLDRSERAIVDTNGITVFGTRILDEEVFEGDIQQFLITGDPKAAYDYCEHYSPDCDSSAPKAAQAQEPQIDEYAPEDIIEYDYEYGEAEYKEAESVTEGPTVTEETIAQTEANIVDDFQEYNYGTMESYQTEAPRHVSGTNEPNPVEEIFTEEYLTGEDYDSQRKNSEDTLYENKEIDGRDSDLLVDGDLGEYDFYEYKEYEDKPTSPPNEEFGPGVPAETDITETSINGHGAYGEKGQKGEPAVVEPGMLVEGPPGPAGPAGIMGPPGLQGPTGPPGDPGDRGPPGRPGLPGADGLPGPPGTMLMLPFRYGGDGSKGPTISAQEAQAQAILQQARIALRGPPGPMGLTGRPGPVGGPGSSGAKGESGDPGPQGPRGVQGPPGPTGKPGKRGRPGADGGRGMPGEPGAKGDRGFDGLPGLPGDKGHRGERGPQGPPGPPGDDGMRGEDGEIGPRGLPGEAGPRGLLGPRGTPGAPGQPGMAGVDGPPGPKGNMGPQGEPGPPGQQGNPGPQGLPGPQGPIGPPGEKMCCNLSFGILIPLQK

SEQ ID NO: 578 - protein, 738 aa, Homo sapiens
MEPWSSRWKTKRWLWDFTVTTLALTFLFQAREVRGAAPVDVLKALDFHNSPEGISKTTGFCTNRKNSKGSDTAYRVSKQAQLSAPTKQLFPGGTFPEDFSILFTVKPKKGIQSFLLSIYNEHGIQQIGVEVGRSPVFLFEDHTGKPAPEDYPLFRTVNIADGKWHRVAISVEKKTVTMIVDCKKKTTKPLDRSERAIVDTNGITVFGTRILDEEVFEGDIQQFLITGDPKAAYDYCEHYSPDCDSSAPKAAQAQEPQIDEYAPEDIIEYDYEYGEAEYKEAESVTEGPTVTEETIAQTEANIVDDFQEYNYGTMESYQTEAPRHVSGTNEPNPVEEIFTEEYLTGEDYDSQRKNSEDTLYENKEIDGRDSDLLVDGDLGEYDFYEYKEYEDKPTSPPNEEFGPGVPAETDITETSINGHGAYGEKGQKGEPAVVEPGMLVEGPPGPAGPAGIMGPPGLQGPTGPPGDPGDRGPPGRPGLPGADGLPGPPGTMLMLPFRYGGDGSKGPTISAQEAQAQAILQQARIALRGPPGPMGLTGRPGPVGGPGSSGAKGESGDPGPQGPRGVQGPPGPTGKPGKRGRPGADGGRGMPGEPGAKGDRGFDGLPGLPGDKGHRGERGPQGPPGPPGDDGMRGEDGEIGPRGLPGEAGMAGVDGPPGPKGNMGPQGEPGPPGQQGNPGPQGLPGPQGPIGPPGEKVSFSFSLFYKKVIKFACDKRFVGRHDERKVVKLSLPLYLIYE

SEQ ID NO: 579 - protein, 273 aa, Homo sapiens [sequence omitted]

SEQ ID NO: 580 - protein, 159 aa, Homo sapiens
MHTVVSWSDDMFLPILIVFLSTWTHSSLAQGWVISTPCCCCSDLHPGPAWSHSENALLSHGQALRALPAWPSQRRPESLGPKQRGRTGLRVLAPCSLHTWGSTLAFPGSLCDFRAGPLGPLGLIIFICNRAMPLPCLVVLRSSCLCKQLVQCQHEMGGP

SEQ ID NO: 581 - protein, 398 aa, Homo sapiens
MALFGALFLALLAGAHAEFPGCKIRVTSKALELVKQEGLRFLEQELETITIPDLRGKEGHFYYNISEKVYDFLSTFITSGMRFLLNQQICPVLYHAGTVLLNSLLDTVPVRSSVDELVGIDYSLMKDPVASTSNLDMDFRGAFFPLTERNWSLPNRAVEPQLQEEERMVYVAFSEFFFDSAMESYFRAGALQLLLVGDKVPHDLDMLLRATYFGSIVLLSPAVIDSPLKLELRVLAPPRCTIKPSGTTISVTASVTIALVPPDQPEVQLSSMTMDARLSAKMALRGKALRTQLDLRRFRIYSNHSALESLALIPLQAPLKTMLQIGVMPMLNERTWRGVQIPLPEGINFVHEVVTNHAGFLTIGADLHFAKGLREVIEKNRPADVRASTAPTPSTAAV

SEQ ID NO: 582 - protein, 432 aa, Homo sapiens [sequence omitted]

SEQ ID NO: 583 - protein, 52 aa, Homo sapiens
MALFGALFLALLAGAHAEFPGRGCAFWSKSWRLSPFRTCGAKKATSTTTSLR

SEQ ID NO: 584 - protein, 98 aa, Homo sapiens
MALFGALFLALLAGAHAEFPGCKIRVTSKALELVKQEGLRFLEQELETITIPDLRGKEGHFYYNISEPGLERGADKFPVVGGSSLFLALDLTLRPPVG

SEQ ID NO: 585 - protein, 200 aa, Homo sapiens
MALFGALFLALLAGAHAEFPGCKIRVTSKALELVKQEGLRFLEQELETITIPDLRGKEGHFYYNISEVKVTELQLTSSELDFQPQQELMLQITNASLGLRFRRQLLYWFFYDGGYINASAEGVSIRTGLELSRDPAGRMKVSNVSCQASVSRMHAAFGGTFKKVYDFLSTFITSGMRFLLNQQVWAATGRRVARVGMLSL

SEQ ID NO: 586 - protein, 217 aa, Homo sapiens
MALFGALFLALLAGAHAEFPGCKIRVTSKALELVKQEGLRFLEQELETITIPDLRGKEGHFYYNISEVKVTELQLTSSELDFQPQQELMLQITNASLGLRFRRQLLYWFFYDGGYINASAEGVSIRTGLELSRDPAGRMKVSNVSCQASVSRMHAAFGGTFKKVYDFLSTFITSGMRFLLNQQICPVLYHAGTVLLNSLLDTVPVLWTSLLALTIPS

SEQ ID NO: 587 - protein, 148 aa, Homo sapiens
MALFGALFLALLAGAHAEFPGCKIRVTSKALELVKQEGLRFLEQELETITIPDLRGKEGHFYYNISEVKVTELQLTSSELDFQPQQELMLQITNASLGLRFRRQLLYWFLKVYDFLSTFITSGMRFLLNQQVWAATGRRVARVGMLSL

SEQ ID NO: 588 - protein, 356 aa, Homo sapiens
MLARAARGTGALLLRGSLLASGRAPRRASSGLPRNTVVLFVPQQEAWVVERMGRFHRILEPGLNILIPVLDRIRYVQSLKEIVINVPEQSAVTLDNVTLQIDGVLYLRIMDPYKASYGVEDPEYAVTQLAQTTMRSELGKLSLDKVFRERESLNASIVDAINQAADCWGIRCLRYEIKDIHVPPRVKESMQMQVEAERRKRATVLESEGTRESAINVAEGKKQAQILASEAEKAEQINQAAGEASAVLAKAKAKAEAIRILAAALTQHNGDAAASLTVAEQYVSAFSKLAKDSNTILLPSNPGDVTSMVAQAMGVYGALTKAPVPGTPDSLSSGSSRDVQGTDASLDEELDRVKMS

SEQ ID NO: 589 - protein, 315 aa, Homo sapiens
MLARAARGTGALLLRGSLLASGRAPRRASSGLPRNTVVLFVPQQEAWVVERMGRFHRILEPGLNILIPVLDRIRYVQSLKEIVINVPEQSAVTLDNVTLQIDGVLYLRIMDPYKASYGVEDPEYAVTQLAQTTMRSELGKLSLDKVFRERESLNASIVDAINQAADCWGIRCLRYEIKDIHVPPRVKESMQMQVEAERRKRATVLESEGTRESAINVAEGKKQAQILASEAEKAEQINQAAGEASAVLAKAKAKAEAIRILAAALTQHNGDAAASLTVAEQYVSAFSKLAKDSNTILLPSNPGDVTSMVAQVRAL

SEQ ID NO: 590 - protein, 290 aa, Homo sapiens
MLARAARGTGALLLRGSLLASGRAPRRASSGLPRNTVVLFVPQQEAWVVERMGRFHRILEPGLNILIPVLDRIRYVQSLKEIVINVPEQSAVTLDNVTLQIDGVLYLRIMDPYKASYGVEDPEYAVTQLAQTTMRSELGKLSLDKVFRERESLNASIVDAINQAADCWGIRCLRYEIKDIHVPPRVKESMQMQVEAERRKRATVLESEGTRESAINVAEGKKQAQILASEAEKAEQINQAAGEASAVLAKAKAKAEAIRILAAALTQHVRGPWVGMGTGIDSGRGSLIYA

SEQ ID NO: 591 - protein, 397 aa, Homo sapiens
MLARAARGTGALLLRGSLLASGRAPRRASSGLPRNTVVLFVPQQEAWVVERMGRFHRILEPGLNILIPVLDRIRYVQSLKEIVINVPEQSAVTLDNVTLQIDGVLYLRIMDPYKASYGVEDPEYAVTQLAQTTMRSELGKLSLDKVFRERESLNASIVDAINQAADCWGIRCLRYEIKDIHVPPRVKESMQMQVEAERRKRATVLESEGTRESAINVAEGKKQAQILASEAEKAEQINQAAGQERVEAEGGARHGPLKIGAGAGSLGYFDFMGQASSVPSLAGEASAVLAKAKAKAEAIRILAAALTQHNGDAAASLTVAEQYVSAFSKLAKDSNTILLPSNPGDVTSMVAQAMGVYGALTKAPVPGTPDSLSSGSSRDVQGTDASLDEELDRVKMS

SEQ ID NO: 592 - protein, 313 aa, Homo sapiens
MLARAARGTGALLLRGSLLASGRAPRRASSGLPRNTVVLFVPQQEAWVVERMGRFHRILEPGLNILIPVLDRIRYVQSLKEIVINVPEQSAVTLDNVTLQIDGVLYLRIMDPYKASYGVEDPEYAVTQLAQTTMRSELGKLSLDKVFRERESLNASIVDAINQAADCWGIRCLRYEIKDIHVPPRVKESMQMQVEAERRKRATVLESEGTRESAINVAEGKKQAQILASEAEKAEQINQAAGEASAVLAKAKAKAEAIRILAAALTQHAMGVYGALTKAPVPGTPDSLSSGSSRDVQGTDASLDEELDRVKMS

SEQ ID NO: 593 - protein, 331 aa, Homo sapiens
MLARAARGTGALLLRGSLLASGRAPRRASSGLPRNTVVLFVPQQEAWVVERMGRFHRILEPGLNILIPVLDRIRYVQSLKEIVINVPEQSAVTLDNVTLQIDGVLYLRIMDPYKASYGVEDPEYAVTQLAQTTMRSELGKLSLDKVFRERESLNASIVDAINQAADCWGIRCLRYEIKDIHVPPRVKESMQMQVEAERRKRATVLESEGTRESAINVAEGKKQAQILASEAEKAEQINQAAGQERVEAEGGARHGPLKIGAGAGSLGYFDFMGQASSVPSLAGEASAVLAKAKAKAEAIRILAAALTQHVRGPWVGMGTGIDSGRGSLIYA

SEQ ID NO: 594 - protein, 183 aa, Homo sapiens
MLARAARGTGALLLRGSLLASGRAPRRASSGLPRNTVVLFVPQQEAWVVERMGRFHRILEPGLNILIPVLDRIRYVQSLKEIVINVPEQSAVTLDNVTLQIDGVLYLRIMDPYKASYGVEDPEYAVTQLAQTTMRSELGKLSLDKVFRVSRSEPELGFEDTNLTLLIFSEGQDQSQALLSVGP

SEQ ID NO: 595 - protein, 220 aa, Homo sapiens
MLARAARGTGALLLRGSLLASGRAPRRASSGLPRNTVVLFVPQQEAWVVERMGRFHRILEPGLNILIPVLDRIRYVQSLKEIVINVPEQSAVTLDNVTLQIDGVLYLRIMDPYKASYGVEDPEYAVTQLAQTTMRSELGKLSLDKVFRERESLNASIVDAINQAADCWGIRCLRYEIKDIHVPPRVKESMQMQVGAKEGWEKGLRAPVPGGSRLPSCYDG

SEQ ID NO: 596 - protein, 311 aa, Homo sapiens
MLARAARGTGALLLRGSLLASGRAPRRASSGLPRNTVVLFVPQQEAWVVERMGRFHRILEPGLNILIPVLDRIRYVQSLKEIVINVPEQSAVTLDNVTLQIDGVLYLRIMDPYKASYGVEDPEYAVTQLAQTTMRSELGKLSLDKVFRVEAERRKRATVLESEGTRESAINVAEGKKQAQILASEAEKAEQINQAAGEASAVLAKAKAKAEAIRILAAALTQHNGDAAASLTVAEQYVSAFSKLAKDSNTILLPSNPGDVTSMVAQAMGVYGALTKAPVPGTPDSLSSGSSRDVQGTDASLDEELDRVKMS

SEQ ID NO: 597 - protein, 205 aa, Homo sapiens
MLARAARGTGALLLRGSLLASGRAPRRASSGLPRNTVVLFVPQQEAWVVERMGRFHRILEPGLNILIPVLDRIRYVQSLKEIVINVPEQSAVTLDNVTLQIDGVLYLRIMDPYKASYGVEDPEYAVTQLAQTTMRSELGKLSLDKVFRERESLNASIVAQAMGVYGALTKAPVPGTPDSLSSGSSRDVQGTDASLDEELDRVKMS

SEQ ID NO: 598 - protein, 161 aa, Homo sapiens
MLARAARGTGALLLRGSLLASGRAPRRASSGLPRNTVVLFVPQQEAWVVERMGRFHRILEPGLNILIPVLDRIRYVQSLKEIVINVPEQSAVTLDNVTLQIDGVLYLRIMDPYKASYGVEDPEYAVTQLAQTTMRSELGKLSSRLTLQWEQQRCPGYRCKS

SEQ ID NO: 599 - protein, 60 aa, Homo sapiens
MLARAARGTGALLLRVRARQPFQRVRTEITWVLRWKRAKFQLLERTGVRGHGPHVILRGS

SEQ ID NO: 600 - protein, 102 aa, Homo sapiens
MLARAARGTGALLLRGSLLASGRAPRRASSGLPRNTVVLFVPQQEAWVVERMGRFHRILEPVRNLFCPPWASQMTNPSRHAMSGGLPLGLPALLAPDSVGQT

SEQ ID NO: 601 - protein, 72 aa, Homo sapiens
MLARAARGTGALLLRGSLLASGRAPRRASSGLPRNTVVLFVPQQEAWVVERMGRFHRILEPELLLFWACSMC

SEQ ID NO: 602 - protein, 111 aa, Homo sapiens
MLARAARGTGALLLRGSLLASGRAPRRASSGLPRNTVVLFVPQQEAWVVERMGRFHRILEPGLNILIPVLDRIRYVQSLKEIVINVPEQSAVTLGTGVPECQHCGCHQPSC

SEQ ID NO: 603 - protein, 112 aa, Homo sapiens
MYAQALLVVGVLQRQAAAQHLHEHPPKLLRGHRVQERVDDRAEVEKRLREGEEDHVRPEVGPRPVVLGFGRSHDPPNLVGHPAYGQCHNNQPWADTSRRERQRKEKHSMRTQ

SEQ ID NO: 604 - protein, 222 aa, Homo sapiens
MWVLGIAATFCGLFLLPGFALQIQCYQCEEFQLNNDCSSPEFIVNCTVNVQDMCQKEVMEQSAGIMYRKSCASSAACLIASAGSPCRGLAPGREEQRALHKAGAVGGGVRMYAQALLVVGVLQRQAAAQHLHEHPPKLLRGHRVQERVDDRAEVEKRLREGEEDHVRPEVGPRPVVLGFGRSHDPPNLVGHPAYGQCHNNQPWADTSRRERQRKEKHSMRTQ

SEQ ID NO: 605 - protein, 93 aa, Homo sapiens
MWVLGIAATFCGLFLLPGFALQIQCYQCEEFQLNNDCSSPEFIVNCTVNVQDMCQKEVMEQSAGSHCVTRLECSGTISAHCNLCLPGSNDHPT

SEQ ID NO: 606 - protein, 84 aa, Homo sapiens
MWVLGIAATFCGLFLLPGFALQIQCYQCEEFQLNNDCSSPEFIVNCTVNVQDMCQKEVMEQSADTKRTNTLLFEMRHFAKQLTT

SEQ ID NO: 607 - protein, 90 aa, Homo sapiens
MWVLGIAATFCGLFLLPGFALQIQCYQCEEFQLNNDCSSPEFIVNCTVNVQDMCQKEVMEQSADRVSLCHEAGVQWNNFSTLQPLPPRLK

SEQ ID NO: 608 - protein, 214 aa, Homo sapiens
MRLLPRLLLLLLLVFPATVLFRGGPRGLLAVAQDLTEDEETVEDSIIEDEDDEAEVEEDEPTDLVEDKEEEDVSGEPEASPSADTTILFVKGEDFPANNIVKFLVGFTNKGTEDFIVESLDASFRYPQDYQFYIQNFTALPLNTVVPPQRQATFEYSFIPAEPMGGRPFGLVINLNYKDLNGNVFQDAVFNQTVTVIEREDGLDGETVRDPYRK

SEQ ID NO: 609 - protein, 207 aa, Homo sapiens
MRLLPRLLLLLLLVFPATVLFRGGPRGLLAVAQDLTEDEETVEDSIIEDEDDEAEVEEDEPTDLVEDKEEEDVSGEPEASPSADTTILFVKGEDFPANNIVKFLVGFTNKGTEDFIVESLDASFRYPQDYQFYIQNFTALPLNTVVPPQRQATFEYSFIPAEPMGGRPFGLVINLNYKDLNGNVFQDAVFNQTVTVIEREDGLDGET

SEQ ID NO: 610 - protein, 192 aa, Homo sapiens
MRLLPRLLLLLLLVFPATVLFRGGPRGLLAVAQDLTEDEETVEDSIIEDEDDEAEVEEDEPTDLVEDKEEEDVSGEPEASPSADTTILFVKGEDFPANNIVKFLVGFTNKGTEDFIVESLDASFRYPQDYQFYIQNFTALPLNTVVPPQRQATFEYSFIPAEPMGGRPFGLVINLNYKDLNVRSSKPSFCLS

SEQ ID NO: 611 - protein, 104 aa, Homo sapiens
MRLLPRLLLLLLLVFPATVLFRGGPRGLLAVAQDLTEDEETVEDSIIEDEDDEAEVEEDEPTDLVEDKEEEDVSGEPEASPSADTTILFVKGEGNTEVLVLIQM

SEQ ID NO: 612 - DNA, 94 bp, Artificial
  Synthetic oligonucleotide
tgacactggcaaaacaatgcagactttgctttccttggtcaggcagtataatccaaagatggtcaaggtcgcaagcttgctggtgaaaaggacc

SEQ ID NO: 613 - DNA, 20 bp, Artificial
  Synthetic oligonucleotide
gaggccgtcaccaagaacat

SEQ ID NO: 614 - DNA, 19 bp, Artificial
  Synthetic oligonucleotide
ggacagccggtcagagctc

SEQ ID NO: 615 - DNA, 111 bp, Artificial
  Synthetic oligonucleotide
gaggccgtcaccaagaacattcacgagtcctgcatgagccagataggctggaaccgcatcatcgtggagaagcccttcgggagggacctgcagagctctgaccggctgtcc

SEQ ID NO: 616 - protein, 1055 aa, Homo sapiens
MALRRLGAALLLLPLLAAVEETLMDSTTATAELGWMVHPPSGWEEVSGYDENMNTIRTYQVCNVFESSQNNWLRTKFIRRRGAHRIHVEMKFSVRDCSSIPSVPGSCKETFNLYYYEADFDSATKTFPNWMENPWVKVDTIAADESFSQVDLGGRVMKINTEVRSFGPVSRSGFYLAFQDYGGCMSLIAVRVFYRKCPRIIQNGAIFQETLSGAESTSLVAARGSCIANAEEVDVPIKLYCNGDGEWLVPIGRCMCKAGFEAVENGTVCRGCPSGTFKANQGDEACTHCPINSRTTSEGATNCVCRNGYYRADLDPLDMPCTTIPSAPQAVISSVNETSLMLEWTPPRDSGGREDLVYNIICKSCGSGRGACTRCGDNVQYAPRQLGLTEPRIYISDLLAHTQYTFEIQAVNGVTDQSPFSPQFASVNITTNQAAPSAVSIMHQVSRTVDSITLSWSQPDQPNGVILDYELQYYEKELSEYNATAIKSPTNTVTVQGLKAGAIYVFQVRARTVAGYGRYSGKMYFQTMTEAEYQTSIQEKLPLIIGSSAAGLVFLIAVVVIAIVCNRRGFERADSEYTDKLQHYTSGHMTPGMKIYIDPFTYEDPNEAVREFAKEIDISCVKIEQVIGAGEFGEVCSGHLKLPGKREIFVAIKTLKSGYTEKQRRDFLSEASIMGQFDHPNVIHLEGVVTKSTPVMIITEFMENGSLDSFLRQNDGQFTVIQLVGMLRGIAAGMKYLADMNYVHRDLAARNILVNSNLVCKVSDFGLSRFLEDDTSDPTYTSALGGKIPIRWTAPEAIQYRKFTSASDVWSYGIVMWEVMSYGERPYWDMTNQDVINAIEQDYRLPPPMDCPSALHQLMLDCWQKDRNHRPKFGQIVNTLDKMIRNPNSLKAMAPLSSGINLPLLDRTIPDYTSFNTVDEWLEAIKMGQYKESFANAGFTSFDVVSQMMMEDILRLGVTLAGHQKKILNSIQVMRAQMNQIQSVEGQPLARRPRATGRTKRCQPRDVTKKTCNSNDGKKKGMGKKKTDPGRGREIQGIFFKEDSHKESNDCSCGG

SEQ ID NO: 617 - protein, 344 aa, Homo sapiens
MGPPSAPPCRLHVPWKEVLLTASLLTFWNPPTTAKLTIESTPFNVAEGKEVLLLAHNLPQNRIGYSWYKGERVDGNSLIVGYVIGTQQATPGPAYSGRETIYPNASLLIQNVTQNDTGFYTLQVIKSDLVNEEATGQFHVYPELPKPSISSNNSNPVEDKDAVAFTCEPEVQNTTYLWWVNGQSLPVSPRLQLSNGNMTLTLLSVKRNDAGSYECEIQNPASANRSDPVTLNVLYGPDVPTISPSKANYRPGENLNLSCHAASNPPAQYSWFINGTFQQSTQELFIPNITVNNSGSYMCQAHNSATGLNRTTVTMITVSGSAPVLSAVATVGITIGVLARVALI

SEQ ID NO: 618 - protein, 114 aa, Homo sapiens
MSLLSSRAARVPGPSSSLCALLVLLLLLTQPGPIASAGPAAAVLRELRCVCLQTTQGVHPKMISNLQVFAIGPQCSKVEVVASLKNGKEICLDPEAPFLKKVIQKILDGGNKEN

SEQ ID NO: 619 - protein, 107 aa, Homo sapiens
MAHATLSAAPSNPRLLRVALLLLLLVAASRRAAGASVVTELRCQCLQTLQGIHLKNIQSVNVRSPGPHCAQTEVIATLKNGKKACLNPASPMVQKIIEKILNKGSTN

SEQ ID NO: 620 - protein, 461 aa, Homo sapiens
MNNFGNEEFDCHFLDEGFTAKDILDQKINEVSSSDDKDAFYVADLGDILKKHLRWLKALPRVTPFYAVKCNDSKAIVKTLAATGTGFDCASKTEIQLVQSLGVPPERIIYANPCKQVSQIKYAANNGVQMMTFDSEVELMKVARAHPKAKLVLRIATDDSKAVCRLSVKFGATLRTSRLLLERAKELNIDVVGVSFHVGSGCTDPETFVQAISDARCVFDMGAEVGFSMYLLDIGGGFPGSEDVKLKFEEITGVINPALDKYFPSDSGVRIIAEPGRYYVASAFTLAVNIIAKKIVLKEQTGSDDEDESSEQTFMYYVNDGVYGSFNCILYDHAHVKPLLQKRPKPDEKYYSSSIWGPTCDGLDRIVERCDLPEMHVGDWMLFENMGAYTVAAASTFNGFQRPTIYYVMSGPAWQLMQQFQNPDFPPEVEEQDASTLPVSCAWESGMKRHRAACASASINV

SEQ ID NO: 621 - protein, 214 aa, Homo sapiens
MGAAHSASEEVRELEGKTGFSSDQIEQLHRRFKQLSGDQPTIRKENFNNVPDLELNPIRSKIVRAFFDNRNLRKGPSGLADEINFEDFLTIMSYFRPIDTTMDEEQVELSRKEKLRFLFHMYDSDSDGRITLEEYRNVVEELLSGNPHIEKESARSIADGAMMEAASVCMGQMEPDQVYEGITFEDFLKIWQGIDIETKMHVRFLNMETMALCH

SEQ ID NO: 622 - protein, 280 aa, Homo sapiens
MSESFDCAKCNESLYGRKYIQTDSGPYCVPCYDNTFANTCAECQQLIGHDSRELFYEDRHFHEGCFRCCRCQRSLADEPFTRQDSELLCNDCYCSAFSSQCSACGETVMPGSRKLEYGGQTWHEHCFLCIGCEQPLGSRPFVPDKGAHYCVPCYENNFAPRCARCTKTLTQGGLTYRDLPWHPKCLVCTGCQTPLAGQQFTSRDEDPYCVACFGELFAPKCSSCKRPIVGLGGGKYVSFEDRHWHHNCFTCDRCSNSLVGQGFVPDGDQVLCQGCSQAGP

SEQ ID NO: 623 - protein, 132 aa, Homo sapiens
VDAFLGTWKLVDSKNFDDYMKSLGVGFATRQVASMTKPTTIIEKNGDILTLKTHSTFKNTEISFKLGVEFDETTADDRKVKSIVTLDGGKLVHLQKWDGQETTLVRELIDGKLILTLTHGTAVCTRTYEKEA

SEQ ID NO: 624 - protein, 446 aa, Homo sapiens
MLLPQLCWLPLLAGLLPPVPAQKFSALTFLRVDQDKDKDCSLDCAGSPQKPLCASDGRTFLSRCEFQRAKCKDPQLEIAYRGNCKDVSRCVAERKYTQEQARKEFQQVFIPECNDDGTYSQVQCHSYTGYCWCVTPNGRPISGTAVAHKTPRCPGSVNEKLPQREGTGKTDDAAAPALETQPQGDEEDIASRYPTLWTEQVKSRQNKTNKNSVSSCDQEHQSALEEAKQPKNDNVVIPECAHGGLYKPVQCHPSTGYCWCVLVDTGRPIPGTSTRYEQPKCDNTARAHPAKARDLYKGRQLQGCPGAKKHEFLTSVLDALSTDMVHAASDPSSSSGRLSEPDPSHTLEERVVHWYFKLLDKNSSGDIGKKEIKPFKRFLRKKSKPKKCVKKFVEYCDVNNDKSISVQELMGCLGVAKEDGKADTKKRHTPRGHAESTSNRQPRKQG

SEQ ID NO: 625 - protein, 132 aa, Homo sapiens
MKSSGLFPFLVLLALGTLAPWAVEGSGKSFKAGVCPPKKSAQCLRYKKPECQSDWQCPGKKRCCPDTCGIKCLDPVDTPNPTRRKPGKCPVTYGQCLMLNPPNFCEMDGQCKRDLKCCMGMCGKSCVSPVKA

SEQ ID NO: 626 - protein, 2224 aa, Homo sapiens
MFPGCPRLWVLVVLGTSWVGWGSQGTEAAQLRQFYVAAQGISWSYRPEPTNSSLNLSVTSFKKIVYREYEPYFKKEKPQSTISGLLGPTLYAEVGDIIKVHFKNKADKPLSIHPQGIRYSKLSEGASYLDHTFPAEKMDDAVAPGREYTYEWSISEDSGPTHDDPPCLTHIYYSHENLIEDFNSGLIGPLLICKKGTLTEGGTQKTFDKQIVLLFAVFDESKSWSQSSSLMYTVNGYVNGTMPDITVCAHDHISWHLLGMSSGPELFSIHFNGQVLEQNHHKVSAITLVSATSTTANMTVGPEGKWIISSLTPKHLQAGMQAYIDIKNCPKKTRNLKKITREQRRHMKRWEYFIAAEEVIWDYAPVIPANMDKKYRSQHLDNFSNQIGKHYKKVMYTQYEDESFTKHTVNPNMKEDGILGPIIRAQVRDTLKIVFKNMASRPYSIYPHGVTFSPYEDEVNSSFTSGRNNTMIRAVQPGETYTYKWNILEFDEPTENDAQCLTRPYYSDVDIMRDIASGLIGLLLICKSRSLDRRGIQRAADIEQQAVFAVFDENKSWYLEDNINKFCENPDEVKRDDPKFYESNIMSTINGYVPESITTLGFCFDDTVQWHFCSVGTQNEILTIHFTGHSFIYGKRHEDTLTLFPMRGESVTVTMDNVGTWMLTSMNSSPRSKKLRLKFRDVKCIPDDDEDSYEIFEPPESTVMATRKMHDRLEPEDEESDADYDYQNRLAAALGIRSFRNSSLNQEEEEFNLTALALENGTEFVSSNTDIIVGSNYSSPSNISKFTVNNLAEPQKAPSHQQATTAGSPLRHLIGKNSVLNSSTAEHSSPYSEDPIEDPLQPDVTGIRLLSLGAGEFKSQEHAKHKGPKVERDQAAKHRFSWMKLLAHKVGRHLSQDTGSPSGMRPWEDLPSQDTGSPSRMRPWKDPPSDLLLLKQSNSSKILVGRWHLASEKGSYEIIQDTDEDTAVNNWLISPQNASRAWGESTPLANKPGKQSGHPKFPRVRHKSLQVRQDGGKSRLKKSQFLIKTRKKKKEKHTHHAPLSPRTFHPLRSEAYNTFSERRLKHSLVLHKSNETSLPTDLNQTLPSMDFGWIASLPDHNQNSSNDTGQASCPPGLYQTVPPEEHYQTFPIQDPDQMHSTSDPSHRSSSPELSEMLEYDRSHKSFPTDISQMSPSSEHEVWQTVISPDLSQVTLSPELSQTNLSPDLSHTTLSPELIQRNLSPALGQMPISPDLSHTTLSPDLSHTTLSLDLSQTNLSPELSQTNLSPALGQMPLSPDLSHTTLSLDFSQTNLSPELSHMTLSPELSQTNLSPALGQMPISPDLSHTTLSLDFSQTNLSPELSQTNLSPALGQMPLSPDPSHTTLSLDLSQTNLSPELSQTNLSPDLSEMPLFADLSQIPLTPDLDQMTLSPDLGETDLSPNFGQMSLSPDLSQVTLSPDISDTTLLPDLSQISPPPDLDQIFYPSESSQSLLLQEFNESFPYPDLGQMPSPSSPTLNDTFLSKEFNPLVIVGLSKDGTDYIEIIPKEEVQSSEDDYAEIDYVPYDDPYKTDVRTNINSSRDPDNIAAWYLRSNNGNRRNYYIAAEEISWDYSEFVQRETDIEDSDDIPEDTTYKKVVFRKYLDSTFTKRDPRGEYEEHLGILGPIIRAEVDDVIQVRFKNLASRPYSLHAHGLSYEKSSEGKTYEDDSPEWFKEDNAVQPNSSYTYVWHATERSGPESPGSACRAWAYYSAVNPEKDIHSGLIGPLLICQKGILHKDSNMPVDMREFVLLFMTFDEKKSWYYEKKSRSSWRLTSSEMKKSHEFHAINGMIYSLPGLKMYEQEWVRLHLLNIGGSQDIHVVHFHGQTLLENGNKQHQLGVWPLLPGSFKTLEMKASKPGWWLLNTEVGENQRAGMQTPFLIMDRDCRMPMGLSTGIISDSQIKASEFLGYWEPRLARLNNGGSYNAWSVEKLAAEFASKPWIQVDMQKEVIITGIQTQGAKHYLKSCYTTEFYVAYSSNQINWQIFKGNSTRNVMYFNGNSDASTIKENQFDPPIVARYIRISPTRAYNRPTLRLELQGCEVNGCSTPLGMENGKIENKQITASSFKKSWWGDYWEPFRARLNAQGRVNAWQAKANNNKQWLEIDLLKIKKITAIITQGCKSLSSEMYVKSYTIHYSEQGVEWKPYRLKSSMVDKIFEGNTNTKGHVKNFFNPPIISRFIRVIPKTWNQSITLRLELFGCDIY

SEQ ID NO: 627 - protein, 2224 aa, Homo sapiens
MFPGCPRLWVLVVLGTSWVGWGSQGTEAAQLRQFYVAAQGISWSYRPEPTNSSLNLSVTSFKKIVYREYEPYFKKEKPQSTISGLLGPTLYAEVGDIIKVHFKNKADKPLSIHPQGIRYSKLSEGASYLDHTFPAEKMDDAVAPGREYTYEWSISEDSGPTHDDPPCLTHIYYSHENLIEDFNSGLIGPLLICKKGTLTEGGTQKTFDKQIVLLFAVFDESKSWSQSSSLMYTVNGYVNGTMPDITVCAHDHISWHLLGMSSGPELFSIHFNGQVLEQNHHKVSAITLVSATSTTANMTVGPEGKWIISSLTPKHLQAGMQAYIDIKNCPKKTRNLKKITREQRRHMKRWEYFIAAEEVIWDYAPVIPANMDKKYRSQHLDNFSNQIGKHYKKVMYTQYEDESFTKHTVNPNMKEDGILGPIIRAQVRDTLKIVFKNMASRPYSIYPHGVTFSPYEDEVNSSFTSGRNNTMIRAVQPGETYTYKWNILEFDEPTENDAQCLTRPYYSDVDIMRDIASGLIGLLLICKSRSLDRRGIQRAADIEQQAVFAVFDENKSWYLEDNINKFCENPDEVKRDDPKFYESNIMSTINGYVPESITTLGFCFDDTVQWHFCSVGTQNEILTIHFTGHSFIYGKRHEDTLTLFPMRGESVTVTMDNVGTWMLTSMNSSPRSKKLRLKFRDVKCIPDDDEDSYEIFEPPESTVMATRKMHDRLEPEDEESDADYDYQNRLAAALGIRSFRNSSLNQEEEEFNLTALALENGTEFVSSNTDIIVGSNYSSPSNISKFTVNNLAEPQKAPSHQQATTAGSPLRHLIGKNSVLNSSTAEHSSPYSEDPIEDPLQPDVTGIRLLSLGAGEFRSQEHAKRKGPKVERDQAAKHRFSWMKLLAHKVGRHLSQDTGSPSGMRPWEDLPSQDTGSPSRMRPWKDPPSDLLLLKQSNSSKILVGRWHLASEKGSYEIIQDTDEDTAVNNWLISPQNASRAWGESTPLANKPGKQSGHPKFPRVRHKSLQVRQDGGKSRLKKSQFLIKTRKKKKEKHTHHAPLSPRTFHPLRSEAYNTFSERRLKHSLVLHKSNETSLPTDLNQTLPSMDFGWIASLPDHNQNSSNDTGQASCPPGLYQTVPPEEHYQTFPIQDPDQMHSTSDPSHRSSSPELSEMLEYDRSHKSFPTDISQMSPSSEHEVWQTVISPDLSQVTLSPELSQTNLSPDLSHTTLSPELIQRNLSPALGQMPISPDLSHTTLSPDLSHTTLSLDLSQTNLSPELSQTNLSPALGQMPLSPDLSHTTLSLDFSQTNLSPELSHMTLSPELSQTNLSPALGQMPISPDLSHTTLSLDFSQTNLSPELSQTNLSPALGQMPLSPDPSHTTLSLDLSQTNLSPELSQTNLSPDLSEMPLFADLSQIPLTPDLDQMTLSPDLGETDLSPNFGQMSLSPDLSQVTLSPDISDTTLLPDLSQISPPPDLDQIFYPSESSQSLLLQEFNESFPYPDLGQMPSPSSPTLNDTFLSKEFNPLVIVGLSKDGTDYIEIIPKEEVQSSEDDYAEIDYVPYDDPYKTDVRTNINSSRDPDNIAAWYLRSNNGNRRNYYIAAEEISWDYSEFVQRETDIEDSDDIPEDTTYKKVVFRKYLDSTFTKRDPRGEYEEHLGILGPIIRAEVDDVIQVRFKNLASRPYSLHAHGLSYEKSSEGKTYEDDSPEWFKEDNAVQPNSSYTYVWHATERSGPESPGSACRAWAYYSAVNPEKDIHSGLIGPLLICQKGILHKDSNMPVDMREFVLLFMTFDEKKSWYYEKKSRSSWRLTSSEMKKSHEFHAINGMIYSLPGLKMYEQEWVRLHLLNIGGSQDIHVVHFHGQTLLENGNKQHQLGVWPLLPGSFKTLEMKASKPGWWLLNTEVGENQRAGMQTPFLIMDRDCRMPMGLSTGIISDSQIKASEFLGYWEPRLARLNNGGSYNAWSVEKLAAEFASKPWIQVDMQKEVIITGIQTQGAKHYLKSCYTTEFYVAYSSNQINWQIFKGNSTRNVMYFNGNSDASTIKENQFDPPIVARYIRISPTRAYNRPTLRLELQGCEVNGCSTPLGMENGKIENKQITASSFKKSWWGDYWEPFRARLNAQGRVNAWQAKANNNKQWLEIDLLKIKKITAIITQGCKSLSSEMYVKSYTIHYSEQGVEWKPYRLKSSMVDKIFEGNTNTKGHVKNFFNPPIISRFIRVIPKTWNQSITLRLELFGCDIY

SEQ ID NO: 628 - protein, 1880 aa, Homo sapiens
PYSVGFREADAATSFLRAARSGNLDKALDHLRNGVDINTCNQNGLNGLHLASKEGHVKMVVELLHKEIILETTTKKGNTALHIAALAGQDEVVRELVNYGANVNAQSQKGFTPLYMAAQENHLEVVKFLLENGANQNVATEDGFTPLAVALQQGHENVVAHLINYGTKGKVRLPALHIAARNDDTRTAAVLLQNDPNPDVLSKTGFTPLHIAAHYENLNVAQLLLNRGASVNFTPQNGITPLHIASRRGNVIMVRLLLDRGAQIETKTKDELTPLHCAARNGHVRISEILLDHGAPIQAKTKNGLSPIHMAAQGDHLDCVRLLLQYDAEIDDITLDHLTPLHVAAHCGHHRVAKVLLDKGAKPNSRALNGFTPLHIACKKNHVRVMELLLKTGASIDAVTESGLTPLHVASFMGHLPIVKNLLQRGASPNVSNVKVETPLHMAARAGHTEVAKYLLQNKAKVNAKAKDDQTPLHCAARIGHTNMVKLLLENNANPNLATTAGHTPLHIAAREGHVETVLALLEKEASQACMTKKGFTPLHVAAKYGKVRVAELLLERDAHPNAAGKNGLTPLHVAVHHNNLDIVKLLLPRGGSPHSPAWNGYTPLHIAAKQNQVEVARSLLQYGGSANAESVQGVTPLHLAAQEGHAEMVALLLSKQANGNLGNKSGLTPLHLVAQEGHVPVADVLIKHGVMVDATTRMGYTPLHVASHYGNIKLVKFLLQHQADVNAKTKLGYSPLHQAAQQGHTDIVTLLLKNGASPNEVSSDGTTPLAIAKRLGYISVTDVLKVVTDETSFVLVSDKHRMSFPETVDEILDVSEDEGEELISFKAERRDSRDVDEEKELLDFVPKLDQVVESPAIPRIPCAMPETVVIRSEEQEQASKEYDEDSLIPSSPATETSDNISPVASPVHTGFLVSFMVDARGGSMRGSRHNGLRVVIPPRTCAAPTRITCRLVKPQKLSTPPPLAEEEGLASRIIALGPTGAQFLSPVIVEIPHFASHGRGDRELVVLRSENGSVWKEHRSRYGESYLDQILNGMDEELGSLEELEKKRVCRIITTDFPLYFVIMSRLCQDYDIIGPEGGSLKSKLVPLVQATFPENAVTKRVKLALQAQPVPDELVTKLLGNQATFSPIVTVEPRRRKFHRPIGLRIPLPPSWTDNPRDSGEGDTTSLRLLCSVIGGTDQAQWEDITGTTKLVYANECANFTTNVSARFWLSDCPRTAEAVNFATLLYKELTAVPYMAKFVIFAKMNDPREGRLRCYCMTDDKVDKTLEQHENFVEVARSRDIEVLEGMSLFAELSGNLVPVKKAAQQRSFHFQSFRENRLAMPVKVRDSSREPGGSLSFLRKAMKYEDTQHILCHLNITMPPCAKGSGAEDRRRTPTPLALRYSILSESTPGSLSGTEQAEMKMAVISEHLGLSWAELARELQFSVEDINRIRVENPNSLLEQSVALLNLWVIREGQNANMENLYTALQSIDRGEIVNMLEGSGRQSRNLKPDRRHTDRDYSLSPSQMNGYSSLQDELLSPASLGCALSSPLRADQYWNEVAVLDAIPLAATEHDTMLEMSDMQVWSAGLTPSLVTAEDSSLECSKAEDSDATGHEWKLEGALSEEPRGPELGSLELVEDDTVDSDATNGLIDLLEQEEGQRSEEKLPGSKRQDDATGAGQDSENEVSLVSGHQRGQARITHSPTVSQVTERSQDRLQDWDADGSIVSYLQDAAQGSWQEEVTQGPHSFQGTSTMTEGLEPGGSQEYEKVLVSVSEHTWTEQPEAESSQADRDRRQQGQEEQVQEAKNTFTQVVQGNEFQNIPGEQVTEEQFTDEQGNIVTKKIIRKVVRQIDLSSADAAQEHEEVTVEGPLEDPSELEVDIDYFMKHSKDHTSTPNP

SEQ ID NO: 629 - protein, 1881 aa, Homo sapiens
MPYSVGFREADAATSFLRAARSGNLDKALDHLRNGVDINTCNQNGLNGLHLASKEGHVKMVVELLHKEIILETTTKKGNTALHIAALAGQDEVVRELVNYGANVNAQSQKGFTPLYMAAQENHLEVVKFLLENGANQNVATEDGFTPLAVALQQGHENVVAHLINYGTKGKVRLPALHIAARNDDTRTAAVLLQNDPNPDVLSKTGFTPLHIAAHYENLNVAQLLLNRGASVNFTPQNGITPLHIASRRGNVIMVRLLLDRGAQIETKTKDELTPLHCAARNGHVRISEILLDHGAPIQAKTKNGLSPIHMAAQGDHLDCVRLLLQYDAEIDDITLDHLTPLHVAAHCGHHRVAKVLLDKGAKPNSRALNGFTPLHIACKKNHVRVMELLLKTGASIDAVTESGLTPLHVASFMGHLPIVKNLLQRGASPNVSNVKVETPLHMAARAGHTEVAKYLLQNKAKVNAKAKDDQTPLHCAARIGHTNMVKLLLENNANPNLATTAGHTPLHIAAREGHVETVLALLEKEASQACMTKKGFTPLHVAAKYGKVRVAELLLERDAHPNAAGKNGLTPLHVAVHHNNLDIVKLLLPRGGSPHSPAWNGYTPLHIAAKQNQVEVARSLLQYGGSANAESVQGVTPLHLAAQEGHAEMVALLLSKQANGNLGNKSGLTPLHLVAQEGHVPVADVLIKHGVMVDATTRMGYTPLHVASHYGNIKLVKFLLQHQADVNAKTKLGYSPLHQAAQQGHTDIVTLLLKNGASPNEVSSDGTTPLAIAKRLGYISVTDVLKVVTDETSFVLVSDKHRMSFPETVDEILDVSEDEGEELISFKAERRDSRDVDEEKELLDFVPKLDQVVESPAIPRIPCAMPETVVIRSEEQEQASKEYDEDSLIPSSPATETSDNISPVASPVHTGFLVSFMVDARGGSMRGSRHNGLRVVIPPRTCAAPTRITCRLVKPQKLSTPPPLAEEEGLASRIIALGPTGAQFLSPVIVEIPHFASHGRGDRELVVLRSENGSVWKEHRSRYGESYLDQILNGMDEELGSLEELEKKRVCRIITTDFPLYFVIMSRLCQDYDIIGPEGGSLKSKLVPLVQATFPENAVTKRVKLALQAQPVPDELVTKLLGNQATFSPIVTVEPRRRKFHRPIGLRIPLPPSWTDNPRDSGEGDTTSLRLLCSVIGGTDQAQWEDITGTTKLVYANECANFTTNVSARFWLSDCPRTAEAVNFATLLYKELTAVPYMAKFVIFAKMNDPREGRLRCYCMTDDKVDKTLEQHENFVEVARSRDIEVLEGMSLFAELSGNLVPVKKAAQQRSFHFQSFRENRLAMPVKVRDSSREPGGSLSFLRKAMKYEDTQHILCHLNITMPPCAKGSGAEDRRRTPTPLALRYSILSESTPGSLSGTEQAEMKMAVISEHLGLSWAELARELQFSVEDINRIRVENPNSLLEQSVALLNLWVIREGQNANMENLYTALQSIDRGEIVNMLEGSGRQSRNLKPDRRHTDRDYSLSPSQMNGYSSLQDELLSPASLGCALSSPLRADQYWNEVAVLDAIPLAATEHDTMLEMSDMQVWSAGLTPSLVTAEDSSLECSKAEDSDATGHEWKLEGALSEEPRGPELGSLELVEDDTVDSDATNGLIDLLEQEEGQRSEEKLPGSKRQDDATGAGQDSENEVSLVSGHQRGQARITHSPTVSQVTERSQDRLQDWDADGSIVSYLQDAAQGSWQEEVTQGPHSFQGTSTMTEGLEPGGSQEYEKVLVSVSEHTWTEQPEAESSQADRDRRQQGQEEQVQEAKNTFTQVVQGNEFQNIPGEQVTEEQFTDEQGNIVTKKIIRKVVRQIDLSSADAAQEHEEVTVEGPLEDPSELEVDIDYFMKHSKDHTSTPNP

SEQ ID NO: 630 - protein, 155 aa, Homo sapiens
MWTFVTQLLVTLVLLSFFLVSCQNVMHIVRGSLCFVLKHIHQELDKELGESEDLSDDEETISTRVVRRRVFLKGNEFQNIPGEQVTEEQFTDEQGNIVTKKIIRKVVRQIDLSSADAAQEHEEVELRGSGLQPDLIEGRKGAQIVKRASLKRGKQ

SEQ ID NO: 631 - protein, 131 aa, Homo sapiens
MWTFVTQLLVTLVLLSFFLVSCQNVMHIVRGSLCFVLKHIHQELDKELGESEGLSDDEETISTRVVRRRVFLKGNEFQNIPGEQVTEEQFTDEQGNIVTKKIIRKVVRQIDLSSADAAQEHEEDHTSTPNP

SEQ ID NO: 632 - protein, 464 aa, Homo sapiens
MILANVFCLFFFLDETLRSLASPSSLQGPELHGWRPPVDCVRANELCAAESNCSSRYRTLRQCLAGRDRNTMLANKECQAALEVLQESPLYDCRCKRGMKKELQCLQIYWSIHLGLTEGEEFYEASPYEPVTSRLSDIFRLASIFSGTGADPVVSAKSNHCLDAAKACNLNDNCKKLRSSYISICNREISPTERCNRRKCHKALRQFFDRVPSEYTYRMLFCSCQDQACAERRRQTILPSCSYEDKEKPNCLDLRGVCRTDHLCRSRLADFHANCRASYQTVTSCPADNYQACLGSYAGMIGFDMTPNYVDSSPTGIVVSPWCSCRGSGNMEEECEKFLRDFTENPCLRNAIQAFGNGTDVNVSPKGPSFQATQAPRVEKTPSLPDDLSDSTSLGTSVITTCTSVQEQGLKANNSKELSMCFTELTTNIIPGSNKVIKPNSGPSRARPSAALTVLSVLMLKQAL

SEQ ID NO: 633 - protein, 1806 aa, Homo sapiens
MEPWSSRWKTKRWLWDFTVTTLALTFLFQAREVRGAAPVDVLKALDFHNSPEGISKTTGFCTNRKNSKGSDTAYRVSKQAQLSAPTKQLFPGGTFPEDFSILFTVKPKKGIQSFLLSIYNEHGIQQIGVEVGRSPVFLFEDHTGKPAPEDYPLFRTVNIADGKWHRVAISVEKKTVTMIVDCKKKTTKPLDRSERAIVDTNGITVFGTRILDEEVFEGDIQQFLITGDPKAAYDYCEHYSPDCDSSAPKAAQAQEPQIDEYAPEDIIEYDYEYGEAEYKEAESVTEGPTVTEETIAQTEANIVDDFQEYNYGTMESYQTEAPRHVSGTNEPNPVEEIFTEEYLTGEDYDSQRKNSEDTLYENKEIDGRDSDLLVDGDLGEYDFYEYKEYEDKPTSPPNEEFGPGVPAETDITETSINGHGAYGEKGQKGEPAVVEPGMLVEGPPGPAGPAGIMGPPGLQGPTGPPGDPGDRGPPGRPGLPGADGLPGPPGTMLMLPFRYGGDGSKGPTISAQEAQAQAILQQARIALRGPPGPMGLTGRPGPVGGPGSSGAKGESGDPGPQGPRGVQGPPGPTGKPGKRGRPGADGGRGMPGEPGAKGDRGFDGLPGLPGDKGHRGERGPQGPPGPPGDDGMRGEDGEIGPRGLPGEAGPRGLLGPRGTPGAPGQPGMAGVDGPPGPKGNMGPQGEPGPPGQQGNPGPQGLPGPQGPIGPPGEKGPQGKPGLAGLPGADGPPGHPGKEGQSGEKGALGPPGPQGPIGYPGPRGVKGADGVRGLKGSKGEKGEDGFPGFKGDMGLKGDRGEVGQIGPRGEDGPEGPKGRAGPTGDPGPSGQAGEKGKLGVPGLPGYPGRQGPKGSTGFPGFPGANGEKGARGVAGKPGPRGQRGPTGPRGSRGARGPTGKPGPKGTSGGDGPPGPPGERGPQGPQGPVGFPGPKGPPGPPGKDGLPGHPGQRGETGFQGKTGPPGPGGVVGPQGPTGETGPIGERGYPGPPGPPGEQGLPGAAGKEGAKGDPGPQGISGKDGPAGLRGFPGERGLPGAQGAPGLKGGEGPQGPPGPVGSPGERGSAGTAGPIGLRGRPGPQGPPGPAGEKGAPGEKGPQGPAGRDGVQGPVGLPGPAGPAGSPGEDGDKGEIGEPGQKGSKGGKGENGPPGPPGLQGPVGAPGIAGGDGEPGPRGQQGMFGQKGDEGARGFPGPPGPIGLQGLPGPPGEKGENGDVGPMGPPGPPGPRGPQGPNGADGPQGPPGSVGSVGGVGEKGEPGEAGNPGPPGEAGVGGPKGERGEKGEAGPPGAAGPPGAKGPPGDDGPKGNPGPVGFPGDPGPPGELGPAGQDGVGGDKGEDGDPGQPGPPGPSGEAGPPGPPGKRGPPGAAGAEGRQGEKGAKGEAGAEGPPGKTGPVGPQGPAGKPGPEGLRGIPGPVGEQGLPGAAGQDGPPGPMGPPGLPGLKGDPGSKGEKGHPGLIGLIGPPGEQGEKGDRGLPGTQGSPGAKGDGGIPGPAGPLGPPGPPGLPGPQGPKGNKGSTGPAGQKGDSGLPGPPGPPGPPGEVIQPLPILSSKKTRRHTEGMQADADDNILDYSDGMEEIFGSLNSLKQDIEHMKFPMGTQTNPARTCKDLQLSHPDFPDGEYWIDPNQGCSGDSFKVYCNFTSGGETCIYPDKKSEGVRISSWPKEKPGSWFSEFKRGKLLSYLDVEGNSINMVQMTFLKLLTASARQNFTYHCHQSAAWYDVSSGSYDKALRFLGSNDEEMSYDNNPFIKTLYDGCTSRKGYEKTVIEINTPKIDQVPIVDVMISDFGDQNQKFGFEVGPVCFLG

SEQ ID NO: 634 - protein, 1806 aa, Homo sapiens
MEPWSSRWKTKRWLWDFTVTTLALTFLFQAREVRGAAPVDVLKALDFHNSPEGISKTTGFCTNRKNSKGSDTAYRVSKQAQLSAPTKQLFPGGTFPEDFSILFTVKPKKGIQSFLLSIYNEHGIQQIGVEVGRSPVFLFEDHTGKPAPEDYPLFRTVNIADGKWHRVAISVEKKTVTMIVDCKKKTTKPLDRSERAIVDTNGITVFGTRILDEEVFEGDIQQFLITGDPKAAYDYCEHYSPDCDSSAPKAAQAQEPQIDEYAPEDIIEYDYEYGEAEYKEAESVTEGPTVTEETIAQTEANIVDDFQEYNYGTMESYQTEAPRHVSGTNEPNPVEEIFTEEYLTGEDYDSQRKNSEDTLYENKEIDGRDSDLLVDGDLGEYDFYEYKEYEDKPTSPPNEEFGPGVPAETDITETSINGHGAYGEKGQKGEPAVVEPGMLVEGPPGPAGPAGIMGPPGLQGPTGPPGDPGDRGPPGRPGLPGADGLPGPPGTMLMLPFRYGGDGSKGPTISAQEAQAQAILQQARIALRGPPGPMGLTGRPGPVGGPGSSGAKGESGDPGPQGPRGVQGPPGPTGKPGKRGRPGADGGRGMPGEPGAKGDRGFDGLPGLPGDKGHRGERGPQGPPGPPGDDGMRGEDGEIGPRGLPGEAGPRGLLGPRGTPGAPGQPGMAGVDGPPGPKGNMGPQGEPGPPGQQGNPGPQGLPGPQGPIGPPGEKGPQGKPGLAGLPGADGPPGHPGKEGQSGEKGALGPPGPQGPIGYPGPRGVKGADGVRGLKGSKGEKGEDGFPGFKGDMGLKGDRGEVGQIGPRGEDGPEGPKGRAGPTGDPGPSGQAGEKGKLGVPGLPGYPGRQGPKGSTGFPGFPGANGEKGARGVAGKPGPRGQRGPTGPRGSRGARGPTGKPGPKGTSGGDGPPGPPGERGPQGPQGPVGFPGPKGPPGPPGKDGLPGHPGQRGETGFQGKTGPPGPGGVVGPQGPTGETGPIGERGHPGPPGPPGEQGLPGAAGKEGAKGDPGPQGISGKDGPAGLRGFPGERGLPGAQGAPGLKGGEGPQGPPGPVGSPGERGSAGTAGPIGLRGRPGPQGPPGPAGEKGAPGEKGPQGPAGRDGVQGPVGLPGPAGPAGSPGEDGDKGEIGEPGQKGSKGGKGENGPPGPPGLQGPVGAPGIAGGDGEPGPRGQQGMFGQKGDEGARGFPGPPGPIGLQGLPGPPGEKGENGDVGPMGPPGPPGPRGPQGPNGADGPQGPPGSVGSVGGVGEKGEPGEAGNPGPPGEAGVGGPKGERGEKGEAGPPGAAGPPGAKGPPGDDGPKGNPGPVGFPGDPGPPGELGPAGQDGVGGDKGEDGDPGQPGPPGPSGEAGPPGPPGKRGPPGAAGAEGRQGEKGAKGEAGAEGPPGKTGPVGPQGPAGKPGPEGLRGIPGPVGEQGLPGAAGQDGPPGPMGPPGLPGLKGDPGSKGEKGHPGLIGLIGPPGEQGEKGDRGLPGTQGSPGAKGDGGIPGPAGPLGPPGPPGLPGPQGPKGNKGSTGPAGQKGDSGLPGPPGPPGPPGEVIQPLPILSSKKTRRHTEGMQADADDNILDYSDGMEEIFGSLNSLKQDIEHMKFPMGTQTNPARTCKDLQLSHPDFPDGEYWIDPNQGCSGDSFKVYCNFTSGGETCIYPDKKSEGVRISSWPKEKPGSWFSEFKRGKLLSYLDVEGNSINMVQMTFLKLLTASARQNFTYHCHQSAAWYDVSSGSYDKALRFLGSNDEEMSYDNNPFIKTLYDGCTSRKGYEKTVIEINTPKIDQVPIVDVMISDFGDQNQKFGFEVGPVCFLG

SEQ ID NO: 635 - protein, 95 aa, Homo sapiens
MTELETAMGMIIDVFSRYSGSEGSTQTLTKGELKVLMEKELPGFLQSGKDKDAVDKLLKDLDANGDAQVDFSEFIVFVAAITSACHKYFEKAGLK

SEQ ID NO: 636 - protein, 493 aa, Homo sapiens
MALFGALFLALLAGAHAEFPGCKIRVTSKALELVKQEGLRFLEQELETITIPDLRGKEGHFYYNISEVKVTELQLTSSELDFQPQQELMLQITNASLGLRFRRQLLYWFFYDGGYINASAEGVSIRTGLELSRDPAGRMKVSNVSCQASVSRMHAAFGGTFKKVYDFLSTFITSGMRFLLNQQICPVLYHAGTVLLNSLLDTVPVRSSVDELVGIDYSLMKDPVASTSNLDMDFRGAFFPLTERNWSLPNRAVEPQLQEEERMVYVAFSEFFFDSAMESYFRAGALQLLLVGDKVPHDLDMLLRATYFGSIVLLSPAVIDSPLKLELRVLAPPRCTIKPSGTTISVTASVTIALVPPDQPEVQLSSMTMDARLSAKMALRGKALRTQLDLRRFRIYSNHSALESLALIPLQAPLKTMLQIGVMPMLNERTWRGVQIPLPEGINFVHEVVTNHAGFLTIGADLHFAKGLREVIEKNRPADVRASTAPTPSTAAV

SEQ ID NO: 637 - protein, 356 aa, Homo sapiens; identical to SEQ ID NO: 588

SEQ ID NO: 638 - protein, 356 aa, Homo sapiens [sequence omitted]

SEQ ID NO: 639 - protein, 342 aa, Homo sapiens [sequence omitted]

SEQ ID NO: 640 - protein, 181 aa, Homo sapiens
MDPYKASYGVEDPEYAVTQLAQTTMRSELGKLSLDKVFRERESLNASIVDAINQAADCWGIRCLRYEIKDIHVPPRVKESMQMQVEAERRKRATVLESEGTRESAINVAEGKKQAQILASEAEKAEQINQAAGEASAVLAKAKAKAEAIRILAAALTQHVRGPWVGMGTGIDSGRGSLIYA

SEQ ID NO: 641 - protein, 286 aa, Homo sapiens
MRLLPRLLLLLLLVFPATVLFRGGPRGLLAVAQDLTEDEETVEDSIIEDEDDEAEVEEDEPTDLVEDKEEEDVSGEPEASPSADTTILFVKGEDFPANNIVKFLVGFTNKGTEDFIVESLDASFRYPQDYQFYIQNFTALPLNTVVPPQRQATFEYSFIPAEPMGGRPFGLVINLNYKDLNGNVFQDAVFNQTVTVIEREDGLDGETIFMYMFLAGLGLLVIVGLHQLLESRKRKRPIQKVEMGTSSQNDVDMSWIPQETLNQINKASPRRLPRKRAQKRSVGSDE

SEQ ID NO: 642 - DNA, 20 bp, Artificial
  Synthetic oligonucleotide
ctggcaagcagctggaagat

SEQ ID NO: 643 - DNA, 2519 bp, Homo sapiens
taccttggctatccccctctgagttcttgccttgattctcctgttactgtcccgcgaacccacatccctacaaagcaggaaagtatgcttgggagaggccaagtgagtggggaatcagcccaaagccaggcgtccagggtctccctcacctgaagctgactttttccccaccttggacagagggcgggagatgccatccccactgaacccagtgctttcaccagccatattagctcccactcaccccccgtcgtggaagcctcggccgtcacacctgcagggccggggcgtgcatggcctcagggatggcctgttcagctgctgggtgactcgggtccaggtgcctcaccacctgctgagctctgtgtgatttctggacacttctgctcgttgcctttgggctcagtgaagagtctggagtttatctggagtgaggtggccggttcttggtgggatctgagcagagtccattcaggagcaggaaagttcatctcagaccctaaatccagccacgtcatgccacgcttaacacctctaacaacttcccctggcacttaggacagcgtctggctccttccctcggctcatggccctcagaatctgcgtcacatacaccccagctctcccgataggtctctgcactcgctgttgcctctgcctggaacagtctccctcctggtgtcattgtctccgtggtgtgtccttcctgaccttccacctccaccaggtgccgacacttccctgaccccagtaacctcttctcttgggtgggtgaatgccacctgctgatgtctgatttattcatcggttttcttgtctgtagtctgtcccccttggggacagggactcgttgctcatgttcacccggcaggctggacacttcgtggagggctccaaagccggcagatcccggggccgcctctgtctctcccaggccctgcgtgttgcggtgagaggagcatttgtgtctctgtggtttgctgctggagctggtgaccgggagagaaacaagggagacaagggtgcccagacaggtgcggggctcagccaggaggcagaagacgtggacgtgtcccgggccaggagggtcacagatgcaccacaaggcactctgtgtggcactgggaacaggaattctgggagtcagtctgcaagggtggtgggcgttgctcacctgggagaagcctttagagtgggcgttgagcaggccattagctcgtgccctgaggaggtgcatgggcggcatgggctctccatggaaattatgtgggcgcgaatggatgtggctctgcgctcacctgggcgaggacttctggccggtgccggggcactctgcatgaccctggcagaatcgagctgccctgactatgaaaggggaagaagagcatgcctgaccctccaccggcaccccacccctcactgctccacctggggcctgcctctgcgggtggctgggtcctggctgactgttgtgactgttgaggccctgggggggtggcgcatgggagttaggaggactggccaggtggggcccactatgcacccacccccagtgtcaggtgcttctcctctcctcctccaccacctcctcctcctcctcctcatcatcatcctcacttgttgaggacgtcctgtgtgccaagtggtttatatgcccagcctcatttaatcctcagaatgactccatgaggtagctactaaaaccccccacttaacagatgaggaaactgaggcctagagaagctcaacaagttgcctaagttccaagtttcctctcccaactctcctaccctctcctcttccttctcctttctcccattcttccctgcctcttccctaactagacaattttttattgagtgtctcccaggtgcaggcatgagccaggtgctgggaaaatcatgataacccagctccttctggtcattttctcagctggttagaggctgggaggacacgcaagttcagctccagccgactggggcattggtggtagcccctggagacattgtgcaatggggctacgaggctgcatctggctccagggaagcgtgttgcaatccatgagtgatgtctgccatgcgtacaggcatggagagtgaggcgcctgtactgtctttctgtagaccctagactggtggggcctctgaaatgcatccagacactgtgctgggtgtgttgcatggccctcccaaccaattcagtatttttctccccattttccagggagaaatctaaggcgtcagaatgtaaggttcttattggaacccaggctccagggtccctggttttctgtgacatcatgctgcaggaccctgtttctctctttgctttggctgctggggagctcagaagggagctttaggcttgctctcagtcaccacattagctcaggggtttgggcatttttgtcgccgtctcctttgggctctgtctcctccctgctgtgcttcctgaggagcaggccggatgtaagttatcaactataaataaaaccaagacttccgttctggctctca

SEQ ID NO: 644 - DNA, 2423 bp, Homo sapiens
taccttggctatccccctctgagttcttgccttgattctcctgttactgtcccgcgaacccacatccctacaaagcaggaaagtatgcttgggagaggccaagtgagtggggaatcagcccaaagccaggcgtccagggtctccctcacctgaagctgactttttccccaccttggacagagggcgggagatgccatccccactgaacccagtgctttcaccagccatattagctcccactcaccccccgtcgtggaagcctcggccgtcacacctgcagggccggggcgtgcatggcctcagggatggcctgttcagctgctgggtgactcgggtccaggtgcctcaccacctgctgagctctgtgtgatttctggacacttctgctcgttgcctttgggctcagtgaagagtctggagtttatctggagtgaggtggccggttcttggtgggatctgagcagagtccattcaggagcaggaaagttcatctcagaccctaaatccagccacgtcatgccacgcttaacacctctaacaacttcccctggcacttaggacagcgtctggctccttccctcggctcatggccctcagaatctgcgtcacatacaccccagctctcccgataggtctctgcactcgctgttgcctctgcctggaacagtctccctcctggtgtcattgtctccgtggtgtgtccttcctgaccttccacctccaccagtctgtcccccttggggacagggactcgttgctcatgttcacccggcaggctggacacttcgtggagggctccaaagccggcagatcccggggccgcctctgtctctcccaggccctgcgtgttgcggtgagaggagcatttgtgtctctgtggtttgctgctggagctggtgaccgggagagaaacaagggagacaagggtgcccagacaggtgcggggctcagccaggaggcagaagacgtggacgtgtcccgggccaggagggtcacagatgcaccacaaggcactctgtgtggcactgggaacaggaattctgggagtcagtctgcaagggtggtgggcgttgctcacctgggagaagcctttagagtgggcgttgagcaggccattagctcgtgccctgaggaggtgcatgggcggcatgggctctccatggaaattatgtgggcgcgaatggatgtggctctgcgctcacctgggcgaggacttctggccggtgccggggcactctgcatgaccctggcagaatcgagctgccctgactatgaaaggggaagaagagcatgcctgaccctccaccggcaccccacccctcactgctccacctggggcctgcctctgcgggtggctgggtcctggctgactgttgtgactgttgaggccctgggggggtggcgcatgggagttaggaggactggccaggtggggcccactatgcacccacccccagtgtcaggtgcttctcctctcctcctccaccacctcctcctcctcctcctcatcatcatcctcacttgttgaggacgtcctgtgtgccaagtggtttatatgcccagcctcatttaatcctcagaatgactccatgaggtagctactaaaaccccccacttaacagatgaggaaactgaggcctagagaagctcaacaagttgcctaagttccaagtttcctctcccaactctcctaccctctcctcttccttctcctttctcccattcttccctgcctcttccctaactagacaattttttattgagtgtctcccaggtgcaggcatgagccaggtgctgggaaaatcatgataacccagctccttctggtcattttctcagctggttagaggctgggaggacacgcaagttcagctccagccgactggggcattggtggtagcccctggagacattgtgcaatggggctacgaggctgcatctggctccagggaagcgtgttgcaatccatgagtgatgtctgccatgcgtacaggcatggagagtgaggcgcctgtactgtctttctgtagaccctagactggtggggcctctgaaatgcatccagacactgtgctgggtgtgttgcatggccctcccaaccaattcagtatttttctccccattttccagggagaaatctaaggcgtcagaatgtaaggttcttattggaacccaggctccagggtccctggttttctgtgacatcatgctgcaggaccctgtttctctctttgctttggctgctggggagctcagaagggagctttaggcttgctctcagtcaccacattagctcaggggtttgggcatttttgtcgccgtctcctttgggctctgtctcctccctgctgtgcttcctgaggagcaggccggatgtaagttatcaactataaataaaaccaagacttccgttctggctctca

SEQ ID NO: 645 - DNA, 2329 bp, Homo sapiens
taccttggctatccccctctgagttcttgccttgattctcctgttactgtcccgcgaacccacatccctacaaagcaggaaagtatgcttgggagaggccaagtgagtggggaatcagcccaaagccaggcgtccagggtctccctcacctgaagctgactttttccccaccttggacagagggcgggagatgccatccccactgaacccagtgctttcaccagccatattagctcccactcaccccccgtcgtggaagcctcggccgtcacacctgcagggccggggcgtgcatggcctcagggatggcctgttcagctgctgggtgactcgggtccaggtgcctcaccacctgctgagctctgtgtgatttctggacacttctgctcgttgcctttgggctcagtgaagagtctggagtttatctggagtgaggtggccggttcttggtgggatctgagcaggacagcgtctggctccttccctcggctcatggccctcagaatctgcgtcacatacaccccagctctcccgataggtctctgcactcgctgttgcctctgcctggaacagtctccctcctggtgtcattgtctccgtggtgtgtccttcctgaccttccacctccaccagtctgtcccccttggggacagggactcgttgctcatgttcacccggcaggctggacacttcgtggagggctccaaagccggcagatcccggggccgcctctgtctctcccaggccctgcgtgttgcggtgagaggagcatttgtgtctctgtggtttgctgctggagctggtgaccgggagagaaacaagggagacaagggtgcccagacaggtgcggggctcagccaggaggcagaagacgtggacgtgtcccgggccaggagggtcacagatgcaccacaaggcactctgtgtggcactgggaacaggaattctgggagtcagtctgcaagggtggtgggcgttgctcacctgggagaagcctttagagtgggcgttgagcaggccattagctcgtgccctgaggaggtgcatgggcggcatgggctctccatggaaattatgtgggcgcgaatggatgtggctctgcgctcacctgggcgaggacttctggccggtgccggggcactctgcatgaccctggcagaatcgagctgccctgactatgaaaggggaagaagagcatgcctgaccctccaccggcaccccacccctcactgctccacctggggcctgcctctgcgggtggctgggtcctggctgactgttgtgactgttgaggccctgggggggtggcgcatgggagttaggaggactggccaggtggggcccactatgcacccacccccagtgtcaggtgcttctcctctcctcctccaccacctcctcctcctcctcctcatcatcatcctcacttgttgaggacgtcctgtgtgccaagtggtttatatgcccagcctcatttaatcctcagaatgactccatgaggtagctactaaaaccccccacttaacagatgaggaaactgaggcctagagaagctcaacaagttgcctaagttccaagtttcctctcccaactctcctaccctctcctcttccttctcctttctcccattcttccctgcctcttccctaactagacaattttttattgagtgtctcccaggtgcaggcatgagccaggtgctgggaaaatcatgataacccagctccttctggtcattttctcagctggttagaggctgggaggacacgcaagttcagctccagccgactggggcattggtggtagcccctggagacattgtgcaatggggctacgaggctgcatctggctccagggaagcgtgttgcaatccatgagtgatgtctgccatgcgtacaggcatggagagtgaggcgcctgtactgtctttctgtagaccctagactggtggggcctctgaaatgcatccagacactgtgctgggtgtgttgcatggccctcccaaccaattcagtatttttctccccattttccagggagaaatctaaggcgtcagaatgtaaggttcttattggaacccaggctccagggtccctggttttctgtgacatcatgctgcaggaccctgtttctctctttgctttggctgctggggagctcagaagggagctttaggcttgctctcagtcaccacattagctcaggggtttgggcatttttgtcgccgtctcctttgggctctgtctcctccctgctgtgcttcctgaggagcaggccggatgtaagttatcaactataaataaaaccaagacttccgttctggctctca

SEQ ID NO: 646 - DNA, 2351 bp, Homo sapiens
taccttggctatccccctctgagttcttgccttgattctcctgttactgtcccgcgaacccacatccctacaaagcaggaaagtatgcttgggagaggccaagtgagtggggaatcagcccaaagccaggcgtccagggtctccctcacctgaagctgactttttccccaccttggacagagggcgggagatgccatccccactgaacccagtgctttcaccagccatattagctcccactcaccccccgtcgtggaagcctcggccgtcacacctgcagggccggggcgtgcatggcctcagggatggcctgttcagctgctgggtgactcgggtccaggtgcctcaccacctgctgagctctgtgtgatttctggacacttctgctcgttgcctttgggctcagtgaagagtctggagtttatctggagtgaggtggccggttcttggtgggatctgagcaggtctctgcactcgctgttgcctctgcctggaacagtctccctcctggtgtcattgtctccgtggtgtgtccttcctgaccttccacctccaccaggtgccgacacttccctgaccccagtaacctcttctcttgggtgggtgaatgccacctgctgatgtctgatttattcatcggttttcttgtctgtagtctgtcccccttggggacagggactcgttgctcatgttcacccggcaggctggacacttcgtggagggctccaaagccggcagatcccggggccgcctctgtctctcccaggccctgcgtgttgcggtgagaggagcatttgtgtctctgtggtttgctgctggagctggtgaccgggagagaaacaagggagacaagggtgcccagacaggtgcggggctcagccaggaggcagaagacgtggacgtgtcccgggccaggagggtcacagatgcaccacaaggcactctgtgtggcactgggaacaggaattctgggagtcagtctgcaagggtggtgggcgttgctcacctgggagaagcctttagagtgggcgttgagcaggccattagctcgtgccctgaggaggtgcatgggcggcatgggctctccatggaaattatgtgggcgcgaatggatgtggctctgcgctcacctgggcgaggacttctggccggtgccggggcactctgcatgaccctggcagaatcgagctgccctgactatgaaaggggaagaagagcatgcctgaccctccaccggcaccccacccctcactgctccacctggggcctgcctctgcgggtggctgggtcctggctgactgttgtgactgttgaggccctgggggggtggcgcatgggagttaggaggactggccaggtggggcccactatgcacccacccccagtgtcaggtgcttctcctctcctcctccaccacctcctcctcctcctcctcatcatcatcctcacttgttgaggacgtcctgtgtgccaagtggtttatatgcccagcctcatttaatcctcagaatgactccatgaggtagctactaaaaccccccacttaacagatgaggaaactgaggcctagagaagctcaacaagttgcctaagttccaagtttcctctcccaactctcctaccctctcctcttccttctcctttctcccattcttccctgcctcttccctaactagacaattttttattgagtgtctcccaggtgcaggcatgagccaggtgctgggaaaatcatgataacccagctccttctggtcattttctcagctggttagaggctgggaggacacgcaagttcagctccagccgactggggcattggtggtagcccctggagacattgtgcaatggggctacgaggctgcatctggctccagggaagcgtgttgcaatccatgagtgatgtctgccatgcgtacaggcatggagagtgaggcgcctgtactgtctttctgtagaccctagactggtggggcctctgaaatgcatccagacactgtgctgggtgtgttgcatggccctcccaaccaattcagtatttttctccccattttccagggagaaatctaaggcgtcagaatgtaaggttcttattggaacccaggctccagggtccctggttttctgtgacatcatgctgcaggaccctgtttctctctttgctttggctgctggggagctcagaagggagctttaggcttgctctcagtcaccacattagctcaggggtttgggcatttttgtcgccgtctcctttgggctctgtctcctccctgctgtgcttcctgaggagcaggccggatgtaagttatcaactataaataaaaccaagacttccgttctggctctca

SEQ ID NO: 647 - DNA, 3175 bp, Homo sapiens
taccttggctatccccctctgagttcttgccttgattctcctgttactgtcccgcgaacccacatccctacaaagcaggaaagtatgcttgggagaggccaagtgagtggggaatcagcccaaagccaggcgtccagggtctccctcacctgaagctgactttttccccaccttggacagagggcgggagatgccatccccactgaacccagtgctttcaccagccatattagctcccactcaccccccgtcgtggaagcctcggccgtcacacctgcagggccggggcgtgcatggcctcagggatggcctgttcagctgctgggtgactcgggtccaggtgcctcaccacctgctgagctctgtgtgatttctggacacttctgctcgttgcctttgggctcagtgaagagtctggagtttatctggagtgaggtggccggttcttggtgggatctgagcaggtaagaagcagggtctttcttatgttttaaggaaagccctgtggctgctgggtgggggaccagctggaggggcaggagggcagcaggtgactcattacaaggctggggccatcatcctgtgagagctgggcatgaccagtgcaggtcagtggggttgagggtacagaccagtgggacccacagacggctcgggagtgaccaagcctctgctgagctgcccaggtcccctctggtggacacctcctacccggagccccccaaggtggtgccaaagctagaccaccatacagccagaggcctccaggccctacccacgacagcccagctggcttctgcccagccaccgtcacacacagagggcagccgtccccatggtccctagaggcggttgaggaccactgtgcctggagtcatctgtggctataaaccaggaggagaaggctgcccaccccctgccccagagatggggaggctggggccacccggtggatttgggcaggtcccagcttccaggatcatgaggtgaaaacgtgaagggaccctagaggccatggggacccaggcacagagcggcggcctctcatcctccccatggtcaaggaggtcagtgccttcccggggtggattacggatggtagtatcttccttctcctcagagtccattcaggagcaggaaagttcatctcagaccctaaatccagccacgtcatgccacgcttaacacctctaacaacttcccctggcacttaggacagcgtctggctccttccctcggctcatggccctcagaatctgcgtcacatacaccccagctctcccgataggtctctgcactcgctgttgcctctgcctggaacagtctccctcctggtgtcattgtctccgtggtgtgtccttcctgaccttccacctccaccaggtgccgacacttccctgaccccagtaacctcttctcttgggtgggtgaatgccacctgctgatgtctgatttattcatcggttttcttgtctgtagtctgtcccccttggggacagggactcgttgctcatgttcacccggcaggctggacacttcgtggagggctccaaagccggcagatcccggggccgcctctgtctctcccaggccctgcgtgttgcggtgagaggagcatttgtgtctctgtggtttgctgctggagctggtgaccgggagagaaacaagggagacaagggtgcccagacaggtgcggggctcagccaggaggcagaagacgtggacgtgtcccgggccaggagggtcacagatgcaccacaaggcactctgtgtggcactgggaacaggaattctgggagtcagtctgcaagggtggtgggcgttgctcacctgggagaagcctttagagtgggcgttgagcaggccattagctcgtgccctgaggaggtgcatgggcggcatgggctctccatggaaattatgtgggcgcgaatggatgtggctctgcgctcacctgggcgaggacttctggccggtgccggggcactctgcatgaccctggcagaatcgagctgccctgactatgaaaggggaagaagagcatgcctgaccctccaccggcaccccacccctcactgctccacctggggcctgcctctgcgggtggctgggtcctggctgactgttgtgactgttgaggccctgggggggtggcgcatgggagttaggaggactggccaggtggggcccactatgcacccacccccagtgtcaggtgcttctcctctcctcctccaccacctcctcctcctcctcctcatcatcatcctcacttgttgaggacgtcctgtgtgccaagtggtttatatgcccagcctcatttaatcctcagaatgactccatgaggtagctactaaaaccccccacttaacagatgaggaaactgaggcctagagaagctcaacaagttgcctaagttccaagtttcctctcccaactctcctaccctctcctcttccttctcctttctcccattcttccctgcctcttccctaactagacaattttttattgagtgtctcccaggtgcaggcatgagccaggtgctgggaaaatcatgataacccagctccttctggtcattttctcagctggttagaggctgggaggacacgcaagttcagctccagccgactggggcattggtggtagcccctggagacattgtgcaatggggctacgaggctgcatctggctccagggaagcgtgttgcaatccatgagtgatgtctgccatgcgtacaggcatggagagtgaggcgcctgtactgtctttctgtagaccctagactggtggggcctctgaaatgcatccagacactgtgctgggtgtgttgcatggccctcccaaccaattcagtatttttctccccattttccagggagaaatctaaggcgtcagaatgtaaggttcttattggaacccaggctccagggtccctggttttctgtgacatcatgctgcaggaccctgtttctctctttgctttggctgctggggagctcagaagggagctttaggcttgctctcagtcaccacattagctcaggggtttgggcatttttgtcgccgtctcctttgggctctgtctcctccctgctgtgcttcctgaggagcaggccggatgtaagttatcaactataaataaaaccaagacttccgttctggctctca

SEQ ID NO: 648 - DNA, 2425 bp, Homo sapiens
taccttggctatccccctctgagttcttgccttgattctcctgttactgtcccgcgaacccacatccctacaaagcaggaaagtatgcttgggagaggccaagtgagtggggaatcagcccaaagccaggcgtccagggtctccctcacctgaagctgactttttccccaccttggacagagggcgggagatgccatccccactgaacccagtgctttcaccagccatattagctcccactcaccccccgtcgtggaagcctcggccgtcacacctgcagggccggggcgtgcatggcctcagggatggcctgttcagctgctgggtgactcgggtccaggtgcctcaccacctgctgagctctgtgtgatttctggacacttctgctcgttgcctttgggctcagtgaagagtctggagtttatctggagtgaggtggccggttcttggtgggatctgagcaggacagcgtctggctccttccctcggctcatggccctcagaatctgcgtcacatacaccccagctctcccgataggtctctgcactcgctgttgcctctgcctggaacagtctccctcctggtgtcattgtctccgtggtgtgtccttcctgaccttccacctccaccaggtgccgacacttccctgaccccagtaacctcttctcttgggtgggtgaatgccacctgctgatgtctgatttattcatcggttttcttgtctgtagtctgtcccccttggggacagggactcgttgctcatgttcacccggcaggctggacacttcgtggagggctccaaagccggcagatcccggggccgcctctgtctctcccaggccctgcgtgttgcggtgagaggagcatttgtgtctctgtggtttgctgctggagctggtgaccgggagagaaacaagggagacaagggtgcccagacaggtgcggggctcagccaggaggcagaagacgtggacgtgtcccgggccaggagggtcacagatgcaccacaaggcactctgtgtggcactgggaacaggaattctgggagtcagtctgcaagggtggtgggcgttgctcacctgggagaagcctttagagtgggcgttgagcaggccattagctcgtgccctgaggaggtgcatgggcggcatgggctctccatggaaattatgtgggcgcgaatggatgtggctctgcgctcacctgggcgaggacttctggccggtgccggggcactctgcatgaccctggcagaatcgagctgccctgactatgaaaggggaagaagagcatgcctgaccctccaccggcaccccacccctcactgctccacctggggcctgcctctgcgggtggctgggtcctggctgactgttgtgactgttgaggccctgggggggtggcgcatgggagttaggaggactggccaggtggggcccactatgcacccacccccagtgtcaggtgcttctcctctcctcctccaccacctcctcctcctcctcctcatcatcatcctcacttgttgaggacgtcctgtgtgccaagtggtttatatgcccagcctcatttaatcctcagaatgactccatgaggtagctactaaaaccccccacttaacagatgaggaaactgaggcctagagaagctcaacaagttgcctaagttccaagtttcctctcccaactctcctaccctctcctcttccttctcctttctcccattcttccctgcctcttccctaactagacaattttttattgagtgtctcccaggtgcaggcatgagccaggtgctgggaaaatcatgataacccagctccttctggtcattttctcagctggttagaggctgggaggacacgcaagttcagctccagccgactggggcattggtggtagcccctggagacattgtgcaatggggctacgaggctgcatctggctccagggaagcgtgttgcaatccatgagtgatgtctgccatgcgtacaggcatggagagtgaggcgcctgtactgtctttctgtagaccctagactggtggggcctctgaaatgcatccagacactgtgctgggtgtgttgcatggccctcccaaccaattcagtatttttctccccattttccagggagaaatctaaggcgtcagaatgtaaggttcttattggaacccaggctccagggtccctggttttctgtgacatcatgctgcaggaccctgtttctctctttgctttggctgctggggagctcagaagggagctttaggcttgctctcagtcaccacattagctcaggggtttgggcatttttgtcgccgtctcctttgggctctgtctcctccctgctgtgcttcctgaggagcaggccggatgtaagttatcaactataaataaaaccaagacttccgttctggctctca

SEQ ID NO: 649 - DNA, 2589 bp, Homo sapiens
taccttggctatccccctctgagttcttgccttgattctcctgttactgtcccgcgaacccacatccctacaaagcaggaaagtatgcttgggagaggccaagtgagtggggaatcagcccaaagccaggcgtccagggtctccctcacctgaagctgactttttccccaccttggacagagggcgggagatgccatccccactgaacccagtgctttcaccagccatattagctcccactcaccccccgtcgtggaagcctcggccgtcacacctgcagggccggggcgtgcatggcctcagggatggcctgttcagctgctgggtgactcgggtccaggtgcctcaccacctgctgagctctgtgtgatttctggacacttctgctcgttgcctttgggctcagtgaagagtctggagtttatctggagtgaggtggccggttcttggtgggatctgagcagagtccattcaggagcaggaaagttcatctcagaccctaaatccagccacgtcatgccacgcttaacacctctaacaacttcccctggcacttaggacagcgtctggctccttccctcggctcatggccctcagaatctgcgtcacatacaccccagctctcccgataggtctctgcactcgctgttgcctctgcctggaacagtctccctcctggtgtcattgtctccgtggtgtgtccttcctgaccttccacctccaccagtctgtcccccttggggacagggactcgttgctcatgttcacccggcaggctggacacttcgtggagggctccaaagccggcagatcccggggccgcctctgtctctcccaggccctgcgtgttgcggtgagaggagcatttgtgtctctgtggtttgctgctggagctggtgaccgggagagaaacaagggagacaagggtgcccagacaggtgcggggctcagccaggaggcagaagacgtggacgtgtcccgggccaggagggtcacagatgcaccacaaggcactctgtgtggcactgggaacaggaattctgggagtcagtctgcaagggtggtgggcgttgctcacctgggagaagcctttagagtgggcgttgagcaggccattagctcgtgccctgaggaggtgcatgggcggcatgggctctccatggaaattatgtgggcgcgaatggatgtggctctgcgctcacctgggcgaggacttctggccggtgccggggcactctgcatgaccctggcagaatcgagctgccctgactatgaaaggggaagaagagcatgcctgaccctccaccggcaccccacccctcactgctccacctggggcctgcctctgcgggtggctgggtcctggctgactgttgtgactgttgaggccctgggggggtggcgcatgggagttaggaggactggccaggtggggcccactatgcacccacccccagtgtcaggtgcttctcctctcctcctccaccacctcctcctcctcctcctcatcatcatcctcacttgttgaggacgtcctgtgtgccaagtggtttatatgcccagcctcatttaatcctcagaatgactccatgaggtagctactaaaaccccccacttaacagatgaggaaactgaggcctagagaagctcaacaagttgcctaagttccaagtttcctctcccaactctcctaccctctcctcttccttctcctttctcccattcttccctgcctcttccctaactagacaattttttattgagtgtctcccaggtgcaggcatgagccaggtgctgggaaaatcatgataacccagctccttctggtcattttctcagctggttagaggctgggaggacacgcaagttcagctccagccgactggggcattggtggtagcccctggagacattgtgcaatggggctacgaggctgcatctggctccagggaagcgtgttgcaatccatgagtgatgtctgccatgcgtacaggcatggagagtgaggcgcctgtactgtctttctgtagaccctagactggtggggcctctgaaatgcatccagacactgtgctgggtgtgttgcatggccctcccaaccaattcagtatttttctccccattttccagggagaaatctaaggcgtcagaatgtaaggttcttattggaacccaggctccagggtccctggttttctgtgacatcatgctgcaggaccctgtttctctctttgctttggctgctggggagctcagaagggagctttaggcttgctctcagtcaccacattagctcaggggtttgggcatttttgtcgccgtctcctttgggctctgtctcctccctgctgtgcttcctgaggagcaggccggatgtaagttatcaactataaataaaaccaagacttccgttctggctctcactctagtttcctggtgcattttttttttttaaagttcttaatcaagggaggggatactcctaactgaagatgacatcagcatcagctggccccggggggcaggcccccagcccccaggcccgtgtgggccctgaatgcccccattatgaggggtaacctcattaca

SEQ ID NO: 650 - DNA, 2259 bp, Homo sapiens
taccttggctatccccctctgagttcttgccttgattctcctgttactgtcccgcgaacccacatccctacaaagcaggaaagtatgcttgggagaggccaagtgagtggggaatcagcccaaagccaggcgtccagggtctccctcacctgaagctgactttttccccaccttggacagagggcgggagatgccatccccactgaacccagtgctttcaccagccatattagctcccactcaccccccgtcgtggaagcctcggccgtcacacctgcagggccggggcgtgcatggcctcagggatggcctgttcagctgctgggtgactcgggtccaggtgcctcaccacctgctgagctctgtgtgatttctggacacttctgctcgttgcctttgggctcagtgaagagtctggagtttatctggagtgaggtggccggttcttggtgggatctgagcagagtccattcaggagcaggaaagttcatctcagaccctaaatccagccacgtcatgccacgcttaacacctctaacaacttcccctggcacttaggacagcgtctggctccttccctcggctcatggccctcagaatctgcgtcacatacaccccagctctcccgataggtctctgcactcgctgttgcctctgcctggaacagtctccctcctggtgtcattgtctccgtggtgtgtccttcctgaccttccacctccaccaggtgccgacacttccctgaccccagtaacctcttctcttgggtgggtgaatgccacctgctgatgtctgatttattcatcggttttcttgtctgtagtctgtcccccttggggacagggactcgttgctcatgttcacccggcaggaattctgggagtcagtctgcaagggtggtgggcgttgctcacctgggagaagcctttagagtgggcgttgagcaggccattagctcgtgccctgaggaggtgcatgggcggcatgggctctccatggaaattatgtgggcgcgaatggatgtggctctgcgctcacctgggcgaggacttctggccggtgccggggcactctgcatgaccctggcagaatcgagctgccctgactatgaaaggggaagaagagcatgcctgaccctccaccggcaccccacccctcactgctccacctggggcctgcctctgcgggtggctgggtcctggctgactgttgtgactgttgaggccctgggggggtggcgcatgggagttaggaggactggccaggtggggcccactatgcacccacccccagtgtcaggtgcttctcctctcctcctccaccacctcctcctcctcctcctcatcatcatcctcacttgttgaggacgtcctgtgtgccaagtggtttatatgcccagcctcatttaatcctcagaatgactccatgaggtagctactaaaaccccccacttaacagatgaggaaactgaggcctagagaagctcaacaagttgcctaagttccaagtttcctctcccaactctcctaccctctcctcttccttctcctttctcccattcttccctgcctcttccctaactagacaattttttattgagtgtctcccaggtgcaggcatgagccaggtgctgggaaaatcatgataacccagctccttctggtcattttctcagctggttagaggctgggaggacacgcaagttcagctccagccgactggggcattggtggtagcccctggagacattgtgcaatggggctacgaggctgcatctggctccagggaagcgtgttgcaatccatgagtgatgtctgccatgcgtacaggcatggagagtgaggcgcctgtactgtctttctgtagaccctagactggtggggcctctgaaatgcatccagacactgtgctgggtgtgttgcatggccctcccaaccaattcagtatttttctccccattttccagggagaaatctaaggcgtcagaatgtaaggttcttattggaacccaggctccagggtccctggttttctgtgacatcatgctgcaggaccctgtttctctctttgctttggctgctggggagctcagaagggagctttaggcttgctctcagtcaccacattagctcaggggtttgggcatttttgtcgccgtctcctttgggctctgtctcctccctgctgtgcttcctgaggagcaggccggatgtaagttatcaactataaataaaaccaagacttccgttctggctctca

SEQ ID NO: 651 - DNA, 2112 bp, Homo sapiens
taccttggctatccccctctgagttcttgccttgattctcctgttactgtcccgcgaacccacatccctacaaagcaggaaagtatgcttgggagaggccaagtgagtggggaatcagcccaaagccaggcgtccagggtctccctcacctgaagctgactttttccccaccttggacagagggcgggagatgccatccccactgaacccagtgctttcaccagccatattagctcccactcaccccccgtcgtggaagcctcggccgtcacacctgcagggccggggcgtgcatggcctcagggatggcctgttcagctgctgggtgactcgggtccaggtgcctcaccacctgctgagctctgtgtgatttctggacacttctgctcgttgcctttgggctcagtgaagagtctggagtttatctggagtgaggtggccggttcttggtgggatctgagcaggctggacacttcgtggagggctccaaagccggcagatcccggggccgcctctgtctctcccaggccctgcgtgttgcggtgagaggagcatttgtgtctctgtggtttgctgctggagctggtgaccgggagagaaacaagggagacaagggtgcccagacaggtgcggggctcagccaggaggcagaagacgtggacgtgtcccgggccaggagggtcacagatgcaccacaaggcactctgtgtggcactgggaacaggaattctgggagtcagtctgcaagggtggtgggcgttgctcacctgggagaagcctttagagtgggcgttgagcaggccattagctcgtgccctgaggaggtgcatgggcggcatgggctctccatggaaattatgtgggcgcgaatggatgtggctctgcgctcacctgggcgaggacttctggccggtgccggggcactctgcatgaccctggcagaatcgagctgccctgactatgaaaggggaagaagagcatgcctgaccctccaccggcaccccacccctcactgctccacctggggcctgcctctgcgggtggctgggtcctggctgactgttgtgactgttgaggccctgggggggtggcgcatgggagttaggaggactggccaggtggggcccactatgcacccacccccagtgtcaggtgcttctcctctcctcctccaccacctcctcctcctcctcctcatcatcatcctcacttgttgaggacgtcctgtgtgccaagtggtttatatgcccagcctcatttaatcctcagaatgactccatgaggtagctactaaaaccccccacttaacagatgaggaaactgaggcctagagaagctcaacaagttgcctaagttccaagtttcctctcccaactctcctaccctctcctcttccttctcctttctcccattcttccctgcctcttccctaactagacaattttttattgagtgtctcccaggtgcaggcatgagccaggtgctgggaaaatcatgataacccagctccttctggtcattttctcagctggttagaggctgggaggacacgcaagttcagctccagccgactggggcattggtggtagcccctggagacattgtgcaatggggctacgaggctgcatctggctccagggaagcgtgttgcaatccatgagtgatgtctgccatgcgtacaggcatggagagtgaggcgcctgtactgtctttctgtagaccctagactggtggggcctctgaaatgcatccagacactgtgctgggtgtgttgcatggccctcccaaccaattcagtatttttctccccattttccagggagaaatctaaggcgtcagaatgtaaggttcttattggaacccaggctccagggtccctggttttctgtgacatcatgctgcaggaccctgtttctctctttgctttggctgctggggagctcagaagggagctttaggcttgctctcagtcaccacattagctcaggggtttgggcatttttgtcgccgtctcctttgggctctgtctcctccctgctgtgcttcctgaggagcaggccggatgtaagttatcaactataaataaaaccaagacttccgttctggctctca

SEQ ID NO: 652 - DNA, 2401 bp, Homo sapiens
taccttggctatccccctctgagttcttgccttgattctcctgttactgtcccgcgaacccacatccctacaaagcaggaaagtatgcttgggagaggccaagtgagtggggaatcagcccaaagccaggcgtccagggtctccctcacctgaagctgactttttccccaccttggacagagggcgggagatgccatccccactgaacccagtgctttcaccagccatattagctcccactcaccccccgtcgtggaagcctcggccgtcacacctgcagggccggggcgtgcatggcctcagggatggcctgttcagctgctgggtgactcgggtccaggtgcctcaccacctgctgagctctgtgtgatttctggacacttctgctcgttgcctttgggctcagtgaagagtctggagtttatctggagtgaggtggccggttcttggtgggatctgagcagagtccattcaggagcaggaaagttcatctcagaccctaaatccagccacgtcatgccacgcttaacacctctaacaacttcccctggcacttaggacagcgtctggctccttccctcggctcatggccctcagaatctgcgtcacatacaccccagctctcccgataggtctctgcactcgctgttgcctctgcctggaacagtctccctcctggtgtcattgtctccgtggtgtgtccttcctgaccttccacctccaccagtctgtcccccttggggacagggactcgttgctcatgttcacccggcaggctggacacttcgtggagggctccaaagccggcagatcccggggccgcctctgtctctcccaggccctgcgtgttgcggtgagaggagcatttgtgtctctgtggtttgctgctggagctggtgaccgggagagaaacaagggagacaagggtgcccagacaggtgcggggctcagccaggaggcagaagacgtggacgtgtcccgggccaggagggtcacagatgcaccacaaggcactctgtgtggcactgggaacaggaattctgggagtcagtctgcaagggtggtgggcgttgctcacctgggagaagcctttagagtgggcgttgagcaggccattagctcgtgccctgaggaggtgcatgggcggcatgggctctccatggaaattatgtgggcgcgaatggatgtggctctgcgctcacctgggcgaggacttctggccggtgccggggcactctgcatgaccctggcagaatcgagctgccctgactatgaaaggggaagaagagcatgcctgaccctccaccggcaccccacccctcactgctccacctggggcctgcctctgcgggtggctgggtcctggctgactgttgtgactgttgaggccctgggggggtggcgcatgggagttaggaggactggccaggtggggcccactatgcacccacccccagtgtcaggtgcttctcctctcctcctccaccacctcctcctcctcctcctcatcatcatcctcacttgttgaggacgtcctgtgtgccaagtggtttatatgcccagcctcatttaatcctcagaatgactccatgaggtagctactaaaaccccccacttaacagatgaggaaactgaggcctagagaagctcaacaagttgcctaagttccaagtttcctctcccaactctcctaccctctcctcttccttctcctttctcccattcttccctgcctcttccctaactagacaattttttattgagtgtctcccaggtgcaggcatgagccaggtgctgggaaaatcatgataacccagctccttctggtcattttctcagctggttagaggctgggaggacacgcaagttcagctccagccgactggggcattggtggtagcccctggagacattgtgcaatggggctacgaggctgcatctggctccagggaagcgtgttgcaatccatgagtgatgtctgccatgcgtacaggcatggagagtgaggcgcctgtactgtctttctgtagaccctagactggtggggcctctgaaatgcatccagacactgtgctgggtgtgttgcatggccctcccaaccaattcagtatttttctccccattttccagggagaaatctaaggcgtcagaatgtaaggttcttattggaacccaggctccagggtccctggttttctgtgacatcatgctgcaggaccctgtttctctctttgctttggctgctggggagctcagaagggagctttaggcttgctctcagtcaccacattagtcgccgtctcctttgggctctgtctcctccctgctgtgcttcctgaggagcaggccggatgtaagttatcaactataaataaaaccaagacttccgttctggctctca

SEQ ID NO: 653 - DNA, 633 bp, Homo sapiens
taccttggctatccccctctgagttcttgccttgattctcctgttactgtcccgcgaacccacatccctacaaagcaggaaagtatgcttgggagaggccaagtgagtggggaatcagcccaaagccaggcgtccagggtctccctcacctgaagctgactttttccccaccttggacagagggcgggagatgccatccccactgaacccagtgctttcaccagccatattagctcccactcaccccccgtcgtggaagcctcggccgtcacacctgcagggccggggcgtgcatggcctcagggatggcctgttcagctgctgggtgactcgggtccaggtgcctcaccacctgctgagctctgtgtgatttctggacacttctgctcgttgcctttgggctcagtgaagagtctggagtttatctggagtgaggtggccggttcttggtgggatctgagcaggtggaggcaatgcccagagctgtggcagccaccttgcagccgtgaagcaccagtgggaatgacagtcaagagaaccacggagatgccagcccctggacccacagcagcagcacctgcttccagactcagagtgtgagaaaaaaataaactcctatttgtttatggcaag

SEQ ID NO: 654 - DNA, 1491 bp, Homo sapiens
taccttggctatccccctctgagttcttgccttgattctcctgttactgtcccgcgaacccacatccctacaaagcaggaaagtatgcttgggagaggccaagtgagtggggaatcagcccaaagccaggcgtccagggtctccctcacctgaagctgactttttccccaccttggacagagggcgggagatgccatccccactgaacccagtgctttcaccagccatattagctcccactcaccccccgtcgtggaagcctcggccgtcacacctgcagggccggggcgtgcatggcctcagggatggcctgttcagctgctgggtgactcgggtccaggtgcctcaccacctgctgagctctgtgtgatttctggacacttctgctcgttgcctttgggctcagtgaagagtctggagtttatctggagtgaggtggccggttcttggtgggatctgagcaggtggaggcaatgcccagagctgtggcagccaccttgcagccgtgaagcaccagtgggaatgacagtcaagagaaccacggagatgccagcccctggacccacagcagcagcacctgcttccagactcagagtgtgagaaaaaaataaactcctatttgtttatggcaagagacaaggtctagctctgtgatgcaggccggaggacagtggtgtgatcacagctcactgcagccttgaactcctgggttccagcaatcctcccacctcagcctccttagtaggcgtggctacagtaatggaagacagcaaaagaagtttggagattcctggtttaaagcatttaaagcctctgtgaaaatttgcccaggccaacaacttcactttccacactcagtgccacgaagtgcagctctaagctggggatttctgtgcagagatgatccactgagtgcaacccaccaccgtgcggacaccacccctgcagaatcatctgtgaaaacaaccccaggcccagacataggggccagctaagcttcgtagccctcgaaatacagggagtgccccctctggaccctcgagcccacagtccatccaccacagaggtgtctgctgctcatcagatagttcctaccaagaaaatgctgtgtgaacccatctgtgtggcaaaccggcacggggagaaagctgacttccaaggacgtctaccaactgtcacttgcaaaccagaacttgcctctttgtagatgaagactggcagggctgaagaaatgatctcatgttgaaattaatgatgagcttcagggtgaggtgactcagttcgaatgctgttgaatgttggtgtcatgggacttttacaagaagtaaaactgggctataaaaatgatccccttcccctcactagagaagggaggttctattcctctctctgtctttccctctctctatatataccaaaggtcaaatctttggtattttgcattgagtctttaattattcattcactttgacctagtaattgcacttcaga

SEQ ID NO: 655 - DNA, 2206 bp, Homo sapiens
ccccatgttaacggcccccagtgtggactgtcagctccatgaaggcagggccctacttatctcgttcacagcacaaggccgggcacacagtaggtgctcactcaacattcctgggatcaatgggaaatgactgtcggggaaccctctgcagccgtccttgtcgagggccccagatggggtgtgggtggcccctccccatccagatggtgttggaggggctgggggccaggcatggcgagcaggccgaggctgcaggtggacatccctgggactggagctgctgggggccaggctgcagttccagcccaggtcaggtctcatgtgaggcctccgtgaaacaagaatttctctctccgtttccttctcctgtctgactcacactttcgttttgaagttccccctttctgccagtgctttgcctgaggttacggagtggtcaagcgaggccagcagggcgtggagaccaggaggaagctgggctgcagtttcattcacaaaaacacgacccgcccgcttcctgtgtcctgcctgggctgcccggcccgcagccctacagccagttcacagggtgtttgcaagtttgcaggggccagtgagggtgctcctggggtttaagaggcttgagtttgtccaccccacggcctctgtcaggacccccccttcccgccactatgcttctgtctcccacggtgcctcccagctcacccccacaggggcctggcgcagagcctcaaactcaggattctataggagctgagggttgggtctgagcaccttggcgcttcccctggccccactgacccatccttgtttcagcacagagctgggaggcccagggaggatggcctctgctgactggtccagctccctctgtggttcccacctctcagtgtggggtggatccaagggggagggaagagaaggggatgggaagaaaacgatgcctgttggggcacaggctcctaaacccaacctcgtatcgcctcctgcgagtagcttccaggtgtccacagggagcccggggtcatgctggcatcattcattctccacgcatcagatgatcctgtggcccctcagtgccaggccccactggccctctgcgcacatcagtgactctgatgttctcccccaccgcatgctgccaatctgatggtggagacagaacagcagtcccggatggtggaggcaatgcccagagctgtggcagccaccttgcagccgtgaagcaccagtgggaatgacagtcaagagaaccacggagatgccagcccctggacccacagcagcagcacctgcttccagactcagagtgtgagaaaaaaataaactcctatttgtttatggcaagagacaaggtctagctctgtgatgcaggccggaggacagtggtgtgatcacagctcactgcagccttgaactcctgggttccagcaatcctcccacctcagcctccttagtaggcgtggctacagtaatggaagacagcaaaagaagtttggagattcctggtttaaagcatttaaagcctctgtgaaaatttgcccaggccaacaacttcactttccacactcagtgccacgaagtgcagctctaagctggggatttctgtgcagagatgatccactgagtgcaacccaccaccgtgcggacaccacccctgcagaatcatctgtgaaaacaaccccaggcccagacataggggccagctaagcttcgtagccctcgaaatacagggagtgccccctctggaccctcgagcccacagtccatccaccacagaggtgtctgctgctcatcagatagttcctaccaagaaaatgctgtgtgaacccatctgtgtggcaaaccggcacggggagaaagctgacttccaaggacgtctaccaactgtcacttgcaaaccagaacttgcctctttgtagatgaagactggcagggctgaagaaatgatctcatgttgaaattaatgatgagcttcagggtgaggtgactcagttcgaatgctgttgaatgttggtgtcatgggacttttacaagaagtaaaactgggctataaaaatgatccccttcccctcactagagaagggaggttctattcctctctctgtctttccctctctctatatataccaaaggtcaaatctttggtattttgcattgagtctttaattattcattcactttgacctagtaattgcacttcaga

SEQ ID NO: 656 - DNA, 1104 bp, Homo sapiens
tgactgcatgaggctgtacgtatctgcagcctgccccttttcatggtgtttatccactcacacagtgatgagcagtggtggaggcaatgcccagagctgtggcagccaccttgcagccgtgaagcaccagtgggaatgacagtcaagagaaccacggagatgccagcccctggacccacagcagcagcacctgcttccagactcagagtgtgagaaaaaaataaactcctatttgtttatggcaagagacaaggtctagctctgtgatgcaggccggaggacagtggtgtgatcacagctcactgcagccttgaactcctgggttccagcaatcctcccacctcagcctccttagtaggcgtggctacagtaatggaagacagcaaaagaagtttggagattcctggtttaaagcatttaaagcctctgtgaaaatttgcccaggccaacaacttcactttccacactcagtgccacgaagtgcagctctaagctggggatttctgtgcagagatgatccactgagtgcaacccaccaccgtgcggacaccacccctgcagaatcatctgtgaaaacaaccccaggcccagacataggggccagctaagcttcgtagccctcgaaatacagggagtgccccctctggaccctcgagcccacagtccatccaccacagaggtgtctgctgctcatcagatagttcctaccaagaaaatgctgtgtgaacccatctgtgtggcaaaccggcacggggagaaagctgacttccaaggacgtctaccaactgtcacttgcaaaccagaacttgcctctttgtagatgaagactggcagggctgaagaaatgatctcatgttgaaattaatgatgagcttcagggtgaggtgactcagttcgaatgctgttgaatgttggtgtcatgggacttttacaagaagtaaaactgggctataaaaatgatccccttcccctcactagagaagggaggttctattcctctctctgtctttccctctctctatatataccaaaggtcaaatctttggtattttgcattgagtctttaattattcattcactttgacctagtaattgcacttcaga

SEQ ID NO: 657 - DNA, 1614 bp, Homo sapiens
ccccatgttaacggcccccagtgtggactgtcagctccatgaaggcagggccctacttatctcgttcacagcacaaggccgggcacacagtaggtgctcactcaacattcctgggatcaatgggaaatgactgtcggggaaccctctgcagccgtccttgtcgagggccccagatggggtgtgggtggcccctccccatccagatggtgttggaggggctgggggccaggcatggcgagcaggccgaggctgcaggtggacatccctgggactggagctgctgggggccaggctgcagttccagcccaggtcaggtctcatgtgaggcctccgtgaaacaagaatttctctctccgtttccttctcctgtctgactcacactttcgttttgaagttccccctttctgccagtgctttgcctgaggttacggagtggtcaagcgaggccagcagggcgtggagaccaggaggaagctgggctgcagtttcattcacaaaaacacgacccgcccgcttcctgtgtcctgcctgggctgcccggcccgcagccctacagccagttcacagggtgtttgcaagtttgcaggggccagtgagggtgctcctggggtttaagaggcttgagtttgtccaccccacggcctctgtcaggacccccccttcccgccactatgcttctgtctcccacggtgcctcccagctcacccccacaggggcctggcgcagagcctcaaactcaggattctataggagctgagggttgggtctgagcaccttggcgcttcccctggccccactgacccatccttgtttcagcacagagctgggaggcccagggaggatggcctctgctgactggtccagctccctctgtggttcccacctctcagtgtggggtggatccaagggggagggaagagaaggggatgggaagaaaacgatgcctgttggggcacaggctcctaaacccaacctcgtatcgcctcctgcgagtagcttccaggtgtccacagggagcccggggtcatgctggcatcattcattctccacgcatcagatgatcctgtggcccctcagtgccaggccccactggccctctgcgcacatcagtgactctgatgttctcccccaccgcatgctgccaatctgatggtggagacagaacagcagtcccggatggtggaggcaatgcccagagctgtggcagccaccttgcagccgtgaagcaccagtgggaatgacagtcaagagaaccacggagatgccagcccctggacccacagcagcagcacctgcttccagactcagagtgtgagaaaaaaataaactcctatttgtttatggcaagagacaaggtctagctctgtgatgcaggccggaggacagtggtgtgatcacagctcactgcagccttgaactcctgggttccagcaatcctcccacctcagcctccttagtaggcgtggctacaggtgtgtaccaccatgtccagccctaaatttcattctttttaatttcaatattgttatgtgttttctaatgttttataacttattggtatggtagatgtacatgtatacaaattaaaagaaaatttatatatattttactggg

SEQ ID NO: 658 - DNA, 602 bp, Homo sapiens
taccttggctatccccctctgagttcttgccttgattctcctgttactgtcccgcgaacccacatccctacaaagcaggaaagtatgcttgggagaggccaagtgagtggggaatcagcccaaagccaggcgtccagggtctccctcacctgaagctgactttttccccaccttggacagagggcgggagatgccatccccactgaacccagtgctttcaccagccatattagctcccactcaccccccgtcgtggaagcctcggccgtcacacctgcagggccggggcgtgcatggcctcagggatggcctgttcagctgctgggtgactcgggtccaggtgcctcaccacctgctcgttgcctttgggctcagtgaagagtctggagtttatctggagtgaggtggccggttcttggtgggatctgagcaggtggaggcaatgcccagagctgtggcagccaccttgcagccgtgaagcaccagtgggaatgacagtcaagagaaccacggagatgccagcccctggacccacagcagcagcacctgcttccagactcagagtgtgagaaaaaaataaactcctatttgtttatggcaag

SEQ ID NO: 659 - DNA, 355 bp, Artificial
  Synthetic oligonucleotide
taccttggctatccccctctgagttcttgccttgattctcctgttactgtcccgcgaacccacatccctacaaagcaggaaagtatgcttgggagaggccaagtgagtggggaatcagcccaaagccaggcgtccagggtctccctcacctgaagctgactttttccccaccttggacagagggcgggagatgccatccccactgaacccagtgctttcaccagccatattagctcccactcaccccccgtcgtggaagcctcggccgtcacacctgcagggccggggcgtgcatggcctcagggatggcctgttcagctgctgggtgactcgggtccaggtgcctcaccacctg

SEQ ID NO: 660 - DNA, 656 bp, Artificial
  Synthetic oligonucleotide
gtaagaagcagggtctttcttatgttttaaggaaagccctgtggctgctgggtgggggaccagctggaggggcaggagggcagcaggtgactcattacaaggctggggccatcatcctgtgagagctgggcatgaccagtgcaggtcagtggggttgagggtacagaccagtgggacccacagacggctcgggagtgaccaagcctctgctgagctgcccaggtcccctctggtggacacctcctacccggagccccccaaggtggtgccaaagctagaccaccatacagccagaggcctccaggccctacccacgacagcccagctggcttctgcccagccaccgtcacacacagagggcagccgtccccatggtccctagaggcggttgaggaccactgtgcctggagtcatctgtggctataaaccaggaggagaaggctgcccaccccctgccccagagatggggaggctggggccacccggtggatttgggcaggtcccagcttccaggatcatgaggtgaaaacgtgaagggaccctagaggccatggggacccaggcacagagcggcggcctctcatcctccccatggtcaaggaggtcagtgccttcccggggtggattacggatggtagtatcttccttctcctcag

SEQ ID NO: 661 - DNA, 260 bp, Artificial
  Synthetic oligonucleotide
gctggacacttcgtggagggctccaaagccggcagatcccggggccgcctctgtctctcccaggccctgcgtgttgcggtgagaggagcatttgtgtctctgtggtttgctgctggagctggtgaccgggagagaaacaagggagacaagggtgcccagacaggtgcggggctcagccaggaggcagaagacgtggacgtgtcccgggccaggagggtcacagatgcaccacaaggcactctgtgtggcactgggaacag

SEQ ID NO: 662 - DNA, 1258 bp, Artificial
  Synthetic oligonucleotide
gaattctgggagtcagtctgcaagggtggtgggcgttgctcacctgggagaagcctttagagtgggcgttgagcaggccattagctcgtgccctgaggaggtgcatgggcggcatgggctctccatggaaattatgtgggcgcgaatggatgtggctctgcgctcacctgggcgaggacttctggccggtgccggggcactctgcatgaccctggcagaatcgagctgccctgactatgaaaggggaagaagagcatgcctgaccctccaccggcaccccacccctcactgctccacctggggcctgcctctgcgggtggctgggtcctggctgactgttgtgactgttgaggccctgggggggtggcgcatgggagttaggaggactggccaggtggggcccactatgcacccacccccagtgtcaggtgcttctcctctcctcctccaccacctcctcctcctcctcctcatcatcatcctcacttgttgaggacgtcctgtgtgccaagtggtttatatgcccagcctcatttaatcctcagaatgactccatgaggtagctactaaaaccccccacttaacagatgaggaaactgaggcctagagaagctcaacaagttgcctaagttccaagtttcctctcccaactctcctaccctctcctcttccttctcctttctcccattcttccctgcctcttccctaactagacaattttttattgagtgtctcccaggtgcaggcatgagccaggtgctgggaaaatcatgataacccagctccttctggtcattttctcagctggttagaggctgggaggacacgcaagttcagctccagccgactggggcattggtggtagcccctggagacattgtgcaatggggctacgaggctgcatctggctccagggaagcgtgttgcaatccatgagtgatgtctgccatgcgtacaggcatggagagtgaggcgcctgtactgtctttctgtagaccctagactggtggggcctctgaaatgcatccagacactgtgctgggtgtgttgcatggccctcccaaccaattcagtatttttctccccattttccagggagaaatctaaggcgtcagaatgtaaggttcttattggaacccaggctccagggtccctggttttctgtgacatcatgctgcaggaccctgtttctctctttgctttggctgctggggagctcagaagggagctttaggcttgctctcagtcaccacattag

SEQ ID NO: 663 - DNA, 274 bp, Artificial
  Synthetic oligonucleotide
tcgccgtctcctttgggctctgtctcctccctgctgtgcttcctgaggagcaggccggatgtaagttatcaactataaataaaaccaagacttccgttctggctctcactctagtttcctggtgcattttttttttttaaagttcttaatcaagggaggggatactcctaactgaagatgacatcagcatcagctggccccggggggcaggcccccagcccccaggcccgtgtgggccctgaatgcccccattatgaggggtaacctcattaca

SEQ ID NO: 664 - DNA, 1179 bp, Artificial
  Synthetic oligonucleotide
ccccatgttaacggcccccagtgtggactgtcagctccatgaaggcagggccctacttatctcgttcacagcacaaggccgggcacacagtaggtgctcactcaacattcctgggatcaatgggaaatgactgtcggggaaccctctgcagccgtccttgtcgagggccccagatggggtgtgggtggcccctccccatccagatggtgttggaggggctgggggccaggcatggcgagcaggccgaggctgcaggtggacatccctgggactggagctgctgggggccaggctgcagttccagcccaggtcaggtctcatgtgaggcctccgtgaaacaagaatttctctctccgtttccttctcctgtctgactcacactttcgttttgaagttccccctttctgccagtgctttgcctgaggttacggagtggtcaagcgaggccagcagggcgtggagaccaggaggaagctgggctgcagtttcattcacaaaaacacgacccgcccgcttcctgtgtcctgcctgggctgcccggcccgcagccctacagccagttcacagggtgtttgcaagtttgcaggggccagtgagggtgctcctggggtttaagaggcttgagtttgtccaccccacggcctctgtcaggacccccccttcccgccactatgcttctgtctcccacggtgcctcccagctcacccccacaggggcctggcgcagagcctcaaactcaggattctataggagctgagggttgggtctgagcaccttggcgcttcccctggccccactgacccatccttgtttcagcacagagctgggaggcccagggaggatggcctctgctgactggtccagctccctctgtggttcccacctctcagtgtggggtggatccaagggggagggaagagaaggggatgggaagaaaacgatgcctgttggggcacaggctcctaaacccaacctcgtatcgcctcctgcgagtagcttccaggtgtccacagggagcccggggtcatgctggcatcattcattctccacgcatcagatgatcctgtggcccctcagtgccaggccccactggccctctgcgcacatcagtgactctgatgttctcccccaccgcatgctgccaatctgatggtggagacagaacagcagtcccggatg

SEQ ID NO: 665 - DNA, 169 bp, Artificial
  Synthetic oligonucleotide
gtggaggcaatgcccagagctgtggcagccaccttgcagccgtgaagcaccagtgggaatgacagtcaagagaaccacggagatgccagcccctggacccacagcagcagcacctgcttccagactcagagtgtgagaaaaaaataaactcctatttgtttatggcaag

SEQ ID NO: 666 - DNA, 124 bp, Artificial
  Synthetic oligonucleotide
agacaaggtctagctctgtgatgcaggccggaggacagtggtgtgatcacagctcactgcagccttgaactcctgggttccagcaatcctcccacctcagcctccttagtaggcgtggctacag

SEQ ID NO: 667 - DNA, 142 bp, Artificial
  Synthetic oligonucleotide
gtgtgtaccaccatgtccagccctaaatttcattctttttaatttcaatattgttatgtgttttctaatgttttataacttattggtatggtagatgtacatgtatacaaattaaaagaaaatttatatatattttactggg

SEQ ID NO: 668 - DNA, 660 bp, Artificial
  Synthetic oligonucleotide
gccaacaacttcactttccacactcagtgccacgaagtgcagctctaagctggggatttctgtgcagagatgatccactgagtgcaacccaccaccgtgcggacaccacccctgcagaatcatctgtgaaaacaaccccaggcccagacataggggccagctaagcttcgtagccctcgaaatacagggagtgccccctctggaccctcgagcccacagtccatccaccacagaggtgtctgctgctcatcagatagttcctaccaagaaaatgctgtgtgaacccatctgtgtggcaaaccggcacggggagaaagctgacttccaaggacgtctaccaactgtcacttgcaaaccagaacttgcctctttgtagatgaagactggcagggctgaagaaatgatctcatgttgaaattaatgatgagcttcagggtgaggtgactcagttcgaatgctgttgaatgttggtgtcatgggacttttacaagaagtaaaactgggctataaaaatgatccccttcccctcactagagaagggaggttctattcctctctctgtctttccctctctctatatataccaaaggtcaaatctttggtattttgcattgagtctttaattattcattcactttgacctagtaattgcacttcaga

SEQ ID NO: 669 - DNA, 31 bp, Artificial
  Synthetic oligonucleotide
ctgagctctgtgtgatttctggacacttctg

SEQ ID NO: 670 - DNA, 78 bp, Artificial
  Synthetic oligonucleotide
ctcgttgcctttgggctcagtgaagagtctggagtttatctggagtgaggtggccggttcttggtgggatctgagcag

SEQ ID NO: 671 - DNA, 94 bp, Artificial
  Synthetic oligonucleotide
agtccattcaggagcaggaaagttcatctcagaccctaaatccagccacgtcatgccacgcttaacacctctaacaacttcccctggcacttag

SEQ ID NO: 672 - DNA, 74 bp, Artificial
  Synthetic oligonucleotide
gacagcgtctggctccttccctcggctcatggccctcagaatctgcgtcacatacaccccagctctcccgatag

SEQ ID NO: 673 - DNA, 95 bp, Artificial
  Synthetic oligonucleotide
gtctctgcactcgctgttgcctctgcctggaacagtctccctcctggtgtcattgtctccgtggtgtgtccttcctgaccttccacctccaccag

SEQ ID NO: 674 - DNA, 96 bp, Artificial
  Synthetic oligonucleotide
gtgccgacacttccctgaccccagtaacctcttctcttgggtgggtgaatgccacctgctgatgtctgatttattcatcggttttcttgtctgtag

SEQ ID NO: 675 - DNA, 48 bp, Artificial
  Synthetic oligonucleotide
tctgtcccccttggggacagggactcgttgctcatgttcacccggcag

SEQ ID NO: 676 - DNA, 22 bp, Artificial
  Synthetic oligonucleotide
ctcaggggtttgggcatttttg

SEQ ID NO: 677 - DNA, 77 bp, Artificial
  Synthetic oligonucleotide
tgactgcatgaggctgtacgtatctgcagcctgccccttttcatggtgtttatccactcacacagtgatgagcagtg

SEQ ID NO: 678 - DNA, 74 bp, Artificial
  Synthetic oligonucleotide
taatggaagacagcaaaagaagtttggagattcctggtttaaagcatttaaagcctctgtgaaaatttgcccag

SEQ ID NO: 679 - protein, 313 aa, Homo sapiens
MALRICVTYTPALPIGLCTRCCLCLEQSPSWCHCLRGVSFLTFHLHQSVPLGDRDSLLMFTRQAGHFVEGSKAGRSRGRLCLSQALRVAVRGAFVSLWFAAGAGDRERNKGDKGAQTGAGLSQEAEDVDVSRARRVTDAPQGTLCGTGNRNSGSQSARAVGVAHLGEAFRVGVEQAISSCPEEVHGRHGLSMEIMWARMDVALRSPGRGLLAGAGALCVTLAESSCPDYERGRRACLTLHRHPTPHCSTWGLPLRVAGSWLTVVTVEALGGWRMGVRRTGQVGPTMHPPPVSGASPLLLHHLLLLLLIIILTC

SEQ ID NO: 680 - protein, 313 aa, Homo sapiens
MALRICVTYTPALPIGLCTRCCLCLEQSPSWCHCLRGVSFLTFHLHQSVPLGDRDSLLMFTRQAGHFVEGSKAGRSRGRLCLSQALRVAVRGAFVSLWFAAGAGDRERNKGDKGAQTGAGLSQEAEDVDVSRARRVTDAPQGTLCGTGNRNSGSQSARVVGVAHLGEAFRVGVEQAISSCPEEVHGRHGLSMEIMWARMDVALRSPGRGLLAGAGALCMTLAESSCPDYERGRRACLTLHRHPTPHCSTWGLPLRVAGSWLTVVTVEALGGWRMGVRRTGQVGPTMHPPPVSGASPLLLHHLLLLLLIIILTC

SEQ ID NO: 681 - protein, 313 aa, Homo sapiens
MALRICVTYTPALPIGLCTRCCLCLEQSPSWCHCLRGVSFLTFHLHQSVPLGDRDSLLMFTRQAGHFVEGSKAGRSRGRLCLSQALRVAVRGAFVSLWFAAGAGDRERNKGDKGAQTGAGLSQEAEDVDVSRARRVTDAPQGTLCGTGNRNSGSQSARAVGVAHLGEAFRVGVEQAISSCPEEVHGRHGLSMEIMWARMDVALRSPGRGLLAGAGALCMTLAESSCPDYERGRRACLTLHRHPTPHCSTWGLPLRVAGSWLTVVTVEALGGWRMGVRRTGQVGPTMHPPPVSGASPLLLHHLLLLLLIIILTC

SEQ ID NO: 682 - protein, 313 aa, Homo sapiens
MALRICVTYTPALPIGLCTRCCLCLEQSPSWCHCLRGVSFLTFHLHQSVPLGDRDSLLMFTRQAGHFVEGSKAGRSRGRLCLSQALRVAVRGAFVSLWFAAGAGDRERNKGDKGAQTGAGLSQEAEDVDVSRARRVTDAPQGTLCGTGNRNSGSQSARAVGVAHLGEAFRVGVEQAISSCPEEVHGRHGLSMEIMWAQMDVALRSPGRGLLAGAGALCMTLAESSCPDYERGRRACLTLHRHPTPHCSTWGLPLRVAGSWLTVVTVEALGRWRMGVRRTGQVGPTMHPPPVSGASPLLLHHLLLLLLIIILTC

SEQ ID NO: 683 - protein, 313 aa, Homo sapiens; identical to SEQ ID NO: 680

SEQ ID NO: 684 - protein, 255 aa, Homo sapiens
MFTRQAGHFVEGSKAGRSRGRLCLSQALRVAVRGAFVSLWFAAGAGDRERNKGDKGAQTGAGLSQEAEDVDVSRARRVTDAPQGTLCGTGNRNSGSQSARVVGVAHLGEAFRVGVEQAISSCPEEVHGRHGLSMEIMWARMDVALRSPGRGLLAGAGALCMTLAESSCPDYERGRRACLTLHRHPTPHCSTWGLPLRVAGSWLTVVTVEALGGWRMGVRRTGQVGPTMHPPPVSGASPLLLHHLLLLLLIIILTC

SEQ ID NO: 685 - protein, 191 aa, Homo sapiens
MSDLFIGFLVCSLSPLGTGTRCSCSPGRNSGSQSARVVGVAHLGEAFRVGVEQAISSCPEEVHGRHGLSMEIMWARMDVALRSPGRGLLAGAGALCMTLAESSCPDYERGRRACLTLHRHPTPHCSTWGLPLRVAGSWLTVVTVEALGGWRMGVRRTGQVGPTMHPPPVSGASPLLLHHLLLLLLIIILTC

SEQ ID NO: 686 - protein, 122 aa, Homo sapiens
MEIMWARMDVALRSPGRGLLAGAGALCMTLAESSCPDYERGRRACLTLHRHPTPHCSTWGLPLRVAGSWLTVVTVEALGGWRMGVRRTGQVGPTMHPPPVSGASPLLLHHLLLLLLIIILTC

SEQ ID NO: 687 - protein, 111 aa, Homo sapiens
MKAGPYLSRSQHKAGHTVGAHSTFLGSMGNDCRGTLCSRPCRGPQMGCGWPLPIQMVLEGLGARHGEQAEAAGGHPWDWSCWGPGCSSSPGQVSCEASVKQEFLSPFPSPV

SEQ ID NO: 688 - protein, 70 aa, Homo sapiens
MPSPLNPVLSPAILAPTHPPSWKPRPSHLQGRGVHGLRDGLFSCWVTRVQVPHHLLVAFGLSEESGVYLE

SEQ ID NO: 689 - protein, 255 aa, Homo sapiens
MFTRQAGHFVEGSKAGRSRGRLCLSQALRVAVRGAFVSLWFAAGAGDRERNKGDKGAQTGAGLSQEAEDVDVSRARRVTDAPQGTLCGTGNRNSGSQSARAVGVAHLGEAFRVGVEQAISSCPEEVHGRHGLSMEIMWAQMDVALRSPGRGLLAGAGALCMTLAESSCPDYERGRRACLTLHRHPTPHCSTWGLPLRVAGSWLTVVTVEALGRWRMGVRRTGQVGPTMHPPPVSGASPLLLHHLLLLLLIIILTC

SEQ ID NO: 690 - protein, 313 aa, Homo sapiens; identical to SEQ ID NO: 679

SEQ ID NO: 691 - protein, 59 aa, Homo sapiens
MPSPLNPVLSPAILAPTHPPSWKPRPSHLQGRGVHGLRDGLFSCWVTRVQVPHHLLSSV

SEQ ID NO: 692 - protein, 56 aa, Homo sapiens
MVFIHSHSDEQWWRQCPELWQPPCSREAPVGMTVKRTTEMPAPGPTAAAPASRLRV

SEQ ID NO: 693 - DNA, 2195 bp, Homo sapiens
caaagcctgggcccgtgggggacgcacatggtcctgttcgtactccaggatggcggcgtaaagggcccgctgctcccgttcctccggggtcagggcgacttggctgcaaaacctcctggggagaaaggcacgcggtgggtgccggggccaggccctccccgcagcggccccaggggcgggcaggagtcccacctgttggcggcctcctggagccgcagccggcgctcctccatctttctctggagctgggtgcagagtcaaggggccgagcgtgggatctgagcgggccctcggttcccaaccccgtcccacacccggagaggccgggacgtcccagggacctcctctcggtgaggggctgtccccagggaggcctcctccagtggcgtcagctctctggaaatgtgacaagctgctgtctagaccccaggaagcccagtggtgtctggacaccagaggagtctctctcatcctcccggattgctctgaggccaggagctttgtgactctgccccctgaagcttctggaagatctcgggtggcagaaaaggagagagctttcctccttcatcggagtatacacggcggtgtcggccggcaggctgggggatgggagcagctgcaggcatggttggcttcaggcgtgttttccctgcaagccatgggtaaccaggggtcaagcggtgggccacatcccacagaggagatgcgggcttgggggatgccccaggagagccgcctactgcaggagacccaccaagcttggcggccgtcgactgggccctctccagacactgctgtgctagtttcagcatcttggaggtgtcggggggcacagtttccccagcttctgggggagggacaagaaggctggtcacagtcggctctaccactgttacttactgctgagataaaatgaggcaacggaaaaggcaggcaagcccactgcccccctcagcacccccactgaccccgggcaagcccactgcccccccatcccctcactgaccctggggcaagcccactgcccccccatcccctcaccccgggtaagcccactgcccctcccgtcccccaactgactgaccctaggcaagcccactgcccccccatcccctcaccccgggtaagcccactgccccttccaccccccactgaccccgggcaagccgactattcctcatggaccccaggcaaggcccctgcccccaccatggaccccaggcaagtccccccacccacgcatttctaatcatctgccctggttttgcctcctgagtctgttaaggctgtgtgcccctcatcgaggcccgtcacagcctcgaccctaaacaggcctttagtgctcactcagcttcacttgcaactgcaggcctctgggaagtggccgttttacagagacaaggacgtgctgaggggatcgcctcacccatctcccaccggctgtgtccccaaagtcctgccttcccgtagcttggcatggagcacctctgcgcgaccatggacctgctcacacagcccttctgcgcgccgtgggagctgcctctctgtgactcgcccctggacccaccgccccagcgcctgacccacctccctgctgcccttcacagaaaacttctcatagactcccattttctcatcccgccccgatttagcccccgactccccccggaaactgcccttacccgtccccaccttgccagacacggtgggccactggagttcctctgtcttctgggactttgctctccccaggggatcctctgccactcctccacccaactcctcaatcttggagcgccagagctcagccgagctcaccggctccctagggagctggggcaactgttagctccccctgacctgtgtgatcctacgtccagtggctgccccgacctctgtgatcccacgtccaggggctcccccgacctctgtgatcccacgtccagtggctcctccgacctctgtgctcccacgtccagtggctcccccgacctctgtgctcccacgtccagtggctcccccgacctctgtgctcccacgtccagtgggtccccctgacctctgtgatcccacgtccagtggctccccctgacctctgtgctctatgtccagtggctccccctgacctctgtgatcctatgtgcagcggctgctggcctctcaaacttaatgtgttcattgcggaacttgct

SEQ ID NO: 694 - DNA, 1796 bp, Homo sapiens
caaagcctgggcccgtgggggacgcacatggtcctgttcgtactccaggatggcggcgtaaagggcccgctgctcccgttcctccggggtcagggcgacttggctgcaaaacctcctggggagaaaggcacgcggtgggtgccggggccaggccctccccgcagcggccccaggggcgggcaggagtcccacctgttggcggcctcctggagccgcagccggcgctcctccatctttctctggagctgggtgcagagtcaaggggccgagcgtgggatctgagcgggccctcggttcccaaccccgtcccacacccggagaggccgggacgtcccagggacctcctctcggtgaggggctgtccccagggaggcctcctccagtggcgtcagctctctggaaatgtgacaagctgctgtctagaccccaggaagcccagtggtgtctggacaccagaggagtctctctcatcctcccggattgctctgaggccaggagctttgtgactctgccccctgaagcttctggaagatctcgggtggcagaaaaggagagagctttcctccttcatcggagtatacacggcggtgtcggccggcaggctgggggatgggagcagctgcaggcatggttggcttcaggcgtgttttccctgcaagccatgggtaaccaggggtcaagcggtgggccacatcccacagaggagatgcgggcttgggggatgccccaggagagccgcctactgcaggagacccaccaagcttggcggccgtcgactgggccctctccagacactgctgtgctagtttcagcatcttggaggtgtcggggggcacagtttccccagcttctgggggagggacaagaaggctggtcacagtcggctctaccactgttacttactgctgagataaaatgaggcaacggaaaaggcaggcaagcccactgcccccctcagcacccccactgaccccgggcaagcccactgcccccccatcccctcactgaccctggggcaagcccactgcccccccatcccctcaccccgggtaagcccactgcccctcccgtcccccaactgactgaccctaggcaagcccactgcccccccatcccctcaccccgggtaagcccactgccccttccaccccccactgaccccgggcaagccgactattcctcatggaccccaggcaaggcccctgcccccaccatggaccccaggcaagtccccccacccacgcatttctaatcatctgccctggttttgcctcctgagtctgttaaggctgtgtgcccctcatcgaggcccgtcacagcctcgaccctaaacaggcctttagtgctcactcagcttcacttgcaactgcaggcctctgggaagtggccgttttacagagacaaggacgtgctgaggggatcgcctcacccatctcccaccggctgtgtccccaaagtcctgccttcccgtagcttggcatggagcacctctgcgcgaccatggacctgctcacacagcccttctgcgcgccgtgggagctgcctctctgtgactcgcccgacctctgtgctcccacgtccagtggctcccccgacctctgtgctcccacgtccagtggctcccccgacctctgtgctcccacgtccagtgggtccccctgacctctgtgatcccacgtccagtggctccccctgacctctgtgctctatgtccagtggctccccctgacctctgtgatcctatgtgcagcggctgctggcctctcaaacttaatgtgttcattgcggaacttgct

SEQ ID NO: 695 - DNA, 368 bp, Artificial
  Synthetic oligonucleotide
caaagcctgggcccgtgggggacgcacatggtcctgttcgtactccaggatggcggcgtaaagggcccgctgctcccgttcctccggggtcagggcgacttggctgcaaaacctcctggggagaaaggcacgcggtgggtgccggggccaggccctccccgcagcggccccaggggcgggcaggagtcccacctgttggcggcctcctggagccgcagccggcgctcctccatctttctctggagctgggtgcagagtcaaggggccgagcgtgggatctgagcgggccctcggttcccaaccccgtcccacacccggagaggccgggacgtcccagggacctcctctcggtgaggggctgtccccag

SEQ ID NO: 696 - DNA, 130 bp, Artificial
  Synthetic oligonucleotide
ggaggcctcctccagtggcgtcagctctctggaaatgtgacaagctgctgtctagaccccaggaagcccagtggtgtctggacaccagaggagtctctctcatcctcccggattgctctgaggccaggag

SEQ ID NO: 697 - DNA, 167 bp, Artificial
  Synthetic oligonucleotide
ctttgtgactctgccccctgaagcttctggaagatctcgggtggcagaaaaggagagagctttcctccttcatcggagtatacacggcggtgtcggccggcaggctgggggatgggagcagctgcaggcatggttggcttcaggcgtgttttccctgcaagccatgg

SEQ ID NO: 698 - DNA, 267 bp, Artificial
  Synthetic oligonucleotide
gtaaccaggggtcaagcggtgggccacatcccacagaggagatgcgggcttgggggatgccccaggagagccgcctactgcaggagacccaccaagcttggcggccgtcgactgggccctctccagacactgctgtgctagtttcagcatcttggaggtgtcggggggcacagtttccccagcttctgggggagggacaagaaggctggtcacagtcggctctaccactgttacttactgctgagataaaatgaggcaacggaaaag

SEQ ID NO: 699 - DNA, 440 bp, Artificial
  Synthetic oligonucleotide
gcaggcaagcccactgcccccctcagcacccccactgaccccgggcaagcccactgcccccccatcccctcactgaccctggggcaagcccactgcccccccatcccctcaccccgggtaagcccactgcccctcccgtcccccaactgactgaccctaggcaagcccactgcccccccatcccctcaccccgggtaagcccactgccccttccaccccccactgaccccgggcaagccgactattcctcatggaccccaggcaaggcccctgcccccaccatggaccccaggcaagtccccccacccacgcatttctaatcatctgccctggttttgcctcctgagtctgttaaggctgtgtgcccctcatcgaggcccgtcacagcctcgaccctaaacaggcctttagtgctcactcagcttcacttgcaactgcag

SEQ ID NO: 700 - DNA, 188 bp, Artificial
  Synthetic oligonucleotide
gcctctgggaagtggccgttttacagagacaaggacgtgctgaggggatcgcctcacccatctcccaccggctgtgtccccaaagtcctgccttcccgtagcttggcatggagcacctctgcgcgaccatggacctgctcacacagcccttctgcgcgccgtgggagctgcctctctgtgactcgccc

SEQ ID NO: 701 - DNA, 399 bp, Artificial
  Synthetic oligonucleotide
ctggacccaccgccccagcgcctgacccacctccctgctgcccttcacagaaaacttctcatagactcccattttctcatcccgccccgatttagcccccgactccccccggaaactgcccttacccgtccccaccttgccagacacggtgggccactggagttcctctgtcttctgggactttgctctccccaggggatcctctgccactcctccacccaactcctcaatcttggagcgccagagctcagccgagctcaccggctccctagggagctggggcaactgttagctccccctgacctgtgtgatcctacgtccagtggctgccccgacctctgtgatcccacgtccaggggctcccccgacctctgtgatcccacgtccagtggctcctcc

SEQ ID NO: 702 - DNA, 236 bp, Artificial
  Synthetic oligonucleotide
gacctctgtgctcccacgtccagtggctcccccgacctctgtgctcccacgtccagtggctcccccgacctctgtgctcccacgtccagtgggtccccctgacctctgtgatcccacgtccagtggctccccctgacctctgtgctctatgtccagtggctccccctgacctctgtgatcctatgtgcagcggctgctggcctctcaaacttaatgtgttcattgcggaacttgct

SEQ ID NO: 703 - protein, 193 aa, Homo sapiens
MEHLCATMDLLTQPFCAPWELPLCDSPLDPPPQRLTHLPAALHRKLLIDSHFLIPPRFSPRLPPETALTRPHLARHGGPLEFLCLLGLCSPQGILCHSSTQLLNLGAPELSRAHRLPRELGQLLAPPDLCDPTSSGCPDLCDPTSRGSPDLCDPTSSGSSDLCAPTSSGSPDLCAPTSSGSPDLCAPTSSGSP

SEQ ID NO: 704 - protein, 84 aa, Homo sapiens [sequence omitted]

SEQ ID NO: 705 - DNA, 9380 bp, Homo sapiens
gggcgagcgcctccgtccccggatgtgagctccggctgcccgcggtcccgagccagcggcggcgcgggcggcggcggcgggcaccgggcaccgcggcgggcgggcagacgggcgggcatggggggagcgccgagcggccccggcggccgggccggcatcaccgcggcgtctctccgctagaggaggggacaagccagttctcctttgcagcaaaaaattacatgtatatattattaagataatatatacattggattttatttttttaaaaagtttattttgctccatttttgaaaaagagagagcttgggtggcgagcggttttttttttaaatcaattatccttattttctgttatttgtccccgtccctccccacccccctgctgaagcgagaataagggcagggaccgcggctcctacctcttggtgatccccttccccattccgcccccgcctcaacgcccagcacagtgccctgcacacagtagtcgctcaataaatgttcgtggatgatgatgatgatgatgatgaaaaaaatgcagcatcaacggcagcagcaagcggaccacgcgaacgaggcaaactatgcaagaggcaccagacttcctctttctggtgaaggaccaacttctcagccgaatagctccaagcaaactgtcctgtcttggcaagctgcaatcgatgctgctagacaggccaaggctgcccaaactatgagcacctctgcacccccacctgtaggatctctctcccaaagaaaacgtcagcaatacgccaagagcaaaaaacagggtaactcgtccaacagccgacctgcccgcgcccttttctgtttatcactcaataaccccatccgaagagcctgcattagtatagtggaatggaaaccatttgacatatttatattattggctatttttgccaattgtgtggccttagctatttacatcccattccctgaagatgattctaattcaacaaatcataacttggaaaaagtagaatatgccttcctgattatttttacagtcgagacatttttgaagattatagcgtatggattattgctacatcctaatgcttatgttaggaatggatggaatttactggattttgttatagtaatagtaggattgtttagtgtaattttggaacaattaaccaaagaaacagaaggcgggaaccactcaagcggcaaatctggaggctttgatgtcaaagccctccgtgcctttcgagtgttgcgaccacttcgactagtgtcaggagtgcccagtttacaagttgtcctgaactccattataaaagccatggttcccctccttcacatagcccttttggtattatttgtaatcataatctatgctattataggattggaactttttattggaaaaatgcacaaaacatgtttttttgctgactcagatatcgtagctgaagaggacccagctccatgtgcgttctcagggaatggacgccagtgtactgccaatggcacggaatgtaggagtggctgggttggcccgaacggaggcatcaccaactttgataactttgcctttgccatgcttactgtgtttcagtgcatcaccatggagggctggacagacgtgctctactgggtaaatgatgcgataggatgggaatggccatgggtgtattttgttagtctgatcatccttggctcatttttcgtccttaacctggttcttggtgtccttagtggagaattctcaaaggaaagagagaaggcaaaagcacggggagatttccagaagctccgggagaagcagcagctggaggaggatctaaagggctacttggattggatcacccaagctgaggacatcgatccggagaatgaggaagaaggaggagaggaaggcaaacgaaatactagcatgcccaccagcgagactgagtctgtgaacacagagaacgtcagcggtgaaggcgagaaccgaggctgctgtggaagtctctggtgctggtggagacggagaggcgcggccaaggcggggccctctgggtgtcggcggtggggtcaagccatctcaaaatccaaactcagccgacgctggcgtcgctggaaccgattcaatcgcagaagatgtagggccgccgtgaagtctgtcacgttttactggctggttatcgtcctggtgtttctgaacaccttaaccatttcctctgagcactacaatcagccagattggttgacacagattcaagatattgccaacaaagtcctcttggctctgttcacctgcgagatgctggtaaaaatgtacagcttgggcctccaagcatatttcgtctctcttttcaaccggtttgattgcttcgtggtgtgtggtggaatcactgagacgatcttggtggaactggaaatcatgtctcccctggggatctctgtgtttcggtgtgtgcgcctcttaagaatcttcaaagtgaccaggcactggacttccctgagcaacttagtggcatccttattaaactccatgaagtccatcgcttcgctgttgcttctgctttttctcttcattatcatcttttccttgcttgggatgcagctgtttggcggcaagtttaattttgatgaaacgcaaaccaagcggagcacctttgacaatttccctcaagcacttctcacagtgttccagatcctgacaggcgaagactggaatgctgtgatgtacgatggcatcatggcttacgggggcccatcctcttcaggaatgatcgtctgcatctacttcatcatcctcttcatttgtggtaactatattctactgaatgtcttcttggccatcgctgtagacaatttggctgatgctgaaagtctgaacactgctcagaaagaagaagcggaagaaaaggagaggaaaaagattgccagaaaagagagcctagaaaataaaaagaacaacaaaccagaagtcaaccagatagccaacagtgacaacaaggttacaattgatgactatagagaagaggatgaagacaaggacccctatccgccttgcgatgtgccagtaggggaagaggaagaggaagaggaggaggatgaacctgaggttcctgccggaccccgtcctcgaaggatctcggagttgaacatgaaggaaaaaattgcccccatccctgaagggagcgctttcttcattcttagcaagaccaacccgatccgcgtaggctgccacaagctcatcaaccaccacatcttcaccaacctcatccttgtcttcatcatgctgagcagcgctgccctggccgcagaggaccccatccgcagccactccttccggaacacgatactgggttactttgactatgccttcacagccatctttactgttgagatcctgttgaagatgacaacttttggagctttcctccacaaaggggccttctgcaggaactacttcaatttgctggatatgctggtggttggggtgtctctggtgtcatttgggattcaatccagtgccatctccgttgtgaagattctgagggtcttaagggtcctgcgtcccctcagggccatcaacagagcaaaaggacttaagcacgtggtccagtgcgtcttcgtggccatccggaccatcggcaacatcatgatcgtcaccaccctcctgcagttcatgtttgcctgtatcggggtccagttgttcaaggggaagttctatcgctgtacggatgaagccaaaagtaaccctgaagaatgcaggggacttttcatcctctacaaggatggggatgttgacagtcctgtggtccgtgaacggatctggcaaaacagtgatttcaacttcgacaacgtcctctctgctatgatggcgctcttcacagtctccacgtttgagggctggcctgcgttgctgtataaagccatcgactcgaatggagagaacatcggcccaatctacaaccaccgcgtggagatctccatcttcttcatcatctacatcatcattgtagctttcttcatgatgaacatctttgtgggctttgtcatcgttacatttcaggaacaaggagaaaaagagtataagaactgtgagctggacaaaaatcagcgtcagtgtgttgaatacgccttgaaagcacgtcccttgcggagatacatccccaaaaacccctaccagtacaagttctggtacgtggtgaactcttcgcctttcgaatacatgatgtttgtcctcatcatgctcaacacactctgcttggccatgcagcactacgagcagtccaagatgttcaatgatgccatggacattctgaacatggtcttcaccggggtgttcaccgtcgagatggttttgaaagtcatcgcatttaagcctaaggggtattttagtgacgcctggaacacgtttgactccctcatcgtaatcggcagcattatagacgtggccctcagcgaagcagacccaactgaaagtgaaaatgtccctgtcccaactgctacacctgggaactctgaagagagcaatagaatctccatcacctttttccgtcttttccgagtgatgcgattggtgaagcttctcagcaggggggaaggcatccggacattgctgtggacttttattaagtcctttcaggcgctcccgtatgtggccctcctcatagccatgctgttcttcatctatgcggtcattggcatgcagatgtttgggaaagttgccatgagagataacaaccagatcaataggaacaataacttccagacgtttccccaggcggtgctgctgctcttcaggtgtgcaacaggtgaggcctggcaggagatcatgctggcctgtctcccagggaagctctgtgaccctgagtcagattacaaccccggggaggagtatacatgtgggagcaactttgccattgtctatttcatcagtttttacatgctctgtgcatttctgatcatcaatctgtttgtggctgtcatcatggataatttcgactatctgacccgggactggtctattttggggcctcaccatttagatgaattcaaaagaatatggtcagaatatgaccctgaggcaaagggaaggataaaacaccttgatgtggtcactctgcttcgacgcatccagcctcccctggggtttgggaagttatgtccacacagggtagcgtgcaagagattagttgccatgaacatgcctctcaacagtgacgggacagtcatgtttaatgcaaccctgtttgctttggttcgaacggctcttaagatcaagaccgaagggaacctggagcaagctaatgaagaacttcgggctgtgataaagaaaatttggaagaaaaccagcatgaaattacttgaccaagttgtccctccagctggtgatgatgaggtaaccgtggggaagttctatgccactttcctgatacaggactactttaggaaattcaagaaacggaaagaacaaggactggtgggaaagtaccctgcgaagaacaccacaattgccctacaggcgggattaaggacactgcatgacattgggccagaaatccggcgtgctatatcgtgtgatttgcaagatgacgagcctgaggaaacaaaacgagaagaagaagatgatgtgttcaaaagaaatggtgccctgcttggaaaccatgtcaatcatgttaatagtgataggagagattcccttcagcagaccaataccacccaccgtcccctgcatgtccaaaggccttcaattccacctgcaagtgatactgagaaaccgctgtttcctccagcaggaaattcggtgtgtcataaccatcataaccataattccataggaaagcaagttcccacctcaacaaatgccaatctcaataatgccaatatgtccaaagctgcccatggaaagcggcccagcattgggaaccttgagcatgtgtctgaaaatgggcatcattcttcccacaagcatgaccgggagcctcagagaaggtccagtgtgaaaagaacccgctattatgaaacttacattaggtccgactcaggagatgaacagctcccaactatttgccgggaagacccagagatacatggctatttcagggacccccactgcttgggggagcaggagtatttcagtagtgaggaatgctacgaggatgacagctcgcccacctggagcaggcaaaactatggctactacagcagatacccaggcagaaacatcgactctgagaggccccgaggctaccatcatccccaaggattcttggaggacgatgactcgcccgtttgctatgattcacggagatctccaaggagacgcctactacctcccaccccagcatcccaccggagatcctccttcaactttgagtgcctgcgccggcagagcagccaggaagaggtcccgtcgtctcccatcttcccccatcgcacggccctgcctctgcatctaatgcagcaacagatcatggcagttgccggcctagattcaagtaaagcccagaagtactcaccgagtcactcgacccggtcgtgggccacccctccagcaacccctccctaccgggactggacaccgtgctacacccccctgatccaagtggagcagtcagaggccctggaccaggtgaacggcagcctgccgtccctgcaccgcagctcctggtacacagacgagcccgacatctcctaccggactttcacaccagccagcctgactgtccccagcagcttccggaacaaaaacagcgacaagcagaggagtgcggacagcttggtggaggcagtcctgatatccgaaggcttgggacgctatgcaagggacccaaaatttgtgtcagcaacaaaacacgaaatcgctgatgcctgtgacctcaccatcgacgagatggagagtgcagccagcaccctgcttaatgggaacgtgcgtccccgagccaacggggatgtgggccccctctcacaccggcaggactatgagctacaggactttggtcctggctacagcgacgaagagccagaccctgggagggatgaggaggacctggcggatgaaatgatatgcatcaccaccttgtagcccccagcgaggggcagactggctctggcctcaggtggggcgcaggagagccaggggaaaagtgcctcatagttaggaaagtttaggcactagttgggagtaatattcaattaattagacttttgtataagagatgtcatgcctcaagaaagccataaacctggtaggaacaggtcccaagcggttgagcctggcagagtaccatgcgctcggccccagctgcaggaaacagcaggccccgccctctcacagaggatgggtgaggaggccagacctgccctgccccattgtccagatgggcactgctgtggagtctgcttctcccatgtaccagggcaccaggcccacccaactgaaggcatggcggcggggtgcaggggaaagttaaaggtgatgacgatcatcacacctgtgtcgttacctcagccatcggtctagcatatcagtcactgggcccaacatatccatttttaaaccctttcccccaaatacactgcgtcctggttcctgtttagctgttctgaaatacggtgtgtaagtaagtcagaacccagctaccagtgattattgcgagggcaatgggacctcataaataaggttttctgtgatgtgacgccagtttacataagagaatatcactccgatggtcggtttctgactgtcacgctaagggcaactgtaaactggaataataatgcactcgcaaccaggtaaacttagatacactagtttgtttaaaattatagatttactgtacatgacttgtaatatactataatttgtatttgtaaagagatggtctatattttgtaattactgtattgtatttgaactgcagcaatatccatgggtcctaataattgtagttccccactaaaatctagaaattattagtatttttactcgggctatccagaagtagaagaaatagagccaattctcatttattcagcgaaaatcctctggggttaaaattttaagtttgaaagaacttgacactacagaaatttttctaaaatattttgagtcactataaacctatcatctttccacaagatataccagatgactatttgcagtcttttctttgggcaagagttccatgattttgatactgtacctttggatccaccatgggttgcaactgtctttggttttgtttgtttgacttgaaccaccctctggtaagtaagtgaattacagagcaggtccagctggctgctctgccccttgggtatccatagttacggttttctctgtggcccacccagggtgttttttgcatcgctggtgcagaaatgcataggtggatgagatatagctgctcttgtcctctggggactggtggtgctgcttaagaaataaggggtgctggggacagaggagcaacgtggtgatctataggattggagtgtcggggtctgtacaaatcgtattgttgccttttacaaaactgctgtactgtatgttctctttgagggcttttgtatgcaattgaatgagggctgaagaagttttcattagaatgcactcacactctgactgtacgtcctgatgaaaacccacttttggataattagaaccgtcaaggcttcattttctgtcaacagaattaggccgactgtcaagttaccttggcagggattccctgcaatcaaaaagatagatgataggtagcaattttggtccaaaatttttaatagtatacagacaacctgttaattttttttttttttttttttgtaaataacaaacaccactttgttatgaagaccttacaaacctcttcttaagacattcttactctgatccaggcaaaaacacttcaaggtttgtaaatgactctttcctgacataaatccttttttattaaaatgcaaaatgttcttcagaataaaactgtgtaataatttttatacttgggagtgctccttgcacagagctgtcatttgccagtgagagcctccgacggggcaggtactgtgccagggcagctctgaaattatggatattcttatcctcctggttccttcggtgccaatggtaacctaataccagccgcagggagcgccatttctcctaaagggctacaccactgtcaacattatcctggactctgtgtctctctctgttgggtcttgtggcatcacatcaggccaaaattgccagaccaggaccctaagtgtctgatagaggcgatgatcttttccaaagtcagtacttacaaactggcattcttacaggctgcaccatttcctagtatgtctgctttaagcctggttcaacctctcatcgaatattaaatttttctttgtaagaaaaa

SEQ ID NO: 706 - DNA, 8957 bp, Homo sapiens
gggcagcccgccgctggagcgcgcttaaccctttggagcccgcagcacagtgccctgcacacagtagtcgctcaataaatgttcgtggatgatgatgatgatgatgatgaaaaaaatgcagcatcaacggcagcagcaagcggaccacgcgaacgaggcaaactatgcaagaggcaccagacttcctctttctggtgaaggaccaacttctcagccgaatagctccaagcaaactgtcctgtcttggcaagctgcaatcgatgctgctagacaggccaaggctgcccaaactatgagcacctctgcacccccacctgtaggatctctctcccaaagaaaacgtcagcaatacgccaagagcaaaaaacagggtaactcgtccaacagccgacctgcccgcgcccttttctgtttatcactcaataaccccatccgaagagcctgcattagtatagtggaatggaaaccatttgacatatttatattattggctatttttgccaattgtgtggccttagctatttacatcccattccctgaagatgattctaattcaacaaatcataacttggaaaaagtagaatatgccttcctgattatttttacagtcgagacatttttgaagattatagcgtatggattattgctacatcctaatgcttatgttaggaatggatggaatttactggattttgttatagtaatagtaggattgtttagtgtaattttggaacaattaaccaaagaaacagaaggcgggaaccactcaagcggcaaatctggaggctttgatgtcaaagccctccgtgcctttcgagtgttgcgaccacttcgactagtgtcaggagtgcccagtttacaagttgtcctgaactccattataaaagccatggttcccctccttcacatagcccttttggtattatttgtaatcataatctatgctattataggattggaactttttattggaaaaatgcacaaaacatgtttttttgctgactcagatatcgtagctgaagaggacccagctccatgtgcgttctcagggaatggacgccagtgtactgccaatggcacggaatgtaggagtggctgggttggcccgaacggaggcatcaccaactttgataactttgcctttgccatgcttactgtgtttcagtgcatcaccatggagggctggacagacgtgctctactgggtaaatgatgcgataggatgggaatggccatgggtgtattttgttagtctgatcatccttggctcatttttcgtccttaacctggttcttggtgtccttagtggagaattctcaaaggaaagagagaaggcaaaagcacggggagatttccagaagctccgggagaagcagcagctggaggaggatctaaagggctacttggattggatcacccaagctgaggacatcgatccggagaatgaggaagaaggaggagaggaaggcaaacgaaatactagcatgcccaccagcgagactgagtctgtgaacacagagaacgtcagcggtgaaggcgagaaccgaggctgctgtggaagtctctggtgctggtggagacggagaggcgcggccaaggcggggccctctgggtgtcggcggtggggtcaagccatctcaaaatccaaactcagccgacgctggcgtcgctggaaccgattcaatcgcagaagatgtagggccgccgtgaagtctgtcacgttttactggctggttatcgtcctggtgtttctgaacaccttaaccatttcctctgagcactacaatcagccagattggttgacacagattcaagatattgccaacaaagtcctcttggctctgttcacctgcgagatgctggtaaaaatgtacagcttgggcctccaagcatatttcgtctctcttttcaaccggtttgattgcttcgtggtgtgtggtggaatcactgagacgatcttggtggaactggaaatcatgtctcccctggggatctctgtgtttcggtgtgtgcgcctcttaagaatcttcaaagtgaccaggcactggacttccctgagcaacttagtggcatccttattaaactccatgaagtccatcgcttcgctgttgcttctgctttttctcttcattatcatcttttccttgcttgggatgcagctgtttggcggcaagtttaattttgatgaaacgcaaaccaagcggagcacctttgacaatttccctcaagcacttctcacagtgttccagatcctgacaggcgaagactggaatgctgtgatgtacgatggcatcatggcttacgggggcccatcctcttcaggaatgatcgtctgcatctacttcatcatcctcttcatttgtggtaactatattctactgaatgtcttcttggccatcgctgtagacaatttggctgatgctgaaagtctgaacactgctcagaaagaagaagcggaagaaaaggagaggaaaaagattgccagaaaagagagcctagaaaataaaaagaacaacaaaccagaagtcaaccagatagccaacagtgacaacaaggttacaattgatgactatagagaagaggatgaagacaaggacccctatccgccttgcgatgtgccagtaggggaagaggaagaggaagaggaggaggatgaacctgaggttcctgccggaccccgtcctcgaaggatctcggagttgaacatgaaggaaaaaattgcccccatccctgaagggagcgctttcttcattcttagcaagaccaacccgatccgcgtaggctgccacaagctcatcaaccaccacatcttcaccaacctcatccttgtcttcatcatgctgagcagcgctgccctggccgcagaggaccccatccgcagccactccttccggaacacgatactgggttactttgactatgccttcacagccatctttactgttgagatcctgttgaagatgacaacttttggagctttcctccacaaaggggccttctgcaggaactacttcaatttgctggatatgctggtggttggggtgtctctggtgtcatttgggattcaatccagtgccatctccgttgtgaagattctgagggtcttaagggtcctgcgtcccctcagggccatcaacagagcaaaaggacttaagcacgtggtccagtgcgtcttcgtggccatccggaccatcggcaacatcatgatcgtcaccaccctcctgcagttcatgtttgcctgtatcggggtccagttgttcaaggggaagttctatcgctgtacggatgaagccaaaagtaaccctgaagaatgcaggggacttttcatcctctacaaggatggggatgttgacagtcctgtggtccgtgaacggatctggcaaaacagtgatttcaacttcgacaacgtcctctctgctatgatggcgctcttcacagtctccacgtttgagggctggcctgcgttgctgtataaagccatcgactcgaatggagagaacatcggcccaatctacaaccaccgcgtggagatctccatcttcttcatcatctacatcatcattgtagctttcttcatgatgaacatctttgtgggctttgtcatcgttacatttcaggaacaaggagaaaaagagtataagaactgtgagctggacaaaaatcagcgtcagtgtgttgaatacgccttgaaagcacgtcccttgcggagatacatccccaaaaacccctaccagtacaagttctggtacgtggtgaactcttcgcctttcgaatacatgatgtttgtcctcatcatgctcaacacactctgcttggccatgcagcactacgagcagtccaagatgttcaatgatgccatggacattctgaacatggtcttcaccggggtgttcaccgtcgagatggttttgaaagtcatcgcatttaagcctaaggggtattttagtgacgcctggaacacgtttgactccctcatcgtaatcggcagcattatagacgtggccctcagcgaagcagacccaactgaaagtgaaaatgtccctgtcccaactgctacacctgggaactctgaagagagcaatagaatctccatcacctttttccgtcttttccgagtgatgcgattggtgaagcttctcagcaggggggaaggcatccggacattgctgtggacttttattaagtcctttcaggcgctcccgtatgtggccctcctcatagccatgctgttcttcatctatgcggtcattggcatgcagatgtttgggaaagttgccatgagagataacaaccagatcaataggaacaataacttccagacgtttccccaggcggtgctgctgctcttcaggtgtgcaacaggtgaggcctggcaggagatcatgctggcctgtctcccagggaagctctgtgaccctgagtcagattacaaccccggggaggagtatacatgtgggagcaactttgccattgtctatttcatcagtttttacatgctctgtgcatttctgatcatcaatctgtttgtggctgtcatcatggataatttcgactatctgacccgggactggtctattttggggcctcaccatttagatgaattcaaaagaatatggtcagaatatgaccctgaggcaaagggaaggataaaacaccttgatgtggtcactctgcttcgacgcatccagcctcccctggggtttgggaagttatgtccacacagggtagcgtgcaagagattagttgccatgaacatgcctctcaacagtgacgggacagtcatgtttaatgcaaccctgtttgctttggttcgaacggctcttaagatcaagaccgaagggaacctggagcaagctaatgaagaacttcgggctgtgataaagaaaatttggaagaaaaccagcatgaaattacttgaccaagttgtccctccagctggtgatgatgaggtaaccgtggggaagttctatgccactttcctgatacaggactactttaggaaattcaagaaacggaaagaacaaggactggtgggaaagtaccctgcgaagaacaccacaattgccctacaggcgggattaaggacactgcatgacattgggccagaaatccggcgtgctatatcgtgtgatttgcaagatgacgagcctgaggaaacaaaacgagaagaagaagatgatgtgttcaaaagaaatggtgccctgcttggaaaccatgtcaatcatgttaatagtgataggagagattcccttcagcagaccaataccacccaccgtcccctgcatgtccaaaggccttcaattccacctgcaagtgatactgagaaaccgctgtttcctccagcaggaaattcggtgtgtcataaccatcataaccataattccataggaaagcaagttcccacctcaacaaatgccaatctcaataatgccaatatgtccaaagctgcccatggaaagcggcccagcattgggaaccttgagcatgtgtctgaaaatgggcatcattcttcccacaagcatgaccgggagcctcagagaaggtccagtgtgaaaagaacccgctattatgaaacttacattaggtccgactcaggagatgaacagctcccaactatttgccgggaagacccagagatacatggctatttcagggacccccactgcttgggggagcaggagtatttcagtagtgaggaatgctacgaggatgacagctcgcccacctggagcaggcaaaactatggctactacagcagatacccaggcagaaacatcgactctgagaggccccgaggctaccatcatccccaaggattcttggaggacgatgactcgcccgtttgctatgattcacggagatctccaaggagacgcctactacctcccaccccagcatcccaccggagatcctccttcaactttgagtgcctgcgccggcagagcagccaggaagaggtcccgtcgtctcccatcttcccccatcgcacggccctgcctctgcatctaatgcagcaacagatcatggcagttgccggcctagattcaagtaaagcccagaagtactcaccgagtcactcgacccggtcgtgggccacccctccagcaacccctccctaccgggactggacaccgtgctacacccccctgatccaagtggagcagtcagaggccctggaccaggtgaacggcagcctgccgtccctgcaccgcagctcctggtacacagacgagcccgacatctcctaccggactttcacaccagccagcctgactgtccccagcagcttccggaacaaaaacagcgacaagcagaggagtgcggacagcttggtggaggcagtcctgatatccgaaggcttgggacgctatgcaagggacccaaaatttgtgtcagcaacaaaacacgaaatcgctgatgcctgtgacctcaccatcgacgagatggagagtgcagccagcaccctgcttaatgggaacgtgcgtccccgagccaacggggatgtgggccccctctcacaccggcaggactatgagctacaggactttggtcctggctacagcgacgaagagccagaccctgggagggatgaggaggacctggcggatgaaatgatatgcatcaccaccttgtagcccccagcgaggggcagactggctctggcctcaggtggggcgcaggagagccaggggaaaagtgcctcatagttaggaaagtttaggcactagttgggagtaatattcaattaattagacttttgtataagagatgtcatgcctcaagaaagccataaacctggtaggaacaggtcccaagcggttgagcctggcagagtaccatgcgctcggccccagctgcaggaaacagcaggccccgccctctcacagaggatgggtgaggaggccagacctgccctgccccattgtccagatgggcactgctgtggagtctgcttctcccatgtaccagggcaccaggcccacccaactgaaggcatggcggcggggtgcaggggaaagttaaaggtgatgacgatcatcacacctgtgtcgttacctcagccatcggtctagcatatcagtcactgggcccaacatatccatttttaaaccctttcccccaaatacactgcgtcctggttcctgtttagctgttctgaaatacggtgtgtaagtaagtcagaacccagctaccagtgattattgcgagggcaatgggacctcataaataaggttttctgtgatgtgacgccagtttacataagagaatatcactccgatggtcggtttctgactgtcacgctaagggcaactgtaaactggaataataatgcactcgcaaccaggtaaacttagatacactagtttgtttaaaattatagatttactgtacatgacttgtaatatactataatttgtatttgtaaagagatggtctatattttgtaattactgtattgtatttgaactgcagcaatatccatgggtcctaataattgtagttccccactaaaatctagaaattattagtatttttactcgggctatccagaagtagaagaaatagagccaattctcatttattcagcgaaaatcctctggggttaaaattttaagtttgaaagaacttgacactacagaaatttttctaaaatattttgagtcactataaacctatcatctttccacaagatataccagatgactatttgcagtcttttctttgggcaagagttccatgattttgatactgtacctttggatccaccatgggttgcaactgtctttggttttgtttgtttgacttgaaccaccctctggtaagtaagtgaattacagagcaggtccagctggctgctctgccccttgggtatccatagttacggttttctctgtggcccacccagggtgttttttgcatcgctggtgcagaaatgcataggtggatgagatatagctgctcttgtcctctggggactggtggtgctgcttaagaaataaggggtgctggggacagaggagcaacgtggtgatctataggattggagtgtcggggtctgtacaaatcgtattgttgccttttacaaaactgctgtactgtatgttctctttgagggcttttgtatgcaattgaatgagggctgaagaagttttcattagaatgcactcacactctgactgtacgtcctgatgaaaacccacttttggataattagaaccgtcaaggcttcattttctgtcaacagaattaggccgactgtcaagttaccttggcagggattccctgcaatcaaaaagatagatgataggtagcaattttggtccaaaatttttaatagtatacagacaacctgttaattttttttttttttttttttgtaaataacaaacaccactttgttatgaagaccttacaaacctcttcttaagacattcttactctgatccaggcaaaaacacttcaaggtttgtaaatgactctttcctgacataaatccttttttattaaaatgcaaaatgttcttcagaataaaactgtgtaataatttttatacttgggagtgctccttgcacagagctgtcatttgccagtgagagcctccgacggggcaggtactgtgccagggcagctctgaaattatggatattcttatcctcctggttccttcggtgccaatggtaacctaataccagccgcagggagcgccatttctcctaaagggctacaccactgtcaacattatcctggactctgtgtctctctctgttgggtcttgtggcatcacatcaggccaaaattgccagaccaggaccctaagtgtctgatagaggcgatgatcttttccaaagtcagtacttacaaactggcattcttacaggctgcaccatttcctagtatgtctgctttaagcctggttcaacctctcatcgaatattaaatttttctttgtaagaaaaa

SEQ ID NO: 707 - DNA, 9458 bp, Homo sapiens
gggcgagcgcctccgtccccggatgtgagctccggctgcccgcggtcccgagccagcggcggcgcgggcggcggcggcgggcaccgggcaccgcggcgggcgggcagacgggcgggcatggggggagcgccgagcggccccggcggccgggccggcatcaccgcggcgtctctccgctagaggaggggacaagccagttctcctttgcagcaaaaaattacatgtatatattattaagataatatatacattggattttatttttttaaaaagtttattttgctccatttttgaaaaagagagagcttgggtggcgagcggttttttttttaaatcaattatccttattttctgttatttgtccccgtccctccccacccccctgctgaagcgagaataagggcagggaccgcggctcctacctcttggtgatccccttccccattccgcccccgcctcaacgcccagcacagtgccctgcacacagtagtcgctcaataaatgttcgtggatgatgatgatgatgatgatgaaaaaaatgcagcatcaacggcagcagcaagcggaccacgcgaacgaggcaaactatgcaagaggcaccagacttcctctttctggtgaaggaccaacttctcagccgaatagctccaagcaaactgtcctgtcttggcaagctgcaatcgatgctgctagacaggccaaggctgcccaaactatgagcacctctgcacccccacctgtaggatctctctcccaaagaaaacgtcagcaatacgccaagagcaaaaaacagggtaactcgtccaacagccgacctgcccgcgcccttttctgtttatcactcaataaccccatccgaagagcctgcattagtatagtggaatggaaaccatttgacatatttatattattggctatttttgccaattgtgtggccttagctatttacatcccattccctgaagatgattctaattcaacaaatcataacttggaaaaagtagaatatgccttcctgattatttttacagtcgagacatttttgaagattatagcgtatggattattgctacatcctaatgcttatgttaggaatggatggaatttactggattttgttatagtaatagtaggattgtttagtgtaattttggaacaattaaccaaagaaacagaaggcgggaaccactcaagcggcaaatctggaggctttgatgtcaaagccctccgtgcctttcgagtgttgcgaccacttcgactagtgtcaggagtgcccagtttacaagttgtcctgaactccattataaaagccatggttcccctccttcacatagcccttttggtattatttgtaatcataatctatgctattataggattggaactttttattggaaaaatgcacaaaacatgtttttttgctgactcagatatcgtagctgaagaggacccagctccatgtgcgttctcagggaatggacgccagtgtactgccaatggcacggaatgtaggagtggctgggttggcccgaacggaggcatcaccaactttgataactttgcctttgccatgcttactgtgtttcagtgcatcaccatggagggctggacagacgtgctctactgggtaaatgatgcgataggatgggaatggccatgggtgtattttgttagtctgatcatccttggctcatttttcgtccttaacctggttcttggtgtccttagtggagaattctcaaaggaaagagagaaggcaaaagcacggggagatttccagaagctccgggagaagcagcagctggaggaggatctaaagggctacttggattggatcacccaagctgaggacatcgatccggagaatgaggaagaaggaggagaggaaggcaaacgaaatactagcatgcccaccagcgagactgagtctgtgaacacagagaacgtcagcggtgaaggcgagaaccgaggctgctgtggaagtctctggtgctggtggagacggagaggcgcggccaaggcggggccctctgggtgtcggcggtggggtcaagccatctcaaaatccaaactcagccgacgctggcgtcgctggaaccgattcaatcgcagaagatgtagggccgccgtgaagtctgtcacgttttactggctggttatcgtcctggtgtttctgaacaccttaaccatttcctctgagcactacaatcagccagattggttgacacagattcaagatattgccaacaaagtcctcttggctctgttcacctgcgagatgctggtaaaaatgtacagcttgggcctccaagcatatttcgtctctcttttcaaccggtttgattgcttcgtggtgtgtggtggaatcactgagacgatcttggtggaactggaaatcatgtctcccctggggatctctgtgtttcggtgtgtgcgcctcttaagaatcttcaaagtgaccaggcactggacttccctgagcaacttagtggcatccttattaaactccatgaagtccatcgcttcgctgttgcttctgctttttctcttcattatcatcttttccttgcttgggatgcagctgtttggcggcaagtttaattttgatgaaacgcaaaccaagcggagcacctttgacaatttccctcaagcacttctcacagtgttccagatcctgacaggcgaagactggaatgctgtgatgtacgatggcatcatggcttacgggggcccatcctcttcaggaatgatcgtctgcatctacttcatcatcctcttcatttgtggtaactatattctactgaatgtcttcttggccatcgctgtagacaatttggctgatgctgaaagtctgaacactgctcagaaagaagaagcggaagaaaaggagaggaaaaagattgccagaaaagagagcctagaaaataaaaagaacaacaaaccagaagtcaaccagatagccaacagtgacaacaaggttacaattgatgactatagagaagaggatgaagacaaggacccctatccgccttgcgatgtgccagtaggggaagaggaagaggaagaggaggaggatgaacctgaggttcctgccggaccccgtcctcgaaggatctcggagttgaacatgaaggaaaaaattgcccccatccctgaagggagcgctttcttcattcttagcaagaccaacccgatccgcgtaggctgccacaagctcatcaaccaccacatcttcaccaacctcatccttgtcttcatcatgctgagcagcgctgccctggccgcagaggaccccatccgcagccactccttccggaacacgatactgggttactttgactatgccttcacagccatctttactgttgagatcctgttgaagatgacaacttttggagctttcctccacaaaggggccttctgcaggaactacttcaatttgctggatatgctggtggttggggtgtctctggtgtcatttgggattcaatccagtgccatctccgttgtgaagattctgagggtcttaagggtcctgcgtcccctcagggccatcaacagagcaaaaggacttaagcacgtggtccagtgcgtcttcgtggccatccggaccatcggcaacatcatgatcgtcaccaccctcctgcagttcatgtttgcctgtatcggggtccagttgttcaaggggaagttctatcgctgtacggatgaagccaaaagtaaccctgaagaatgcaggggacttttcatcctctacaaggatggggatgttgacagtcctgtggtccgtgaacggatctggcaaaacagtgatttcaacttcgacaacgtcctctctgctatgatggcgctcttcacagtctccacgtttgagggctggcctgcgttgctgtataaagccatcgactcgaatggagagaacatcggcccaatctacaaccaccgcgtggagatctccatcttcttcatcatctacatcatcattgtagctttcttcatgatgaacatctttgtgggctttgtcatcgttacatttcaggaacaaggagaaaaagagtataagaactgtgagctggacaaaaatcagcgtcagtgtgttgaatacgccttgaaagcacgtcccttgcggagatacatccccaaaaacccctaccagtacaagttctggtacgtggtgaactcttcgcctttcgaatacatgatgtttgtcctcatcatgctcaacacactctgcttggccatgcagcactacgagcagtccaagatgttcaatgatgccatggacattctgaacatggtcttcaccggggtgttcaccgtcgagatggttttgaaagtcatcgcatttaagcctaaggggtattttagtgacgcctggaacacgtttgactccctcatcgtaatcggcagcattatagacgtggccctcagcgaagcagacccaactgaaagtgaaaatgtccctgtcccaactgctacacctgggaactctgaagagagcaatagaatctccatcacctttttccgtcttttccgagtgatgcgattggtgaagcttctcagcaggggggaaggcatccggacattgctgtggacttttattaagtcctttcaggcgctcccgtatgtggccctcctcatagccatgctgttcttcatctatgcggtcattggcatgcagatgtttgggaaagttgccatgagagataacaaccagatcaataggaacaataacttccagacgtttccccaggcggtgctgctgctcttcaggtgtgcaacaggtgaggcctggcaggagatcatgctggcctgtctcccagggaagctctgtgaccctgagtcagattacaaccccggggaggagtatacatgtgggagcaactttgccattgtctatttcatcagtttttacatgctctgtgcatttctgatcatcaatctgtttgtggctgtcatcatggataatttcgactatctgacccgggactggtctattttggggcctcaccatttagatgaattcaaaagaatatggtcagaatatgaccctgaggcaaagggaaggataaaacaccttgatgtggtcactctgcttcgacgcatccagcctcccctggggtttgggaagttatgtccacacagggtagcgtgcaagagattagttgccatgaacatgcctctcaacagtgacgggacagtcatgtttaatgcaaccctgtttgctttggttcgaacggctcttaagatcaagaccgaagggaacctggagcaagctaatgaagaacttcgggctgtgataaagaaaatttggaagaaaaccagcatgaaattacttgaccaagttgtccctccagctggtgatgatgaggtaaccgtggggaagttctatgccactttcctgatacaggactactttaggaaattcaagaaacggaaagaacaaggactggtgggaaagtaccctgcgaagaacaccacaattgccctacaggcgggattaaggacactgcatgacattgggccagaaatccggcgtgctatatcgtgtgatttgcaagatgacgagcctgaggaaacaaaacgagaagaagaagatgatgtgttcaaaagaaatggtgccctgcttggaaaccatgtcaatcatgttaatagtgataggagagattcccttcagcagaccaataccacccaccgtcccctgcatgtccaaaggccttcaattccacctgcaagtgatactgagaaaccgctgtttcctccagcaggaaattcggtgtgtcataaccatcataaccataattccataggaaagcaagttcccacctcaacaaatgccaatctcaataatgccaatatgtccaaagctgcccatggaaagcggcccagcattgggaaccttgagcatgtgtctgaaaatgggcatcattcttcccacaagcatgaccgggagcctcagagaaggtccagtgtgaaaagaacccgctattatgaaacttacattaggtccgactcaggagatgaacagctcccaactatttgccgggaagacccagagatacatggctatttcagggacccccactgcttgggggagcaggagtatttcagtagtgaggaatgctacgaggatgacagctcgcccacctggagcaggcaaaactatggctactacagcagatacccaggcagaaacatcgactctgagaggccccgaggctaccatcatccccaaggattcttggaggacgatgactcgcccgtttgctatgattcacggagatctccaaggagacgcctactacctcccaccccagcatcccaccggagatcctccttcaactttgagtgcctgcgccggcagagcagccaggaagaggtcccgtcgtctcccatcttcccccatcgcacggccctgcctctgcatctaatgcagcaacagatcatggcagttgccggcctagattcaagtaaagcccagaagtactcaccgagtcactcgacccggtcgtgggccacccctccagcaacccctccctaccgggactggacaccgtgctacacccccctgatccaagtggagcagtcagaggccctggaccaggtgaacggcagcctgccgtccctgcaccgcagctcctggtacacagacgagcccgacatctcctaccggactttcacaccagccagcctgactgtccccagcagcttccggaacaaaaacagcgacaagcagaggagtgcggacagcttggtggaggcagtcctgatatccgaaggcttgggacgctatgcaagggacccaaaatttgtgtcagcaacaaaacacgaaatcgctgatgcctgtgacctcaccatcgacgagatggagagtgcagccagcaccctgcttaatgggaacgtgcgtccccgagccaacggggatgtgggccccctctcacaccggcaggactatgagctacaggactttggtcctggctacagcgacgaagagccagaccctgggagggatgaggaggacctggcggatgaaatgatatgcatcaccaccttgtagcccccagcgaggggcagactggctctggcctcaggtggggcgcaggagagccaggggaaaagtgcctcatagttaggaaagtttaggcactagttgggagtaatattcaattaattagacttttgtataagagatgtcatgcctcaagaaagccataaacctggtaggaacaggtcccaagcggttgagcctggcagagtaccatgcgctcggccccagctgcaggaaacagcaggccccgccctctcacagaggatgggtgaggaggccagacctgccctgccccattgtccagatgggcactgctgtggagtctgcttctcccatgtaccagggcaccaggcccacccaactgaaggcatggcggcggggtgcaggggaaagttaaaggtgatgacgatcatcacacctgtgtcgttacctcagccatcggtctagcatatcagtcactgggcccaacatatccatttttaaaccctttcccccaaatacactgcgtcctggttcctgtttagctgttctgaaatacggtgtgtaagtaagtcagaacccagctaccagtgattattgcgagggcaatgggacctcataaataaggttttctgtgatgtgacgccagtttacataagagaatatcactccgatggtcggtttctgactgtcacgctaagggcaactgtaaactggaataataatgcactcgcaaccaggtaaacttagatacactagtttgtttaaaattatagatttactgtacatgacttgtaatatactataatttgtatttgtaaagagatggtctatattttgtaattactgtattgtatttgaactgcagcaatatccatgggtcctaataattgtagttccccactaaaatctagaaattattagtatttttactcgggctatccagaagtagaagaaatagagccaattctcatttattcagcgaaaatcctctggggttaaaattttaagtttgaaagaacttgacactacagaaatttttctaaaatattttgagtcactataaacctatcatctttccacaagatataccagatgactatttgcagtcttttctttgggcaagagttccatgattttgatactgtacctttggatccaccatgggttgcaactgtctttggttttgtttgtttgacttgaaccaccctctggtaagtaagtgaattacagagcaggtccagctggctgctctgccccttgggtatccatagttacggttttctctgtggcccacccagggtgttttttgcatcgctggtgcagaaatgcataggtggatgagatatagctgctcttgtcctctggggactggtggtgctgcttaagaaataaggggtgctggggacagaggagcaacgtggtgatctataggattggagtgtcggggtctgtacaaatcgtattgttgccttttacaaaactgctgtactgtatgttctctttgagggcttttgtatgcaattgaatgagggctgaagaagttttcattagaatgcactcacactctgactgtacgtcctgatgaaaacccacttttggataattagaaccgtcaaggcttcattttctgtcaacagaattaggccgactgtcaagttaccttggcagggattccctgcaatcaaaaagatagatgataggtagcaattttggtccaaaatttttaatagtatacagacaacctgttaattttttttttttttttttttgtaaataacaaacaccactttgttatgaagaccttacaaacctcttcttaagacattcttactctgatccaggcaaaaacacttcaaggtttgtaaatgactctttcctgacataaatccttttttattaaaatgcaaaatgttcttcagaataaaactgtgtaataatttttatacttgggagtgctccttgcacagagctgtcatttgccagtgagagcctccgacggggcaggtactgtgccagggcagctctgaaattatggatattcttatcctcctggttccttcggtgccaatggtaacctaataccagccgcagggagcgccatttctcctaaagggctacaccactgtcaacattatcctggactctgtgtctctctctgttgggtcttgtggcatcacatcaggccaaaattgccagaccaggaccctaagtgtctgatagaggcgatgatcttttccaaagtcagtacttacaaactggcattcttacaggctgcaccattctagtgcctggacccaagtcctgtccacatctgttcacccctcacagggggctcacccagcaccacaccataaaatgtcagctatttgccaaaaggatggcatcagctctgctctctaccagggccaattctgccactgcccatgcc

SEQ ID NO: 708 - DNA, 8114 bp, Homo sapiens
gggcgagcgcctccgtccccggatgtgagctccggctgcccgcggtcccgagccagcggcggcgcgggcggcggcggcgggcaccgggcaccgcggcgggcgggcagacgggcgggcatggggggagcgccgagcggccccggcggccgggccggcatcaccgcggcgtctctccgctagaggaggggacaagccagttctcctttgcagcaaaaaattacatgtatatattattaagataatatatacattggattttatttttttaaaaagtttattttgctccatttttgaaaaagagagagcttgggtggcgagcggttttttttttaaatcaattatccttattttctgttatttgtccccgtccctccccacccccctgctgaagcgagaataagggcagggaccgcggctcctacctcttggtgatccccttccccattccgcccccgcctcaacgcccagcacagtgccctgcacacagtagtcgctcaataaatgttcgtggatgatgatgatgatgatgatgaaaaaaatgcagcatcaacggcagcagcaagcggaccacgcgaacgaggcaaactatgcaagaggcaccagacttcctctttctggtgaaggaccaacttctcagccgaatagctccaagcaaactgtcctgtcttggcaagctgcaatcgatgctgctagacaggccaaggctgcccaaactatgagcacctctgcacccccacctgtaggatctctctcccaaagaaaacgtcagcaatacgccaagagcaaaaaacagggtaactcgtccaacagccgacctgcccgcgcccttttctgtttatcactcaataaccccatccgaagagcctgcattagtatagtggaatggaaaccatttgacatatttatattattggctatttttgccaattgtgtggccttagctatttacatcccattccctgaagatgattctaattcaacaaatcataacttggaaaaagtagaatatgccttcctgattatttttacagtcgagacatttttgaagattatagcgtatggattattgctacatcctaatgcttatgttaggaatggatggaatttactggattttgttatagtaatagtaggattgtttagtgtaattttggaacaattaaccaaagaaacagaaggcgggaaccactcaagcggcaaatctggaggctttgatgtcaaagccctccgtgcctttcgagtgttgcgaccacttcgactagtgtcaggagtgcccagtttacaagttgtcctgaactccattataaaagccatggttcccctccttcacatagcccttttggtattatttgtaatcataatctatgctattataggattggaactttttattggaaaaatgcacaaaacatgtttttttgctgactcagatatcgtagctgaagaggacccagctccatgtgcgttctcagggaatggacgccagtgtactgccaatggcacggaatgtaggagtggctgggttggcccgaacggaggcatcaccaactttgataactttgcctttgccatgcttactgtgtttcagtgcatcaccatggagggctggacagacgtgctctactgggtaaatgatgcgataggatgggaatggccatgggtgtattttgttagtctgatcatccttggctcatttttcgtccttaacctggttcttggtgtccttagtggagaattctcaaaggaaagagagaaggcaaaagcacggggagatttccagaagctccgggagaagcagcagctggaggaggatctaaagggctacttggattggatcacccaagctgaggacatcgatccggagaatgaggaagaaggaggagaggaaggcaaacgaaatactagcatgcccaccagcgagactgagtctgtgaacacagagaacgtcagcggtgaaggcgagaaccgaggctgctgtggaagtctctggtgctggtggagacggagaggcgcggccaaggcggggccctctgggtgtcggcggtggggtcaagccatctcaaaatccaaactcagccgacgctggcgtcgctggaaccgattcaatcgcagaagatgtagggccgccgtgaagtctgtcacgttttactggctggttatcgtcctggtgtttctgaacaccttaaccatttcctctgagcactacaatcagccagattggttgacacagattcaagatattgccaacaaagtcctcttggctctgttcacctgcgagatgctggtaaaaatgtacagcttgggcctccaagcatatttcgtctctcttttcaaccggtttgattgcttcgtggtgtgtggtggaatcactgagacgatcttggtggaactggaaatcatgtctcccctggggatctctgtgtttcggtgtgtgcgcctcttaagaatcttcaaagtgaccaggcactggacttccctgagcaacttagtggcatccttattaaactccatgaagtccatcgcttcgctgttgcttctgctttttctcttcattatcatcttttccttgcttgggatgcagctgtttggcggcaagtttaattttgatgaaacgcaaaccaagcggagcacctttgacaatttccctcaagcacttctcacagtgttccagatcctgacaggcgaagactggaatgctgtgatgtacgatggcatcatggcttacgggggcccatcctcttcaggaatgatcgtctgcatctacttcatcatcctcttcatttgtggtaactatattctactgaatgtcttcttggccatcgctgtagacaatttggctgatgctgaaagtctgaacactgctcagaaagaagaagcggaagaaaaggagaggaaaaagattgccagaaaagagagcctagaaaataaaaagaacaacaaaccagaagtcaaccagatagccaacagtgacaacaaggttacaattgatgactatagagaagaggatgaagacaaggacccctatccgccttgcgatgtgccagtaggggaagaggaagaggaagaggaggaggatgaacctgaggttcctgccggaccccgtcctcgaaggatctcggagttgaacatgaaggaaaaaattgcccccatccctgaagggagcgctttcttcattcttagcaagaccaacccgatccgcgtaggctgccacaagctcatcaaccaccacatcttcaccaacctcatccttgtcttcatcatgctgagcagcgctgccctggccgcagaggaccccatccgcagccactccttccggaacacgatactgggttactttgactatgccttcacagccatctttactgttgagatcctgttgaagatgacaacttttggagctttcctccacaaaggggccttctgcaggaactacttcaatttgctggatatgctggtggttggggtgtctctggtgtcatttgggattcaatccagtgccatctccgttgtgaagattctgagggtcttaagggtcctgcgtcccctcagggccatcaacagagcaaaaggacttaagcacgtggtccagtgcgtcttcgtggccatccggaccatcggcaacatcatgatcgtcaccaccctcctgcagttcatgtttgcctgtatcggggtccagttgttcaaggggaagttctatcgctgtacggatgaagccaaaagtaaccctgaagaatgcaggggacttttcatcctctacaaggatggggatgttgacagtcctgtggtccgtgaacggatctggcaaaacagtgatttcaacttcgacaacgtcctctctgctatgatggcgctcttcacagtctccacgtttgagggctggcctgcgttgctgtataaagccatcgactcgaatggagagaacatcggcccaatctacaaccaccgcgtggagatctccatcttcttcatcatctacatcatcattgtagctttcttcatgatgaacatctttgtgggctttgtcatcgttacatttcaggaacaaggagaaaaagagtataagaactgtgagctggacaaaaatcagcgtcagtgtgttgaatacgccttgaaagcacgtcccttgcggagatacatccccaaaaacccctaccagtacaagttctggtacgtggtgaactcttcgcctttcgaatacatgatgtttgtcctcatcatgctcaacacactctgcttggccatgcagcactacgagcagtccaagatgttcaatgatgccatggacattctgaacatggtcttcaccggggtgttcaccgtcgagatggttttgaaagtcatcgcatttaagcctaaggggtattttagtgacgcctggaacacgtttgactccctcatcgtaatcggcagcattatagacgtggccctcagcgaagcagacccaactgaaagtgaaaatgtccctgtcccaactgctacacctgggaactctgaagagagcaatagaatctccatcacctttttccgtcttttccgagtgatgcgattggtgaagcttctcagcaggggggaaggcatccggacattgctgtggacttttattaagtcctttcaggcgctcccgtatgtggccctcctcatagccatgctgttcttcatctatgcggtcattggcatgcagatgtttgggaaagttgccatgagagataacaaccagatcaataggaacaataacttccagacgtttccccaggcggtgctgctgctcttcaggtgtgcaacaggtgaggcctggcaggagatcatgctggcctgtctcccagggaagctctgtgaccctgagtcagattacaaccccggggaggagtatacatgtgggagcaactttgccattgtctatttcatcagtttttacatgctctgtgcatttctgatcatcaatctgtttgtggctgtcatcatggataatttcgactatctgacccgggactggtctattttggggcctcaccatttagatgaattcaaaagaatatggtcagaatatgaccctgaggcaaagggaaggataaaacaccttgatgtggtcactctgcttcgacgcatccagcctcccctggggtttgggaagttatgtccacacagggtagcgtgcaagagattagttgccatgaacatgcctctcaacagtgacgggacagtcatgtttaatgcaaccctgtttgctttggttcgaacggctcttaagatcaagaccgaagggaacctggagcaagctaatgaagaacttcgggctgtgataaagaaaatttggaagaaaaccagcatgaaattacttgaccaagttgtccctccagctggtgatgatgaggtaaccgtggggaagttctatgccactttcctgatacaggactactttaggaaattcaagaaacggaaagaacaaggactggtgggaaagtaccctgcgaagaacaccacaattgccctacaggcgggattaaggacactgcatgacattgggccagaaatccggcgtgctatatcgtgtgatttgcaagatgacgagcctgaggaaacaaaacgagaagaagaagatgatgtgttcaaaagaaatggtgccctgcttggaaaccatgtcaatcatgttaatagtgataggagagattcccttcagcagaccaataccacccaccgtcccctgcatgtccaaaggccttcaattccacctgcaagtgatactgagaaaccgctgtttcctccagcaggaaattcggtgtgtcataaccatcataaccataattccataggaaagcaagttcccacctcaacaaatgccaatctcaataatgccaatatgtccaaagctgcccatggaaagcggcccagcattgggaaccttgagcatgtgtctgaaaatgggcatcattcttcccacaagcatgaccgggagcctcagagaaggtccagtgtgaaaagaacccgctattatgaaacttacattaggtccgactcaggagatgaacagctcccaactatttgccgggaagacccagagatacatggctatttcagggacccccactgcttgggggagcaggagtatttcagtagtgaggaatgctacgaggatgacagctcgcccacctggagcaggcaaaactatggctactacagcagatacccaggcagaaacatcgactctgagaggccccgaggctaccatcatccccaaggattcttggaggacgatgactcgcccgtttgctatgattcacggagatctccaaggagacgcctactacctcccaccccagcatcccaccggagatcctccttcaactttgagtgcctgcgccggcagagcagccaggaagaggtcccgtcgtctcccatcttcccccatcgcacggccctgcctctgcatctaatgcagcaacagatcatggcagttgccggcctagattcaagtaaagcccagaagtactcaccgagtcactcgacccggtcgtgggccacccctccagcaacccctccctaccgggactggacaccgtgctacacccccctgatccaagtggagcagtcagaggccctggaccaggtgaacggcagcctgccgtccctgcaccgcagctcctggtacacagacgagcccgacatctcctaccggactttcacaccagccagcctgactgtccccagcagcttccggaacaaaaacagcgacaagcagaggagtgcggacagcttggtggaggcagtcctgatatccgaaggcttgggacgctatgcaagggacccaaaatttgtgtcagcaacaaaacacgaaatcgctgatgcctgtgacctcaccatcgacgagatggagagtgcagccagcaccctgcttaatgggaacgtgcgtccccgagccaacggggatgtgggccccctctcacaccggcaggactatgagctacaggactttggtcctggctacagcgacgaagagccagaccctgggagggatgaggaggacctggcggatgaaatgatatgcatcaccaccttgtagcccccagcgaggggcagactggctctggcctcaggtggggcgcaggagagccaggggaaaagtgcctcatagttaggaaagtttaggcactagttgggagtaatattcaattaattagacttttgtataagagatgtcatgcctcaagaaagccataaacctggtaggaacaggtcccaagcggttgagcctggcagagtaccatgcgctcggccccagctgcaggaaacagcaggccccgccctctcacagaggatgggtgaggaggccagacctgccctgccccattgtccagatgggcactgctgtggagtctgcttctcccatgtaccagggcaccaggcccacccaactgaaggcatggcggcggggtgcaggggaaagttaaaggtgatgacgatcatcacacctgtgtcgttacctcagccatcggtctagcatatcagtcactgggcccaacatatccatttttaaaccctttcccccaaatacactgcgtcctggttcctgtttagctgttctgaaatacggtgtgtaagtaagtcagaacccagctaccagtgattattgcgagggcaatgggacctcataaataaggttttctgtgatgtgacgccagtttacataagagaatatcactccgatggtcggtttctgactgtcacgctaagggcaactgtaaactggaataataatgcactcgcaaccaggtaaacttagatacactagtttgtttaaaattatagatttactgtacatgacttgtaatatactataatttgtatttgtaaagagatggtctatattttgtaattactgtattgtatttgaactgcagcaatatccatgggtcctaataattgtagttccccactaaaatctagaaattattagtatttttactcgggctatccagaagtagaagaaatagagccaattctcatttattcagcgaaaatcctctggggttaaaattttaagtttgaaagaacttgacactacagaaatttttctaaaatattttgagtcactataaacctatcatctttccacaaga

SEQ ID NO: 709 - DNA, 7850 bp, Homo sapiens
gggcgagcgcctccgtccccggatgtgagctccggctgcccgcggtcccgagccagcggcggcgcgggcggcggcggcgggcaccgggcaccgcggcgggcgggcagacgggcgggcatggggggagcgccgagcggccccggcggccgggccggcatcaccgcggcgtctctccgctagaggaggggacaagccagttctcctttgcagcaaaaaattacatgtatatattattaagataatatatacattggattttatttttttaaaaagtttattttgctccatttttgaaaaagagagagcttgggtggcgagcggttttttttttaaatcaattatccttattttctgttatttgtccccgtccctccccacccccctgctgaagcgagaataagggcagggaccgcggctcctacctcttggtgatccccttccccattccgcccccgcctcaacgcccagcacagtgccctgcacacagtagtcgctcaataaatgttcgtggatgatgatgatgatgatgatgaaaaaaatgcagcatcaacggcagcagcaagcggaccacgcgaacgaggcaaactatgcaagaggcaccagacttcctctttctggtgaaggaccaacttctcagccgaatagctccaagcaaactgtcctgtcttggcaagctgcaatcgatgctgctagacaggccaaggctgcccaaactatgagcacctctgcacccccacctgtaggatctctctcccaaagaaaacgtcagcaatacgccaagagcaaaaaacagggtaactcgtccaacagccgacctgcccgcgcccttttctgtttatcactcaataaccccatccgaagagcctgcattagtatagtggaatggaaaccatttgacatatttatattattggctatttttgccaattgtgtggccttagctatttacatcccattccctgaagatgattctaattcaacaaatcataacttggaaaaagtagaatatgccttcctgattatttttacagtcgagacatttttgaagattatagcgtatggattattgctacatcctaatgcttatgttaggaatggatggaatttactggattttgttatagtaatagtaggattgtttagtgtaattttggaacaattaaccaaagaaacagaaggcgggaaccactcaagcggcaaatctggaggctttgatgtcaaagccctccgtgcctttcgagtgttgcgaccacttcgactagtgtcaggagtgcccagtttacaagttgtcctgaactccattataaaagccatggttcccctccttcacatagcccttttggtattatttgtaatcataatctatgctattataggattggaactttttattggaaaaatgcacaaaacatgtttttttgctgactcagatatcgtagctgaagaggacccagctccatgtgcgttctcagggaatggacgccagtgtactgccaatggcacggaatgtaggagtggctgggttggcccgaacggaggcatcaccaactttgataactttgcctttgccatgcttactgtgtttcagtgcatcaccatggagggctggacagacgtgctctactgggtaaatgatgcgataggatgggaatggccatgggtgtattttgttagtctgatcatccttggctcatttttcgtccttaacctggttcttggtgtccttagtggagaattctcaaaggaaagagagaaggcaaaagcacggggagatttccagaagctccgggagaagcagcagctggaggaggatctaaagggctacttggattggatcacccaagctgaggacatcgatccggagaatgaggaagaaggaggagaggaaggcaaacgaaatactagcatgcccaccagcgagactgagtctgtgaacacagagaacgtcagcggtgaaggcgagaaccgaggctgctgtggaagtctctggtgctggtggagacggagaggcgcggccaaggcggggccctctgggtgtcggcggtggggtcaagccatctcaaaatccaaactcagccgacgctggcgtcgctggaaccgattcaatcgcagaagatgtagggccgccgtgaagtctgtcacgttttactggctggttatcgtcctggtgtttctgaacaccttaaccatttcctctgagcactacaatcagccagattggttgacacagattcaagatattgccaacaaagtcctcttggctctgttcacctgcgagatgctggtaaaaatgtacagcttgggcctccaagcatatttcgtctctcttttcaaccggtttgattgcttcgtggtgtgtggtggaatcactgagacgatcttggtggaactggaaatcatgtctcccctggggatctctgtgtttcggtgtgtgcgcctcttaagaatcttcaaagtgaccaggcactggacttccctgagcaacttagtggcatccttattaaactccatgaagtccatcgcttcgctgttgcttctgctttttctcttcattatcatcttttccttgcttgggatgcagctgtttggcggcaagtttaattttgatgaaacgcaaaccaagcggagcacctttgacaatttccctcaagcacttctcacagtgttccagatcctgacaggcgaagactggaatgctgtgatgtacgatggcatcatggcttacgggggcccatcctcttcaggaatgatcgtctgcatctacttcatcatcctcttcatttgtggtaactatattctactgaatgtcttcttggccatcgctgtagacaatttggctgatgctgaaagtctgaacactgctcagaaagaagaagcggaagaaaaggagaggaaaaagattgccagaaaagagagcctagaaaataaaaagaacaacaaaccagaagtcaaccagatagccaacagtgacaacaaggttacaattgatgactatagagaagaggatgaagacaaggacccctatccgccttgcgatgtgccagtaggggaagaggaagaggaagaggaggaggatgaacctgaggttcctgccggaccccgtcctcgaaggatctcggagttgaacatgaaggaaaaaattgcccccatccctgaagggagcgctttcttcattcttagcaagaccaacccgatccgcgtaggctgccacaagctcatcaaccaccacatcttcaccaacctcatccttgtcttcatcatgctgagcagcgctgccctggccgcagaggaccccatccgcagccactccttccggaacacgatactgggttactttgactatgccttcacagccatctttactgttgagatcctgttgaagatgacaacttttggagctttcctccacaaaggggccttctgcaggaactacttcaatttgctggatatgctggtggttggggtgtctctggtgtcatttgggattcaatccagtgccatctccgttgtgaagattctgagggtcttaagggtcctgcgtcccctcagggccatcaacagagcaaaaggacttaagcacgtggtccagtgcgtcttcgtggccatccggaccatcggcaacatcatgatcgtcaccaccctcctgcagttcatgtttgcctgtatcggggtccagttgttcaaggggaagttctatcgctgtacggatgaagccaaaagtaaccctgaagaatgcaggggacttttcatcctctacaaggatggggatgttgacagtcctgtggtccgtgaacggatctggcaaaacagtgatttcaacttcgacaacgtcctctctgctatgatggcgctcttcacagtctccacgtttgagggctggcctgcgttgctgtataaagccatcgactcgaatggagagaacatcggcccaatctacaaccaccgcgtggagatctccatcttcttcatcatctacatcatcattgtagctttcttcatgatgaacatctttgtgggctttgtcatcgttacatttcaggaacaaggagaaaaagagtataagaactgtgagctggacaaaaatcagcgtcagtgtgttgaatacgccttgaaagcacgtcccttgcggagatacatccccaaaaacccctaccagtacaagttctggtacgtggtgaactcttcgcctttcgaatacatgatgtttgtcctcatcatgctcaacacactctgcttggccatgcagcactacgagcagtccaagatgttcaatgatgccatggacattctgaacatggtcttcaccggggtgttcaccgtcgagatggttttgaaagtcatcgcatttaagcctaaggggtattttagtgacgcctggaacacgtttgactccctcatcgtaatcggcagcattatagacgtggccctcagcgaagcagacccaactgaaagtgaaaatgtccctgtcccaactgctacacctgggaactctgaagagagcaatagaatctccatcacctttttccgtcttttccgagtgatgcgattggtgaagcttctcagcaggggggaaggcatccggacattgctgtggacttttattaagtcctttcaggcgctcccgtatgtggccctcctcatagccatgctgttcttcatctatgcggtcattggcatgcagatgtttgggaaagttgccatgagagataacaaccagatcaataggaacaataacttccagacgtttccccaggcggtgctgctgctcttcaggtgtgcaacaggtgaggcctggcaggagatcatgctggcctgtctcccagggaagctctgtgaccctgagtcagattacaaccccggggaggagtatacatgtgggagcaactttgccattgtctatttcatcagtttttacatgctctgtgcatttctgatcatcaatctgtttgtggctgtcatcatggataatttcgactatctgacccgggactggtctattttggggcctcaccatttagatgaattcaaaagaatatggtcagaatatgaccctgaggcaaagggaaggataaaacaccttgatgtggtcactctgcttcgacgcatccagcctcccctggggtttgggaagttatgtccacacagggtagcgtgcaagagattagttgccatgaacatgcctctcaacagtgacgggacagtcatgtttaatgcaaccctgtttgctttggttcgaacggctcttaagatcaagaccgaagggaacctggagcaagctaatgaagaacttcgggctgtgataaagaaaatttggaagaaaaccagcatgaaattacttgaccaagttgtccctccagctggtgatgatgaggtaaccgtggggaagttctatgccactttcctgatacaggactactttaggaaattcaagaaacggaaagaacaaggactggtgggaaagtaccctgcgaagaacaccacaattgccctacaggcgggattaaggacactgcatgacattgggccagaaatccggcgtgctatatcgtgtgatttgcaagatgacgagcctgaggaaacaaaacgagaagaagaagatgatgtgttcaaaagaaatggtgccctgcttggaaaccatgtcaatcatgttaatagtgataggagagattcccttcagcagaccaataccacccaccgtcccctgcatgtccaaaggccttcaattccacctgcaagtgatactgagaaaccgctgtttcctccagcaggaaattcggtgtgtcataaccatcataaccataattccataggaaagcaagttcccacctcaacaaatgccaatctcaataatgccaatatgtccaaagctgcccatggaaagcggcccagcattgggaaccttgagcatgtgtctgaaaatgggcatcattcttcccacaagcatgaccgggagcctcagagaaggtccagtgtgaaaagaacccgctattatgaaacttacattaggtccgactcaggagatgaacagctcccaactatttgccgggaagacccagagatacatggctatttcagggacccccactgcttgggggagcaggagtatttcagtagtgaggaatgctacgaggatgacagctcgcccacctggagcaggcaaaactatggctactacagcagatacccaggcagaaacatcgactctgagaggccccgaggctaccatcatccccaaggattcttggaggacgatgactcgcccgtttgctatgattcacggagatctccaaggagacgcctactacctcccaccccagcatcccaccggagatcctccttcaactttgagtgcctgcgccggcagagcagccaggaagaggtcccgtcgtctcccatcttcccccatcgcacggccctgcctctgcatctaatgcagcaacagatcatggcagttgccggcctagattcaagtaaagcccagaagtactcaccgagtcactcgacccggtcgtgggccacccctccagcaacccctccctaccgggactggacaccgtgctacacccccctgatccaagtggagcagtcagaggccctggaccaggtgaacggcagcctgccgtccctgcaccgcagctcctggtacacagacgagcccgacatctcctaccggactttcacaccagccagcctgactgtccccagcagcttccggaacaaaaacagcgacaagcagaggagtgcggacagcttggtggaggcagtcctgatatccgaaggcttgggacgctatgcaagggacccaaaatttgtgtcagcaacaaaacacgaaatcgctgatgcctgtgacctcaccatcgacgagatggagagtgcagccagcaccctgcttaatgggaacgtgcgtccccgagccaacggggatgtgggccccctctcacaccggcaggactatgagctacaggactttggtcctggctacagcgacgaagagccagaccctgggagggatgaggaggacctggcggatgaaatgatatgcatcaccaccttgtagcccccagcgaggggcagactggctctggcctcaggtggggcgcaggagagccaggggaaaagtgcctcatagttaggaaagtttaggcactagttgggagtaatattcaattaattagacttttgtataagagatgtcatgcctcaagaaagccataaacctggtaggaacaggtcccaagcggttgagcctggcagagtaccatgcgctcggccccagctgcaggaaacagcaggccccgccctctcacagaggatgggtgaggaggccagacctgccctgccccattgtccagatgggcactgctgtggagtctgcttctcccatgtaccagggcaccaggcccacccaactgaaggcatggcggcggggtgcaggggaaagttaaaggtgatgacgatcatcacacctgtgtcgttacctcagccatcggtctagcatatcagtcactgggcccaacatatccatttttaaaccctttcccccaaatacactgcgtcctggttcctgtttagctgttctgaaatacggtgtgtaagtaagtcagaacccagctaccagtgattattgcgagggcaatgggacctcataaataaggttttctgtgatgtgacgccagtttacataagagaatatcactccgatggtcggtttctgactgtcacgctaagggcaactgtaaactggaataataatgcactcgcaaccaggtaaacttagatacactagtttgtttaaaattatagatttactgtacatgacttgtaatatactataatttgtatttgtaaag

SEQ ID NO: 710 - DNA, 9559 bp, Homo sapiens
gggcgagcgcctccgtccccggatgtgagctccggctgcccgcggtcccgagccagcggcggcgcgggcggcggcggcgggcaccgggcaccgcggcgggcgggcagacgggcgggcatggggggagcgccgagcggccccggcggccgggccggcatcaccgcggcgtctctccgctagaggaggggacaagccagttctcctttgcagcaaaaaattacatgtatatattattaagataatatatacattggattttatttttttaaaaagtttattttgctccatttttgaaaaagagagagcttgggtggcgagcggttttttttttaaatcaattatccttattttctgttatttgtccccgtccctccccacccccctgctgaagcgagaataagggcagggaccgcggctcctacctcttggtgatccccttccccattccgcccccgcctcaacgcccagcacagtgccctgcacacagtagtcgctcaataaatgttcgtggatgatgatgatgatgatgatgaaaaaaatgcagcatcaacggcagcagcaagcggaccacgcgaacgaggcaaactatgcaagaggcaccagacttcctctttctggtgaaggaccaacttctcagccgaatagctccaagcaaactgtcctgtcttggcaagctgcaatcgatgctgctagacaggccaaggctgcccaaactatgagcacctctgcacccccacctgtaggatctctctcccaaagaaaacgtcagcaatacgccaagagcaaaaaacagggtaactcgtccaacagccgacctgcccgcgcccttttctgtttatcactcaataaccccatccgaagagcctgcattagtatagtggaatggaaaccatttgacatatttatattattggctatttttgccaattgtgtggccttagctatttacatcccattccctgaagatgattctaattcaacaaatcataacttggaaaaagtagaatatgccttcctgattatttttacagtcgagacatttttgaagattatagcgtatggattattgctacatcctaatgcttatgttaggaatggatggaatttactggattttgttatagtaatagtaggattgtttagtgtaattttggaacaattaaccaaagaaacagaaggcgggaaccactcaagcggcaaatctggaggctttgatgtcaaagccctccgtgcctttcgagtgttgcgaccacttcgactagtgtcaggagtgcccagtttacaagttgtcctgaactccattataaaagccatggttcccctccttcacatagcccttttggtattatttgtaatcataatctatgctattataggattggaactttttattggaaaaatgcacaaaacatgtttttttgctgactcagatatcgtagctgaagaggacccagctccatgtgcgttctcagggaatggacgccagtgtactgccaatggcacggaatgtaggagtggctgggttggcccgaacggaggcatcaccaactttgataactttgcctttgccatgcttactgtgtttcagtgcatcaccatggagggctggacagacgtgctctactgggtaaatgatgcgataggatgggaatggccatgggtgtattttgttagtctgatcatccttggctcatttttcgtccttaacctggttcttggtgtccttagtggagaattctcaaaggaaagagagaaggcaaaagcacggggagatttccagaagctccgggagaagcagcagctggaggaggatctaaagggctacttggattggatcacccaagctgaggacatcgatccggagaatgaggaagaaggaggagaggaaggcaaacgaaatactagcatgcccaccagcgagactgagtctgtgaacacagagaacgtcagcggtgaaggcgagaaccgaggctgctgtggaagtctctggtgctggtggagacggagaggcgcggccaaggcggggccctctgggtgtcggcggtggggtcaagccatctcaaaatccaaactcagccgacgctggcgtcgctggaaccgattcaatcgcagaagatgtagggccgccgtgaagtctgtcacgttttactggctggttatcgtcctggtgtttctgaacaccttaaccatttcctctgagcactacaatcagccagattggttgacacagattcaagatattgccaacaaagtcctcttggctctgttcacctgcgagatgctggtaaaaatgtacagcttgggcctccaagcatatttcgtctctcttttcaaccggtttgattgcttcgtggtgtgtggtggaatcactgagacgatcttggtggaactggaaatcatgtctcccctggggatctctgtgtttcggtgtgtgcgcctcttaagaatcttcaaagtgaccaggcactggacttccctgagcaacttagtggcatccttattaaactccatgaagtccatcgcttcgctgttgcttctgctttttctcttcattatcatcttttccttgcttgggatgcagctgtttggcggcaagtttaattttgatgaaacgcaaaccaagcggagcacctttgacaatttccctcaagcacttctcacagtgttccagatcctgacaggcgaagactggaatgctgtgatgtacgatggcatcatggcttacgggggcccatcctcttcaggaatgatcgtctgcatctacttcatcatcctcttcatttgtggtaactatattctactgaatgtcttcttggccatcgctgtagacaatttggctgatgctgaaagtctgaacactgctcagaaagaagaagcggaagaaaaggagaggaaaaagattgccagaaaagagagcctagaaaataaaaagaacaacaaaccagaagtcaaccagatagccaacagtgacaacaaggttacaattgatgactatagagaagaggatgaagacaaggacccctatccgccttgcgatgtgccagtaggggaagaggaagaggaagaggaggaggatgaacctgaggttcctgccggaccccgtcctcgaaggatctcggagttgaacatgaaggaaaaaattgcccccatccctgaagggagcgctttcttcattcttagcaagaccaacccgatccgcgtaggctgccacaagctcatcaaccaccacatcttcaccaacctcatccttgtcttcatcatgctgagcagcgctgccctggccgcagaggaccccatccgcagccactccttccggaacacgatactgggttactttgactatgccttcacagccatctttactgttgagatcctgttgaagatgacaacttttggagctttcctccacaaaggggccttctgcaggaactacttcaatttgctggatatgctggtggttggggtgtctctggtgtcatttgggattcaatccagtgccatctccgttgtgaagattctgagggtcttaagggtcctgcgtcccctcagggccatcaacagagcaaaaggacttaagcacgtggtccagtgcgtcttcgtggccatccggaccatcggcaacatcatgatcgtcaccaccctcctgcagttcatgtttgcctgtatcggggtccagttgttcaaggggaagttctatcgctgtacggatgaagccaaaagtaaccctgaagaatgcaggggacttttcatcctctacaaggatggggatgttgacagtcctgtggtccgtgaacggatctggcaaaacagtgatttcaacttcgacaacgtcctctctgctatgatggcgctcttcacagtctccacgtttgagggctggcctgcgttgctgtataaagccatcgactcgaatggagagaacatcggcccaatctacaaccaccgcgtggagatctccatcttcttcatcatctacatcatcattgtagctttcttcatgatgaacatctttgtgggctttgtcatcgttacatttcaggaacaaggagaaaaagagtataagaactgtgagctggacaaaaatcagcgtcagtgtgttgaatacgccttgaaagcacgtcccttgcggagatacatccccaaaaacccctaccagtacaagttctggtacgtggtgaactcttcgcctttcgaatacatgatgtttgtcctcatcatgctcaacacactctgcttggccatgcagcactacgagcagtccaagatgttcaatgatgccatggacattctgaacatggtcttcaccggggtgttcaccgtcgagatggttttgaaagtcatcgcatttaagcctaaggggtattttagtgacgcctggaacacgtttgactccctcatcgtaatcggcagcattatagacgtggccctcagcgaagcagacccaactgaaagtgaaaatgtccctgtcccaactgctacacctgggaactctgaagagagcaatagaatctccatcacctttttccgtcttttccgagtgatgcgattggtgaagcttctcagcaggggggaaggcatccggacattgctgtggacttttattaagtcctttcaggcgctcccgtatgtggccctcctcatagccatgctgttcttcatctatgcggtcattggcatgcagatgtttgggaaagttgccatgagagataacaaccagatcaataggaacaataacttccagacgtttccccaggcggtgctgctgctcttcaggtgtgcaacaggtgaggcctggcaggagatcatgctggcctgtctcccagggaagctctgtgaccctgagtcagattacaaccccggggaggagtatacatgtgggagcaactttgccattgtctatttcatcagtttttacatgctctgtgcatttctgatcatcaatctgtttgtggctgtcatcatggataatttcgactatctgacccgggactggtctattttggggcctcaccatttagatgaattcaaaagaatatggtcagaatatgaccctgaggcaaagggaaggataaaacaccttgatgtggtcactctgcttcgacgcatccagcctcccctggggtttgggaagttatgtccacacagggtagcgtgcaagagattagttgccatgaacatgcctctcaacagtgacgggacagtcatgtttaatgcaaccctgtttgctttggttcgaacggctcttaagatcaagaccgaagggaacctggagcaagctaatgaagaacttcgggctgtgataaagaaaatttggaagaaaaccagcatgaaattacttgaccaagttgtccctccagctggtgatgatgaggtaaccgtggggaagttctatgccactttcctgatacaggactactttaggaaattcaagaaacggaaagaacaaggactggtgggaaagtaccctgcgaagaacaccacaattgccctacaggcgggattaaggacactgcatgacattgggccagaaatccggcgtgctatatcgtgtgatttgcaagatgacgagcctgaggaaacaaaacgagaagaagaagatgatgtgttcaaaagaaatggtgccctgcttggaaaccatgtcaatcatgttaatagtgataggagagattcccttcagcagaccaataccacccaccgtcccctgcatgtccaaaggccttcaattccacctgcaagtgatactgagaaaccgctgtttcctccagcaggaaattcggtgtgtcataaccatcataaccataattccataggaaagcaagttcccacctcaacaaatgccaatctcaataatgccaatatgtccaaagctgcccatggaaagcggcccagcattgggaaccttgagcatgtgtctgaaaatgggcatcattcttcccacaagcatgaccgggagcctcagagaaggtccagtgtgaaaagaacccgctattatgaaacttacattaggtccgactcaggagatgaacagctcccaactatttgccgggaagacccagagatacatggctatttcagggacccccactgcttgggggagcaggagtatttcagtagtgaggaatgctacgaggatgacagctcgcccacctggagcaggtgagctgctctggctcctgtggagagcgggaggccgccctgccctggtgctcggcccactccggaagccagggccaccggcagctgcacttgggcttcccctaaaaagcaaaatgggagcagaaactccaggccagagggagagtggagctggagaaagagagccgcagagaggcagggcaaaactatggctactacagcagatacccaggcagaaacatcgactctgagaggccccgaggctaccatcatccccaaggattcttggaggacgatgactcgcccgtttgctatgattcacggagatctccaaggagacgcctactacctcccaccccagcatcccaccggagatcctccttcaactttgagtgcctgcgccggcagagcagccaggaagaggtcccgtcgtctcccatcttcccccatcgcacggccctgcctctgcatctaatgcagcaacagatcatggcagttgccggcctagattcaagtaaagcccagaagtactcaccgagtcactcgacccggtcgtgggccacccctccagcaacccctccctaccgggactggacaccgtgctacacccccctgatccaagtggagcagtcagaggccctggaccaggtgaacggcagcctgccgtccctgcaccgcagctcctggtacacagacgagcccgacatctcctaccggactttcacaccagccagcctgactgtccccagcagcttccggaacaaaaacagcgacaagcagaggagtgcggacagcttggtggaggcagtcctgatatccgaaggcttgggacgctatgcaagggacccaaaatttgtgtcagcaacaaaacacgaaatcgctgatgcctgtgacctcaccatcgacgagatggagagtgcagccagcaccctgcttaatgggaacgtgcgtccccgagccaacggggatgtgggccccctctcacaccggcaggactatgagctacaggactttggtcctggctacagcgacgaagagccagaccctgggagggatgaggaggacctggcggatgaaatgatatgcatcaccaccttgtagcccccagcgaggggcagactggctctggcctcaggtggggcgcaggagagccaggggaaaagtgcctcatagttaggaaagtttaggcactagttgggagtaatattcaattaattagacttttgtataagagatgtcatgcctcaagaaagccataaacctggtaggaacaggtcccaagcggttgagcctggcagagtaccatgcgctcggccccagctgcaggaaacagcaggccccgccctctcacagaggatgggtgaggaggccagacctgccctgccccattgtccagatgggcactgctgtggagtctgcttctcccatgtaccagggcaccaggcccacccaactgaaggcatggcggcggggtgcaggggaaagttaaaggtgatgacgatcatcacacctgtgtcgttacctcagccatcggtctagcatatcagtcactgggcccaacatatccatttttaaaccctttcccccaaatacactgcgtcctggttcctgtttagctgttctgaaatacggtgtgtaagtaagtcagaacccagctaccagtgattattgcgagggcaatgggacctcataaataaggttttctgtgatgtgacgccagtttacataagagaatatcactccgatggtcggtttctgactgtcacgctaagggcaactgtaaactggaataataatgcactcgcaaccaggtaaacttagatacactagtttgtttaaaattatagatttactgtacatgacttgtaatatactataatttgtatttgtaaagagatggtctatattttgtaattactgtattgtatttgaactgcagcaatatccatgggtcctaataattgtagttccccactaaaatctagaaattattagtatttttactcgggctatccagaagtagaagaaatagagccaattctcatttattcagcgaaaatcctctggggttaaaattttaagtttgaaagaacttgacactacagaaatttttctaaaatattttgagtcactataaacctatcatctttccacaagatataccagatgactatttgcagtcttttctttgggcaagagttccatgattttgatactgtacctttggatccaccatgggttgcaactgtctttggttttgtttgtttgacttgaaccaccctctggtaagtaagtgaattacagagcaggtccagctggctgctctgccccttgggtatccatagttacggttttctctgtggcccacccagggtgttttttgcatcgctggtgcagaaatgcataggtggatgagatatagctgctcttgtcctctggggactggtggtgctgcttaagaaataaggggtgctggggacagaggagcaacgtggtgatctataggattggagtgtcggggtctgtacaaatcgtattgttgccttttacaaaactgctgtactgtatgttctctttgagggcttttgtatgcaattgaatgagggctgaagaagttttcattagaatgcactcacactctgactgtacgtcctgatgaaaacccacttttggataattagaaccgtcaaggcttcattttctgtcaacagaattaggccgactgtcaagttaccttggcagggattccctgcaatcaaaaagatagatgataggtagcaattttggtccaaaatttttaatagtatacagacaacctgttaattttttttttttttttttttgtaaataacaaacaccactttgttatgaagaccttacaaacctcttcttaagacattcttactctgatccaggcaaaaacacttcaaggtttgtaaatgactctttcctgacataaatccttttttattaaaatgcaaaatgttcttcagaataaaactgtgtaataatttttatacttgggagtgctccttgcacagagctgtcatttgccagtgagagcctccgacggggcaggtactgtgccagggcagctctgaaattatggatattcttatcctcctggttccttcggtgccaatggtaacctaataccagccgcagggagcgccatttctcctaaagggctacaccactgtcaacattatcctggactctgtgtctctctctgttgggtcttgtggcatcacatcaggccaaaattgccagaccaggaccctaagtgtctgatagaggcgatgatcttttccaaagtcagtacttacaaactggcattcttacaggctgcaccatttcctagtatgtctgctttaagcctggttcaacctctcatcgaatattaaatttttctttgtaagaaaaa

SEQ ID NO: 711 - DNA, 9353 bp, Homo sapiens
gggcgagcgcctccgtccccggatgtgagctccggctgcccgcggtcccgagccagcggcggcgcgggcggcggcggcgggcaccgggcaccgcggcgggcgggcagacgggcgggcatggggggagcgccgagcggccccggcggccgggccggcatcaccgcggcgtctctccgctagaggaggggacaagccagttctcctttgcagcaaaaaattacatgtatatattattaagataatatatacattggattttatttttttaaaaagtttattttgctccatttttgaaaaagagagagcttgggtggcgagcggttttttttttaaatcaattatccttattttctgttatttgtccccgtccctccccacccccctgctgaagcgagaataagggcagggaccgcggctcctacctcttggtgatccccttccccattccgcccccgcctcaacgcccagcacagtgccctgcacacagtagtcgctcaataaatgttcgtggatgatgatgatgatgatgatgaaaaaaatgcagcatcaacggcagcagcaagcggaccacgcgaacgaggcaaactatgcaagaggcaccagacttcctctttctggtgaaggaccaacttctcagccgaatagctccaagcaaactgtcctgtcttggcaagctgcaatcgatgctgctagacaggccaaggctgcccaaactatgagcacctctgcacccccacctgtaggatctctctcccaaagaaaacgtcagcaatacgccaagagcaaaaaacagggtaactcgtccaacagccgacctgcccgcgcccttttctgtttatcactcaataaccccatccgaagagcctgcattagtatagtggaatggaaaccatttgacatatttatattattggctatttttgccaattgtgtggccttagctatttacatcccattccctgaagatgattctaattcaacaaatcataacttggaaaaagtagaatatgccttcctgattatttttacagtcgagacatttttgaagattatagcgtatggattattgctacatcctaatgcttatgttaggaatggatggaatttactggattttgttatagtaatagtaggattgtttagtgtaattttggaacaattaaccaaagaaacagaaggcgggaaccactcaagcggcaaatctggaggctttgatgtcaaagccctccgtgcctttcgagtgttgcgaccacttcgactagtgtcaggagtgcccagtttacaagttgtcctgaactccattataaaagccatggttcccctccttcacatagcccttttggtattatttgtaatcataatctatgctattataggattggaactttttattggaaaaatgcacaaaacatgtttttttgctgactcagatatcgtagctgaagaggacccagctccatgtgcgttctcagggaatggacgccagtgtactgccaatggcacggaatgtaggagtggctgggttggcccgaacggaggcatcaccaactttgataactttgcctttgccatgcttactgtgtttcagtgcatcaccatggagggctggacagacgtgctctactgggtaaatgatgcgataggatgggaatggccatgggtgtattttgttagtctgatcatccttggctcatttttcgtccttaacctggttcttggtgtccttagtggagaattctcaaaggaaagagagaaggcaaaagcacggggagatttccagaagctccgggagaagcagcagctggaggaggatctaaagggctacttggattggatcacccaagctgaggacatcgatccggagaatgaggaagaaggaggagaggaaggcaaacgaaatactagcatgcccaccagcgagactgagtctgtgaacacagagaacgtcagcggtgaaggcgagaaccgaggctgctgtggaagtctctggtgctggtggagacggagaggcgcggccaaggcggggccctctgggtgtcggcggtggggtcaagccatctcaaaatccaaactcagccgacgctggcgtcgctggaaccgattcaatcgcagaagatgtagggccgccgtgaagtctgtcacgttttactggctggttatcgtcctggtgtttctgaacaccttaaccatttcctctgagcactacaatcagccagattggttgacacagattcaagatattgccaacaaagtcctcttggctctgttcacctgcgagatgctggtaaaaatgtacagcttgggcctccaagcatatttcgtctctcttttcaaccggtttgattgcttcgtggtgtgtggtggaatcactgagacgatcttggtggaactggaaatcatgtctcccctggggatctctgtgtttcggtgtgtgcgcctcttaagaatcttcaaagtgaccaggcactggacttccctgagcaacttagtggcatccttattaaactccatgaagtccatcgcttcgctgttgcttctgctttttctcttcattatcatcttttccttgcttgggatgcagctgtttggcggcaagtttaattttgatgaaacgcaaaccaagcggagcacctttgacaatttccctcaagcacttctcacagtgttccagatcctgacaggcgaagactggaatgctgtgatgtacgatggcatcatggcttacgggggcccatcctcttcaggaatgatcgtctgcatctacttcatcatcctcttcatttgtggtaactatattctactgaatgtcttcttggccatcgctgtagacaatttggctgatgctgaaagtctgaacactgctcagaaagaagaagcggaagaaaaggagaggaaaaagattgccagaaaagagagcctagaaaataaaaagaacaacaaaccagaagtcaaccagatagccaacagtgacaacaaggttacaattgatgactatagagaagaggatgaagacaaggacccctatccgccttgcgatgtgccagtaggggaagaggaagaggaagaggaggaggatgaacctgaggttcctgccggaccccgtcctcgaaggatctcggagttgaacatgaaggaaaaaattgcccccatccctgaagggagcgctttcttcattcttagcaagaccaacccgatccgcgtaggctgccacaagctcatcaaccaccacatcttcaccaacctcatccttgtcttcatcatgctgagcagcgctgccctggccgcagaggaccccatccgcagccactccttccggaacacgatactgggttactttgactatgccttcacagccatctttactgttgagatcctgttgaagatgacaacttttggagctttcctccacaaaggggccttctgcaggaactacttcaatttgctggatatgctggtggttggggtgtctctggtgtcatttgggattcaatccagtgccatctccgttgtgaagattctgagggtcttaagggtcctgcgtcccctcagggccatcaacagagcaaaaggacttaagcacgtggtccagtgcgtcttcgtggccatccggaccatcggcaacatcatgatcgtcaccaccctcctgcagttcatgtttgcctgtatcggggtccagttgttcaaggggaagttctatcgctgtacggatgaagccaaaagtaaccctgaagaatgcaggggacttttcatcctctacaaggatggggatgttgacagtcctgtggtccgtgaacggatctggcaaaacagtgatttcaacttcgacaacgtcctctctgctatgatggcgctcttcacagtctccacgtttgagggctggcctgcgttgctgtataaagccatcgactcgaatggagagaacatcggcccaatctacaaccaccgcgtggagatctccatcttcttcatcatctacatcatcattgtagctttcttcatgatgaacatctttgtgggctttgtcatcgttacatttcaggaacaaggagaaaaagagtataagaactgtgagctggacaaaaatcagcgtcagtgtgttgaatacgccttgaaagcacgtcccttgcggagatacatccccaaaaacccctaccagtacaagttctggtacgtggtgaactcttcgcctttcgaatacatgatgtttgtcctcatcatgctcaacacactctgcttggccatgcagcactacgagcagtccaagatgttcaatgatgccatggacattctgaacatggtcttcaccggggtgttcaccgtcgagatggttttgaaagtcatcgcatttaagcctaaggggtattttagtgacgcctggaacacgtttgactccctcatcgtaatcggcagcattatagacgtggccctcagcgaagcagacccaactgaaagtgaaaatgtccctgtcccaactgctacacctgggaactctgaagagagcaatagaatctccatcacctttttccgtcttttccgagtgatgcgattggtgaagcttctcagcaggggggaaggcatccggacattgctgtggacttttattaagtcctttcaggcgctcccgtatgtggccctcctcatagccatgctgttcttcatctatgcggtcattggcatgcagatgtttgggaaagttgccatgagagataacaaccagatcaataggaacaataacttccagacgtttccccaggcggtgctgctgctcttcaggtgtgcaacaggtgaggcctggcaggagatcatgctggcctgtctcccagggaagctctgtgaccctgagtcagattacaaccccggggaggagtatacatgtgggagcaactttgccattgtctatttcatcagtttttacatgctctgtgcatttctgatcatcaatctgtttgtggctgtcatcatggataatttcgactatctgacccgggactggtctattttggggcctcaccatttagatgaattcaaaagaatatggtcagaatatgaccctgaggcaaagggaaggataaaacaccttgatgtggtcactctgcttcgacgcatccagcctcccctggggtttgggaagttatgtccacacagggtagcgtgcaagagattagttgccatgaacatgcctctcaacagtgacgggacagtcatgtttaatgcaaccctgtttgctttggttcgaacggctcttaagatcaagaccgaagggaacctggagcaagctaatgaagaacttcgggctgtgataaagaaaatttggaagaaaaccagcatgaaattacttgaccaagttgtccctccagctggtgatgatgaggtaaccgtggggaagttctatgccactttcctgatacaggactactttaggaaattcaagaaacggaaagaacaaggactggtgggaaagtaccctgcgaagaacaccacaattgccctacaggcgggattaaggacactgcatgacattgggccagaaatccggcgtgctatatcgtgtgatttgcaagatgacgagcctgaggaaacaaaacgagaagaagaagatgatgtgttcaaaagaaatggtgccctgcttggaaaccatgtcaatcatgttaatagtgataggagagattcccttcagcagaccaataccacccaccgtcccctgcatgtccaaaggccttcaattccacctgcaagtgatactgagaaaccgctgtttcctccagcaggaaattcggtgtgtcataaccatcataaccataattccataggaaagcaagttcccacctcaacaaatgccaatctcaataatgccaatatgtccaaagctgcccatggaaagcggcccagcattgggaaccttgagcatgtgtctgaaaatgggcatcattcttcccacaagcatgaccgggagcctcagagaaggtccagtgtgaaaaggtccgactcaggagatgaacagctcccaactatttgccgggaagacccagagatacatggctatttcagggacccccactgcttgggggagcaggagtatttcagtagtgaggaatgctacgaggatgacagctcgcccacctggagcaggcaaaactatggctactacagcagatacccaggcagaaacatcgactctgagaggccccgaggctaccatcatccccaaggattcttggaggacgatgactcgcccgtttgctatgattcacggagatctccaaggagacgcctactacctcccaccccagcatcccaccggagatcctccttcaactttgagtgcctgcgccggcagagcagccaggaagaggtcccgtcgtctcccatcttcccccatcgcacggccctgcctctgcatctaatgcagcaacagatcatggcagttgccggcctagattcaagtaaagcccagaagtactcaccgagtcactcgacccggtcgtgggccacccctccagcaacccctccctaccgggactggacaccgtgctacacccccctgatccaagtggagcagtcagaggccctggaccaggtgaacggcagcctgccgtccctgcaccgcagctcctggtacacagacgagcccgacatctcctaccggactttcacaccagccagcctgactgtccccagcagcttccggaacaaaaacagcgacaagcagaggagtgcggacagcttggtggaggcagtcctgatatccgaaggcttgggacgctatgcaagggacccaaaatttgtgtcagcaacaaaacacgaaatcgctgatgcctgtgacctcaccatcgacgagatggagagtgcagccagcaccctgcttaatgggaacgtgcgtccccgagccaacggggatgtgggccccctctcacaccggcaggactatgagctacaggactttggtcctggctacagcgacgaagagccagaccctgggagggatgaggaggacctggcggatgaaatgatatgcatcaccaccttgtagcccccagcgaggggcagactggctctggcctcaggtggggcgcaggagagccaggggaaaagtgcctcatagttaggaaagtttaggcactagttgggagtaatattcaattaattagacttttgtataagagatgtcatgcctcaagaaagccataaacctggtaggaacaggtcccaagcggttgagcctggcagagtaccatgcgctcggccccagctgcaggaaacagcaggccccgccctctcacagaggatgggtgaggaggccagacctgccctgccccattgtccagatgggcactgctgtggagtctgcttctcccatgtaccagggcaccaggcccacccaactgaaggcatggcggcggggtgcaggggaaagttaaaggtgatgacgatcatcacacctgtgtcgttacctcagccatcggtctagcatatcagtcactgggcccaacatatccatttttaaaccctttcccccaaatacactgcgtcctggttcctgtttagctgttctgaaatacggtgtgtaagtaagtcagaacccagctaccagtgattattgcgagggcaatgggacctcataaataaggttttctgtgatgtgacgccagtttacataagagaatatcactccgatggtcggtttctgactgtcacgctaagggcaactgtaaactggaataataatgcactcgcaaccaggtaaacttagatacactagtttgtttaaaattatagatttactgtacatgacttgtaatatactataatttgtatttgtaaagagatggtctatattttgtaattactgtattgtatttgaactgcagcaatatccatgggtcctaataattgtagttccccactaaaatctagaaattattagtatttttactcgggctatccagaagtagaagaaatagagccaattctcatttattcagcgaaaatcctctggggttaaaattttaagtttgaaagaacttgacactacagaaatttttctaaaatattttgagtcactataaacctatcatctttccacaagatataccagatgactatttgcagtcttttctttgggcaagagttccatgattttgatactgtacctttggatccaccatgggttgcaactgtctttggttttgtttgtttgacttgaaccaccctctggtaagtaagtgaattacagagcaggtccagctggctgctctgccccttgggtatccatagttacggttttctctgtggcccacccagggtgttttttgcatcgctggtgcagaaatgcataggtggatgagatatagctgctcttgtcctctggggactggtggtgctgcttaagaaataaggggtgctggggacagaggagcaacgtggtgatctataggattggagtgtcggggtctgtacaaatcgtattgttgccttttacaaaactgctgtactgtatgttctctttgagggcttttgtatgcaattgaatgagggctgaagaagttttcattagaatgcactcacactctgactgtacgtcctgatgaaaacccacttttggataattagaaccgtcaaggcttcattttctgtcaacagaattaggccgactgtcaagttaccttggcagggattccctgcaatcaaaaagatagatgataggtagcaattttggtccaaaatttttaatagtatacagacaacctgttaattttttttttttttttttttgtaaataacaaacaccactttgttatgaagaccttacaaacctcttcttaagacattcttactctgatccaggcaaaaacacttcaaggtttgtaaatgactctttcctgacataaatccttttttattaaaatgcaaaatgttcttcagaataaaactgtgtaataatttttatacttgggagtgctccttgcacagagctgtcatttgccagtgagagcctccgacggggcaggtactgtgccagggcagctctgaaattatggatattcttatcctcctggttccttcggtgccaatggtaacctaataccagccgcagggagcgccatttctcctaaagggctacaccactgtcaacattatcctggactctgtgtctctctctgttgggtcttgtggcatcacatcaggccaaaattgccagaccaggaccctaagtgtctgatagaggcgatgatcttttccaaagtcagtacttacaaactggcattcttacaggctgcaccatttcctagtatgtctgctttaagcctggttcaacctctcatcgaatattaaatttttctttgtaagaaaaa

SEQ ID NO: 712 - DNA, 9320 bp, Homo sapiens
gggcgagcgcctccgtccccggatgtgagctccggctgcccgcggtcccgagccagcggcggcgcgggcggcggcggcgggcaccgggcaccgcggcgggcgggcagacgggcgggcatggggggagcgccgagcggccccggcggccgggccggcatcaccgcggcgtctctccgctagaggaggggacaagccagttctcctttgcagcaaaaaattacatgtatatattattaagataatatatacattggattttatttttttaaaaagtttattttgctccatttttgaaaaagagagagcttgggtggcgagcggttttttttttaaatcaattatccttattttctgttatttgtccccgtccctccccacccccctgctgaagcgagaataagggcagggaccgcggctcctacctcttggtgatccccttccccattccgcccccgcctcaacgcccagcacagtgccctgcacacagtagtcgctcaataaatgttcgtggatgatgatgatgatgatgatgaaaaaaatgcagcatcaacggcagcagcaagcggaccacgcgaacgaggcaaactatgcaagaggcaccagacttcctctttctggtgaaggaccaacttctcagccgaatagctccaagcaaactgtcctgtcttggcaagctgcaatcgatgctgctagacaggccaaggctgcccaaactatgagcacctctgcacccccacctgtaggatctctctcccaaagaaaacgtcagcaatacgccaagagcaaaaaacagggtaactcgtccaacagccgacctgcccgcgcccttttctgtttatcactcaataaccccatccgaagagcctgcattagtatagtggaatggaaaccatttgacatatttatattattggctatttttgccaattgtgtggccttagctatttacatcccattccctgaagatgattctaattcaacaaatcataacttggaaaaagtagaatatgccttcctgattatttttacagtcgagacatttttgaagattatagcgtatggattattgctacatcctaatgcttatgttaggaatggatggaatttactggattttgttatagtaatagtaggattgtttagtgtaattttggaacaattaaccaaagaaacagaaggcgggaaccactcaagcggcaaatctggaggctttgatgtcaaagccctccgtgcctttcgagtgttgcgaccacttcgactagtgtcaggagtgcccagtttacaagttgtcctgaactccattataaaagccatggttcccctccttcacatagcccttttggtattatttgtaatcataatctatgctattataggattggaactttttattggaaaaatgcacaaaacatgtttttttgctgactcagatatcgtagctgaagaggacccagctccatgtgcgttctcagggaatggacgccagtgtactgccaatggcacggaatgtaggagtggctgggttggcccgaacggaggcatcaccaactttgataactttgcctttgccatgcttactgtgtttcagtgcatcaccatggagggctggacagacgtgctctactggatgaatgatgctatgggatttgaattgccctgggtgtattttgtcagtctcgtcatctttgggtcatttttcgtactaaatcttgtacttggtgtattgagcggagaattctcaaaggaaagagagaaggcaaaagcacggggagatttccagaagctccgggagaagcagcagctggaggaggatctaaagggctacttggattggatcacccaagctgaggacatcgatccggagaatgaggaagaaggaggagaggaaggcaaacgaaatactagcatgcccaccagcgagactgagtctgtgaacacagagaacgtcagcggtgaaggcgagaaccgaggctgctgtggaagtctctgtcaagccatctcaaaatccaaactcagccgacgctggcgtcgctggaaccgattcaatcgcagaagatgtagggccgccgtgaagtctgtcacgttttactggctggttatcgtcctggtgtttctgaacaccttaaccatttcctctgagcactacaatcagccagattggttgacacagattcaagatattgccaacaaagtcctcttggctctgttcacctgcgagatgctggtaaaaatgtacagcttgggcctccaagcatatttcgtctctcttttcaaccggtttgattgcttcgtggtgtgtggtggaatcactgagacgatcttggtggaactggaaatcatgtctcccctggggatctctgtgtttcggtgtgtgcgcctcttaagaatcttcaaagtgaccaggcactggacttccctgagcaacttagtggcatccttattaaactccatgaagtccatcgcttcgctgttgcttctgctttttctcttcattatcatcttttccttgcttgggatgcagctgtttggcggcaagtttaattttgatgaaacgcaaaccaagcggagcacctttgacaatttccctcaagcacttctcacagtgttccagatcctgacaggcgaagactggaatgctgtgatgtacgatggcatcatggcttacgggggcccatcctcttcaggaatgatcgtctgcatctacttcatcatcctcttcatttgtggtaactatattctactgaatgtcttcttggccatcgctgtagacaatttggctgatgctgaaagtctgaacactgctcagaaagaagaagcggaagaaaaggagaggaaaaagattgccagaaaagagagcctagaaaataaaaagaacaacaaaccagaagtcaaccagatagccaacagtgacaacaaggttacaattgatgactatagagaagaggatgaagacaaggacccctatccgccttgcgatgtgccagtaggggaagaggaagaggaagaggaggaggatgaacctgaggttcctgccggaccccgtcctcgaaggatctcggagttgaacatgaaggaaaaaattgcccccatccctgaagggagcgctttcttcattcttagcaagaccaacccgatccgcgtaggctgccacaagctcatcaaccaccacatcttcaccaacctcatccttgtcttcatcatgctgagcagcgctgccctggccgcagaggaccccatccgcagccactccttccggaacacgatactgggttactttgactatgccttcacagccatctttactgttgagatcctgttgaagatgacaacttttggagctttcctccacaaaggggccttctgcaggaactacttcaatttgctggatatgctggtggttggggtgtctctggtgtcatttgggattcaatccagtgccatctccgttgtgaagattctgagggtcttaagggtcctgcgtcccctcagggccatcaacagagcaaaaggacttaagcacgtggtccagtgcgtcttcgtggccatccggaccatcggcaacatcatgatcgtcaccaccctcctgcagttcatgtttgcctgtatcggggtccagttgttcaaggggaagttctatcgctgtacggatgaagccaaaagtaaccctgaagaatgcaggggacttttcatcctctacaaggatggggatgttgacagtcctgtggtccgtgaacggatctggcaaaacagtgatttcaacttcgacaacgtcctctctgctatgatggcgctcttcacagtctccacgtttgagggctggcctgcgttgctgtataaagccatcgactcgaatggagagaacatcggcccaatctacaaccaccgcgtggagatctccatcttcttcatcatctacatcatcattgtagctttcttcatgatgaacatctttgtgggctttgtcatcgttacatttcaggaacaaggagaaaaagagtataagaactgtgagctggacaaaaatcagcgtcagtgtgttgaatacgccttgaaagcacgtcccttgcggagatacatccccaaaaacccctaccagtacaagttctggtacgtggtgaactcttcgcctttcgaatacatgatgtttgtcctcatcatgctcaacacactctgcttggccatgcagcactacgagcagtccaagatgttcaatgatgccatggacattctgaacatggtcttcaccggggtgttcaccgtcgagatggttttgaaagtcatcgcatttaagcctaaggggtattttagtgacgcctggaacacgtttgactccctcatcgtaatcggcagcattatagacgtggccctcagcgaagcagacccaactgaaagtgaaaatgtccctgtcccaactgctacacctgggaactctgaagagagcaatagaatctccatcacctttttccgtcttttccgagtgatgcgattggtgaagcttctcagcaggggggaaggcatccggacattgctgtggacttttattaagtcctttcaggcgctcccgtatgtggccctcctcatagccatgctgttcttcatctatgcggtcattggcatgcagatgtttgggaaagttgccatgagagataacaaccagatcaataggaacaataacttccagacgtttccccaggcggtgctgctgctcttcaggtgtgcaacaggtgaggcctggcaggagatcatgctggcctgtctcccagggaagctctgtgaccctgagtcagattacaaccccggggaggagtatacatgtgggagcaactttgccattgtctatttcatcagtttttacatgctctgtgcatttctgatcatcaatctgtttgtggctgtcatcatggataatttcgactatctgacccgggactggtctattttggggcctcaccatttagatgaattcaaaagaatatggtcagaatatgaccctgaggcaaagggaaggataaaacaccttgatgtggtcactctgcttcgacgcatccagcctcccctggggtttgggaagttatgtccacacagggtagcgtgcaagagattagttgccatgaacatgcctctcaacagtgacgggacagtcatgtttaatgcaaccctgtttgctttggttcgaacggctcttaagatcaagaccgaagggaacctggagcaagctaatgaagaacttcgggctgtgataaagaaaatttggaagaaaaccagcatgaaattacttgaccaagttgtccctccagctggtgatgatgaggtaaccgtggggaagttctatgccactttcctgatacaggactactttaggaaattcaagaaacggaaagaacaaggactggtgggaaagtaccctgcgaagaacaccacaattgccctacaggcgggattaaggacactgcatgacattgggccagaaatccggcgtgctatatcgtgtgatttgcaagatgacgagcctgaggaaacaaaacgagaagaagaagatgatgtgttcaaaagaaatggtgccctgcttggaaaccatgtcaatcatgttaatagtgataggagagattcccttcagcagaccaataccacccaccgtcccctgcatgtccaaaggccttcaattccacctgcaagtgatactgagaaaccgctgtttcctccagcaggaaattcggtgtgtcataaccatcataaccataattccataggaaagcaagttcccacctcaacaaatgccaatctcaataatgccaatatgtccaaagctgcccatggaaagcggcccagcattgggaaccttgagcatgtgtctgaaaatgggcatcattcttcccacaagcatgaccgggagcctcagagaaggtccagtgtgaaaagaacccgctattatgaaacttacattaggtccgactcaggagatgaacagctcccaactatttgccgggaagacccagagatacatggctatttcagggacccccactgcttgggggagcaggagtatttcagtagtgaggaatgctacgaggatgacagctcgcccacctggagcaggcaaaactatggctactacagcagatacccaggcagaaacatcgactctgagaggccccgaggctaccatcatccccaaggattcttggaggacgatgactcgcccgtttgctatgattcacggagatctccaaggagacgcctactacctcccaccccagcatcccaccggagatcctccttcaactttgagtgcctgcgccggcagagcagccaggaagaggtcccgtcgtctcccatcttcccccatcgcacggccctgcctctgcatctaatgcagcaacagatcatggcagttgccggcctagattcaagtaaagcccagaagtactcaccgagtcactcgacccggtcgtgggccacccctccagcaacccctccctaccgggactggacaccgtgctacacccccctgatccaagtggagcagtcagaggccctggaccaggtgaacggcagcctgccgtccctgcaccgcagctcctggtacacagacgagcccgacatctcctaccggactttcacaccagccagcctgactgtccccagcagcttccggaacaaaaacagcgacaagcagaggagtgcggacagcttggtggaggcagtcctgatatccgaaggcttgggacgctatgcaagggacccaaaatttgtgtcagcaacaaaacacgaaatcgctgatgcctgtgacctcaccatcgacgagatggagagtgcagccagcaccctgcttaatgggaacgtgcgtccccgagccaacggggatgtgggccccctctcacaccggcaggactatgagctacaggactttggtcctggctacagcgacgaagagccagaccctgggagggatgaggaggacctggcggatgaaatgatatgcatcaccaccttgtagcccccagcgaggggcagactggctctggcctcaggtggggcgcaggagagccaggggaaaagtgcctcatagttaggaaagtttaggcactagttgggagtaatattcaattaattagacttttgtataagagatgtcatgcctcaagaaagccataaacctggtaggaacaggtcccaagcggttgagcctggcagagtaccatgcgctcggccccagctgcaggaaacagcaggccccgccctctcacagaggatgggtgaggaggccagacctgccctgccccattgtccagatgggcactgctgtggagtctgcttctcccatgtaccagggcaccaggcccacccaactgaaggcatggcggcggggtgcaggggaaagttaaaggtgatgacgatcatcacacctgtgtcgttacctcagccatcggtctagcatatcagtcactgggcccaacatatccatttttaaaccctttcccccaaatacactgcgtcctggttcctgtttagctgttctgaaatacggtgtgtaagtaagtcagaacccagctaccagtgattattgcgagggcaatgggacctcataaataaggttttctgtgatgtgacgccagtttacataagagaatatcactccgatggtcggtttctgactgtcacgctaagggcaactgtaaactggaataataatgcactcgcaaccaggtaaacttagatacactagtttgtttaaaattatagatttactgtacatgacttgtaatatactataatttgtatttgtaaagagatggtctatattttgtaattactgtattgtatttgaactgcagcaatatccatgggtcctaataattgtagttccccactaaaatctagaaattattagtatttttactcgggctatccagaagtagaagaaatagagccaattctcatttattcagcgaaaatcctctggggttaaaattttaagtttgaaagaacttgacactacagaaatttttctaaaatattttgagtcactataaacctatcatctttccacaagatataccagatgactatttgcagtcttttctttgggcaagagttccatgattttgatactgtacctttggatccaccatgggttgcaactgtctttggttttgtttgtttgacttgaaccaccctctggtaagtaagtgaattacagagcaggtccagctggctgctctgccccttgggtatccatagttacggttttctctgtggcccacccagggtgttttttgcatcgctggtgcagaaatgcataggtggatgagatatagctgctcttgtcctctggggactggtggtgctgcttaagaaataaggggtgctggggacagaggagcaacgtggtgatctataggattggagtgtcggggtctgtacaaatcgtattgttgccttttacaaaactgctgtactgtatgttctctttgagggcttttgtatgcaattgaatgagggctgaagaagttttcattagaatgcactcacactctgactgtacgtcctgatgaaaacccacttttggataattagaaccgtcaaggcttcattttctgtcaacagaattaggccgactgtcaagttaccttggcagggattccctgcaatcaaaaagatagatgataggtagcaattttggtccaaaatttttaatagtatacagacaacctgttaattttttttttttttttttttgtaaataacaaacaccactttgttatgaagaccttacaaacctcttcttaagacattcttactctgatccaggcaaaaacacttcaaggtttgtaaatgactctttcctgacataaatccttttttattaaaatgcaaaatgttcttcagaataaaactgtgtaataatttttatacttgggagtgctccttgcacagagctgtcatttgccagtgagagcctccgacggggcaggtactgtgccagggcagctctgaaattatggatattcttatcctcctggttccttcggtgccaatggtaacctaataccagccgcagggagcgccatttctcctaaagggctacaccactgtcaacattatcctggactctgtgtctctctctgttgggtcttgtggcatcacatcaggccaaaattgccagaccaggaccctaagtgtctgatagaggcgatgatcttttccaaagtcagtacttacaaactggcattcttacaggctgcaccatttcctagtatgtctgctttaagcctggttcaacctctcatcgaatattaaatttttctttgtaagaaaaa

SEQ ID NO: 713 - DNA, 7713 bp, Homo sapiens
gtggctcaggatgcaggtccccaaggatgtcctgatatgtgcttgtcctctttgcctccttcagagaattctcaaaggaaagagagaaggcaaaagcacggggagatttccagaagctccgggagaagcagcagctggaggaggatctaaagggctacttggattggatcacccaagctgaggacatcgatccggagaatgaggaagaaggaggagaggaaggcaaacgaaatactagcatgcccaccagcgagactgagtctgtgaacacagagaacgtcagcggtgaaggcgagaaccgaggctgctgtggaagtctctggtgctggtggagacggagaggcgcggccaaggcggggccctctgggtgtcggcggtggggtcaagccatctcaaaatccaaactcagccgacgctggcgtcgctggaaccgattcaatcgcagaagatgtagggccgccgtgaagtctgtcacgttttactggctggttatcgtcctggtgtttctgaacaccttaaccatttcctctgagcactacaatcagccagattggttgacacagattcaagatattgccaacaaagtcctcttggctctgttcacctgcgagatgctggtaaaaatgtacagcttgggcctccaagcatatttcgtctctcttttcaaccggtttgattgcttcgtggtgtgtggtggaatcactgagacgatcttggtggaactggaaatcatgtctcccctggggatctctgtgtttcggtgtgtgcgcctcttaagaatcttcaaagtgaccaggcactggacttccctgagcaacttagtggcatccttattaaactccatgaagtccatcgcttcgctgttgcttctgctttttctcttcattatcatcttttccttgcttgggatgcagctgtttggcggcaagtttaattttgatgaaacgcaaaccaagcggagcacctttgacaatttccctcaagcacttctcacagtgttccagatcctgacaggcgaagactggaatgctgtgatgtacgatggcatcatggcttacgggggcccatcctcttcaggaatgatcgtctgcatctacttcatcatcctcttcatttgtggtaactatattctactgaatgtcttcttggccatcgctgtagacaatttggctgatgctgaaagtctgaacactgctcagaaagaagaagcggaagaaaaggagaggaaaaagattgccagaaaagagagcctagaaaataaaaagaacaacaaaccagaagtcaaccagatagccaacagtgacaacaaggttacaattgatgactatagagaagaggatgaagacaaggacccctatccgccttgcgatgtgccagtaggggaagaggaagaggaagaggaggaggatgaacctgaggttcctgccggaccccgtcctcgaaggatctcggagttgaacatgaaggaaaaaattgcccccatccctgaagggagcgctttcttcattcttagcaagaccaacccgatccgcgtaggctgccacaagctcatcaaccaccacatcttcaccaacctcatccttgtcttcatcatgctgagcagcgctgccctggccgcagaggaccccatccgcagccactccttccggaacacgatactgggttactttgactatgccttcacagccatctttactgttgagatcctgttgaagatgacaacttttggagctttcctccacaaaggggccttctgcaggaactacttcaatttgctggatatgctggtggttggggtgtctctggtgtcatttgggattcaatccagtgccatctccgttgtgaagattctgagggtcttaagggtcctgcgtcccctcagggccatcaacagagcaaaaggacttaagcacgtggtccagtgcgtcttcgtggccatccggaccatcggcaacatcatgatcgtcaccaccctcctgcagttcatgtttgcctgtatcggggtccagttgttcaaggggaagttctatcgctgtacggatgaagccaaaagtaaccctgaagaatgcaggggacttttcatcctctacaaggatggggatgttgacagtcctgtggtccgtgaacggatctggcaaaacagtgatttcaacttcgacaacgtcctctctgctatgatggcgctcttcacagtctccacgtttgagggctggcctgcgttgctgtataaagccatcgactcgaatggagagaacatcggcccaatctacaaccaccgcgtggagatctccatcttcttcatcatctacatcatcattgtagctttcttcatgatgaacatctttgtgggctttgtcatcgttacatttcaggaacaaggagaaaaagagtataagaactgtgagctggacaaaaatcagcgtcagtgtgttgaatacgccttgaaagcacgtcccttgcggagatacatccccaaaaacccctaccagtacaagttctggtacgtggtgaactcttcgcctttcgaatacatgatgtttgtcctcatcatgctcaacacactctgcttggccatgcagcactacgagcagtccaagatgttcaatgatgccatggacattctgaacatggtcttcaccggggtgttcaccgtcgagatggttttgaaagtcatcgcatttaagcctaaggggtattttagtgacgcctggaacacgtttgactccctcatcgtaatcggcagcattatagacgtggccctcagcgaagcagacccaactgaaagtgaaaatgtccctgtcccaactgctacacctgggaactctgaagagagcaatagaatctccatcacctttttccgtcttttccgagtgatgcgattggtgaagcttctcagcaggggggaaggcatccggacattgctgtggacttttattaagtcctttcaggcgctcccgtatgtggccctcctcatagccatgctgttcttcatctatgcggtcattggcatgcagatgtttgggaaagttgccatgagagataacaaccagatcaataggaacaataacttccagacgtttccccaggcggtgctgctgctcttcaggtgtgcaacaggtgaggcctggcaggagatcatgctggcctgtctcccagggaagctctgtgaccctgagtcagattacaaccccggggaggagtatacatgtgggagcaactttgccattgtctatttcatcagtttttacatgctctgtgcatttctgatcatcaatctgtttgtggctgtcatcatggataatttcgactatctgacccgggactggtctattttggggcctcaccatttagatgaattcaaaagaatatggtcagaatatgaccctgaggcaaagggaaggataaaacaccttgatgtggtcactctgcttcgacgcatccagcctcccctggggtttgggaagttatgtccacacagggtagcgtgcaagagattagttgccatgaacatgcctctcaacagtgacgggacagtcatgtttaatgcaaccctgtttgctttggttcgaacggctcttaagatcaagaccgaagggaacctggagcaagctaatgaagaacttcgggctgtgataaagaaaatttggaagaaaaccagcatgaaattacttgaccaagttgtccctccagctggtgatgatgaggtaaccgtggggaagttctatgccactttcctgatacaggactactttaggaaattcaagaaacggaaagaacaaggactggtgggaaagtaccctgcgaagaacaccacaattgccctacaggcgggattaaggacactgcatgacattgggccagaaatccggcgtgctatatcgtgtgatttgcaagatgacgagcctgaggaaacaaaacgagaagaagaagatgatgtgttcaaaagaaatggtgccctgcttggaaaccatgtcaatcatgttaatagtgataggagagattcccttcagcagaccaataccacccaccgtcccctgcatgtccaaaggccttcaattccacctgcaagtgatactgagaaaccgctgtttcctccagcaggaaattcggtgtgtcataaccatcataaccataattccataggaaagcaagttcccacctcaacaaatgccaatctcaataatgccaatatgtccaaagctgcccatggaaagcggcccagcattgggaaccttgagcatgtgtctgaaaatgggcatcattcttcccacaagcatgaccgggagcctcagagaaggtccagtgtgaaaagaacccgctattatgaaacttacattaggtccgactcaggagatgaacagctcccaactatttgccgggaagacccagagatacatggctatttcagggacccccactgcttgggggagcaggagtatttcagtagtgaggaatgctacgaggatgacagctcgcccacctggagcaggcaaaactatggctactacagcagatacccaggcagaaacatcgactctgagaggccccgaggctaccatcatccccaaggattcttggaggacgatgactcgcccgtttgctatgattcacggagatctccaaggagacgcctactacctcccaccccagcatcccaccggagatcctccttcaactttgagtgcctgcgccggcagagcagccaggaagaggtcccgtcgtctcccatcttcccccatcgcacggccctgcctctgcatctaatgcagcaacagatcatggcagttgccggcctagattcaagtaaagcccagaagtactcaccgagtcactcgacccggtcgtgggccacccctccagcaacccctccctaccgggactggacaccgtgctacacccccctgatccaagtggagcagtcagaggccctggaccaggtgaacggcagcctgccgtccctgcaccgcagctcctggtacacagacgagcccgacatctcctaccggactttcacaccagccagcctgactgtccccagcagcttccggaacaaaaacagcgacaagcagaggagtgcggacagcttggtggaggcagtcctgatatccgaaggcttgggacgctatgcaagggacccaaaatttgtgtcagcaacaaaacacgaaatcgctgatgcctgtgacctcaccatcgacgagatggagagtgcagccagcaccctgcttaatgggaacgtgcgtccccgagccaacggggatgtgggccccctctcacaccggcaggactatgagctacaggactttggtcctggctacagcgacgaagagccagaccctgggagggatgaggaggacctggcggatgaaatgatatgcatcaccaccttgtagcccccagcgaggggcagactggctctggcctcaggtggggcgcaggagagccaggggaaaagtgcctcatagttaggaaagtttaggcactagttgggagtaatattcaattaattagacttttgtataagagatgtcatgcctcaagaaagccataaacctggtaggaacaggtcccaagcggttgagcctggcagagtaccatgcgctcggccccagctgcaggaaacagcaggccccgccctctcacagaggatgggtgaggaggccagacctgccctgccccattgtccagatgggcactgctgtggagtctgcttctcccatgtaccagggcaccaggcccacccaactgaaggcatggcggcggggtgcaggggaaagttaaaggtgatgacgatcatcacacctgtgtcgttacctcagccatcggtctagcatatcagtcactgggcccaacatatccatttttaaaccctttcccccaaatacactgcgtcctggttcctgtttagctgttctgaaatacggtgtgtaagtaagtcagaacccagctaccagtgattattgcgagggcaatgggacctcataaataaggttttctgtgatgtgacgccagtttacataagagaatatcactccgatggtcggtttctgactgtcacgctaagggcaactgtaaactggaataataatgcactcgcaaccaggtaaacttagatacactagtttgtttaaaattatagatttactgtacatgacttgtaatatactataatttgtatttgtaaagagatggtctatattttgtaattactgtattgtatttgaactgcagcaatatccatgggtcctaataattgtagttccccactaaaatctagaaattattagtatttttactcgggctatccagaagtagaagaaatagagccaattctcatttattcagcgaaaatcctctggggttaaaattttaagtttgaaagaacttgacactacagaaatttttctaaaatattttgagtcactataaacctatcatctttccacaagatataccagatgactatttgcagtcttttctttgggcaagagttccatgattttgatactgtacctttggatccaccatgggttgcaactgtctttggttttgtttgtttgacttgaaccaccctctggtaagtaagtgaattacagagcaggtccagctggctgctctgccccttgggtatccatagttacggttttctctgtggcccacccagggtgttttttgcatcgctggtgcagaaatgcataggtggatgagatatagctgctcttgtcctctggggactggtggtgctgcttaagaaataaggggtgctggggacagaggagcaacgtggtgatctataggattggagtgtcggggtctgtacaaatcgtattgttgccttttacaaaactgctgtactgtatgttctctttgagggcttttgtatgcaattgaatgagggctgaagaagttttcattagaatgcactcacactctgactgtacgtcctgatgaaaacccacttttggataattagaaccgtcaaggcttcattttctgtcaacagaattaggccgactgtcaagttaccttggcagggattccctgcaatcaaaaagatagatgataggtagcaattttggtccaaaatttttaatagtatacagacaacctgttaattttttttttttttttttttgtaaataacaaacaccactttgttatgaagaccttacaaacctcttcttaagacattcttactctgatccaggcaaaaacacttcaaggtttgtaaatgactctttcctgacataaatccttttttattaaaatgcaaaatgttcttcagaataaaactgtgtaataatttttatacttgggagtgctccttgcacagagctgtcatttgccagtgagagcctccgacggggcaggtactgtgccagggcagctctgaaattatggatattcttatcctcctggttccttcggtgccaatggtaacctaataccagccgcagggagcgccatttctcctaaagggctacaccactgtcaacattatcctggactctgtgtctctctctgttgggtcttgtggcatcacatcaggccaaaattgccagaccaggaccctaagtgtctgatagaggcgatgatcttttccaaagtcagtacttacaaactggcattcttacaggctgcaccatttcctagtatgtctgctttaagcctggttcaacctctcatcgaatattaaatttttctttgtaagaaaaa

SEQ ID NO: 714 - DNA, 6365 bp, Homo sapiens
gggcgagcgcctccgtccccggatgtgagctccggctgcccgcggtcccgagccagcggcggcgcgggcggcggcggcgggcaccgggcaccgcggcgggcgggcagacgggcgggcatggggggagcgccgagcggccccggcggccgggccggcatcaccgcggcgtctctccgctagaggaggggacaagccagttctcctttgcagcaaaaaattacatgtatatattattaagataatatatacattggattttatttttttaaaaagtttattttgctccatttttgaaaaagagagagcttgggtggcgagcggttttttttttaaatcaattatccttattttctgttatttgtccccgtccctccccacccccctgctgaagcgagaataagggcagggaccgcggctcctacctcttggtgatccccttccccattccgcccccgcctcaacgcccagcacagtgccctgcacacagtagtcgctcaataaatgttcgtggatgatgatgatgatgatgatgaaaaaaatgcagcatcaacggcagcagcaagcggaccacgcgaacgaggcaaactatgcaagaggcaccagacttcctctttctggtgaaggaccaacttctcagccgaatagctccaagcaaactgtcctgtcttggcaagctgcaatcgatgctgctagacaggccaaggctgcccaaactatgagcacctctgcacccccacctgtaggatctctctcccaaagaaaacgtcagcaatacgccaagagcaaaaaacagggtaactcgtccaacagccgacctgcccgcgcccttttctgtttatcactcaataaccccatccgaagagcctgcattagtatagtggaatggaaaccatttgacatatttatattattggctatttttgccaattgtgtggccttagctatttacatcccattccctgaagatgattctaattcaacaaatcataacttggaaaaagtagaatatgccttcctgattatttttacagtcgagacatttttgaagattatagcgtatggattattgctacatcctaatgcttatgttaggaatggatggaatttactggattttgttatagtaatagtaggattgtttagtgtaattttggaacaattaaccaaagaaacagaaggcgggaaccactcaagcggcaaatctggaggctttgatgtcaaagccctccgtgcctttcgagtgttgcgaccacttcgactagtgtcaggagtgcccagtttacaagttgtcctgaactccattataaaagccatggttcccctccttcacatagcccttttggtattatttgtaatcataatctatgctattataggattggaactttttattggaaaaatgcacaaaacatgtttttttgctgactcagatatcgtagctgaagaggacccagctccatgtgcgttctcagggaatggacgccagtgtactgccaatggcacggaatgtaggagtggctgggttggcccgaacggaggcatcaccaactttgataactttgcctttgccatgcttactgtgtttcagtgcatcaccatggagggctggacagacgtgctctactgggtaaatgatgcgataggatgggaatggccatgggtgtattttgttagtctgatcatccttggctcatttttcgtccttaacctggttcttggtgtccttagtggagaattctcaaaggaaagagagaaggcaaaagcacggggagatttccagaagctccgggagaagcagcagctggaggaggatctaaagggctacttggattggatcacccaagctgaggacatcgatccggagaatgaggaagaaggaggagaggaaggcaaacgaaatactagcatgcccaccagcgagactgagtctgtgaacacagagaacgtcagcggtgaaggcgagaaccgaggctgctgtggaagtctctggtgctggtggagacggagaggcgcggccaaggcggggccctctgggtgtcggcggtggggtcaagccatctcaaaatccaaactcagccgacgctggcgtcgctggaaccgattcaatcgcagaagatgtagggccgccgtgaagtctgtcacgttttactggctggttatcgtcctggtgtttctgaacaccttaaccatttcctctgagcactacaatcagccagattggttgacacagattcaagatattgccaacaaagtcctcttggctctgttcacctgcgagatgctggtaaaaatgtacagcttgggcctccaagcatatttcgtctctcttttcaaccggtttgattgcttcgtggtgtgtggtggaatcactgagacgatcttggtggaactggaaatcatgtctcccctggggatctctgtgtttcggtgtgtgcgcctcttaagaatcttcaaagtgaccaggcactggacttccctgagcaacttagtggcatccttattaaactccatgaagtccatcgcttcgctgttgcttctgctttttctcttcattatcatcttttccttgcttgggatgcagctgtttggcggcaagtttaattttgatgaaacgcaaaccaagcggagcacctttgacaatttccctcaagcacttctcacagtgttccagatcctgacaggcgaagactggaatgctgtgatgtacgatggcatcatggcttacgggggcccatcctcttcaggaatgatcgtctgcatctacttcatcatcctcttcatttgtggtaactatattctactgaatgtcttcttggccatcgctgtagacaatttggctgatgctgaaagtctgaacactgctcagaaagaagaagcggaagaaaaggagaggaaaaagattgccagaaaagagagcctagaaaataaaaagaacaacaaaccagaagtcaaccagatagccaacagtgacaacaaggttacaattgatgactatagagaagaggatgaagacaaggacccctatccgccttgcgatgtgccagtaggggaagaggaagaggaagaggaggaggatgaacctgaggttcctgccggaccccgtcctcgaaggatctcggagttgaacatgaaggaaaaaattgcccccatccctgaagggagcgctttcttcattcttagcaagaccaacccgatccgcgtaggctgccacaagctcatcaaccaccacatcttcaccaacctcatccttgtcttcatcatgctgagcagcgctgccctggccgcagaggaccccatccgcagccactccttccggaacacgatactgggttactttgactatgccttcacagccatctttactgttgagatcctgttgaagatgacaacttttggagctttcctccacaaaggggccttctgcaggaactacttcaatttgctggatatgctggtggttggggtgtctctggtgtcatttgggattcaatccagtgccatctccgttgtgaagattctgagggtcttaagggtcctgcgtcccctcagggccatcaacagagcaaaaggacttaagcacgtggtccagtgcgtcttcgtggccatccggaccatcggcaacatcatgatcgtcaccaccctcctgcagttcatgtttgcctgtatcggggtccagttgttcaaggggaagttctatcgctgtacggatgaagccaaaagtaaccctgaagaatgcaggggacttttcatcctctacaaggatggggatgttgacagtcctgtggtccgtgaacggatctggcaaaacagtgatttcaacttcgacaacgtcctctctgctatgatggcgctcttcacagtctccacgtttgagggctggcctgcgttgctgtataaagccatcgactcgaatggagagaacatcggcccaatctacaaccaccgcgtggagatctccatcttcttcatcatctacatcatcattgtagctttcttcatgatgaacatctttgtgggctttgtcatcgttacatttcaggaacaaggagaaaaagagtataagaactgtgagctggacaaaaatcagcgtcagtgtgttgaatacgccttgaaagcacgtcccttgcggagatacatccccaaaaacccctaccagtacaagttctggtacgtggtgaactcttcgcctttcgaatacatgatgtttgtcctcatcatgctcaacacactctgcttggccatgcagcactacgagcagtccaagatgttcaatgatgccatggacattctgaacatggtcttcaccggggtgttcaccgtcgagatggttttgaaagtcatcgcatttaagcctaaggggtattttagtgacgcctggaacacgtttgactccctcatcgtaatcggcagcattatagacgtggccctcagcgaagcagacccaactgaaagtgaaaatgtccctgtcccaactgctacacctgggaactctgaagagagcaatagaatctccatcacctttttccgtcttttccgagtgatgcgattggtgaagcttctcagcaggggggaaggcatccggacattgctgtggacttttattaagtcctttcaggcgctcccgtatgtggccctcctcatagccatgctgttcttcatctatgcggtcattggcatgcagatgtttgggaaagttgccatgagagataacaaccagatcaataggaacaataacttccagacgtttccccaggcggtgctgctgctcttcaggtgtgcaacaggtgaggcctggcaggagatcatgctggcctgtctcccagggaagctctgtgaccctgagtcagattacaaccccggggaggagtatacatgtgggagcaactttgccattgtctatttcatcagtttttacatgctctgtgcatttctgatcatcaatctgtttgtggctgtcatcatggataatttcgactatctgacccgggactggtctattttggggcctcaccatttagatgaattcaaaagaatatggtcagaatatgaccctgaggcaaagggaaggataaaacaccttgatgtggtcactctgcttcgacgcatccagcctcccctggggtttgggaagttatgtccacacagggtagcgtgcaagagattagttgccatgaacatgcctctcaacagtgacgggacagtcatgtttaatgcaaccctgtttgctttggttcgaacggctcttaagatcaagaccgaagggaacctggagcaagctaatgaagaacttcgggctgtgataaagaaaatttggaagaaaaccagcatgaaattacttgaccaagttgtccctccagctggtgatgatgaggtaaccgtggggaagttctatgccactttcctgatacaggactactttaggaaattcaagaaacggaaagaacaaggactggtgggaaagtaccctgcgaagaacaccacaattgccctacaggcgggattaaggacactgcatgacattgggccagaaatccggcgtgctatatcgtgtgatttgcaagatgacgagcctgaggaaacaaaacgagaagaagaagatgatgtgttcaaaagaaatggtgccctgcttggaaaccatgtcaatcatgttaatagtgataggagagattcccttcagcagaccaataccacccaccgtcccctgcatgtccaaaggccttcaattccacctgcaagtgatactgagaaaccgctgtttcctccagcaggaaattcggtgtgtcataaccatcataaccataattccataggaaagcaagttcccacctcaacaaatgccaatctcaataatgccaatatgtccaaagctgcccatggaaagcggcccagcattgggaaccttgagcatgtgtctgaaaatgggcatcattcttcccacaagcatgaccgggagcctcagagaaggtccagtgtgaaaaggtccgactcaggagatgaacagctcccaactatttgccgggaagacccagagatacatggctatttcagggacccccactgcttgggggagcaggagtatttcagtagtgaggaatgctacgaggatgacagctcgcccacctggagcaggcaaaactatggctactacagcagatacccaggcagaaacatcgactctgagaggccccgaggctaccatcatccccaaggattcttggaggacgatgactcgcccgtttgctatgattcacggagatctccaaggagacgcctactacctcccaccccagcatgtgaggccagattttttgttttgggtggaacctcccggggaacagtgtacctctcccccaacccccgctctg

SEQ ID NO: 715 - DNA, 5440 bp, Homo sapiens
gggcgagcgcctccgtccccggatgtgagctccggctgcccgcggtcccgagccagcggcggcgcgggcggcggcggcgggcaccgggcaccgcggcgggcgggcagacgggcgggcatggggggagcgccgagcggccccggcggccgggccggcatcaccgcggcgtctctccgctagaggaggggacaagccagttctcctttgcagcaaaaaattacatgtatatattattaagataatatatacattggattttatttttttaaaaagtttattttgctccatttttgaaaaagagagagcttgggtggcgagcggttttttttttaaatcaattatccttattttctgttatttgtccccgtccctccccacccccctgctgaagcgagaataagggcagggaccgcggctcctacctcttggtgatccccttccccattccgcccccgcctcaacgcccagcacagtgccctgcacacagtagtcgctcaataaatgttcgtggatgatgatgatgatgatgatgaaaaaaatgcagcatcaacggcagcagcaagcggaccacgcgaacgaggcaaactatgcaagaggcaccagacttcctctttctggtgaaggaccaacttctcagccgaatagctccaagcaaactgtcctgtcttggcaagctgcaatcgatgctgctagacaggccaaggctgcccaaactatgagcacctctgcacccccacctgtaggatctctctcccaaagaaaacgtcagcaatacgccaagagcaaaaaacagggtaactcgtccaacagccgacctgcccgcgcccttttctgtttatcactcaataaccccatccgaagagcctgcattagtatagtggaatggaaaccatttgacatatttatattattggctatttttgccaattgtgtggccttagctatttacatcccattccctgaagatgattctaattcaacaaatcataacttggaaaaagtagaatatgccttcctgattatttttacagtcgagacatttttgaagattatagcgtatggattattgctacatcctaatgcttatgttaggaatggatggaatttactggattttgttatagtaatagtaggattgtttagtgtaattttggaacaattaaccaaagaaacagaaggcgggaaccactcaagcggcaaatctggaggctttgatgtcaaagccctccgtgcctttcgagtgttgcgaccacttcgactagtgtcaggagtgcccagtttacaagttgtcctgaactccattataaaagccatggttcccctccttcacatagcccttttggtattatttgtaatcataatctatgctattataggattggaactttttattggaaaaatgcacaaaacatgtttttttgctgactcagatatcgtagctgaagaggacccagctccatgtgcgttctcagggaatggacgccagtgtactgccaatggcacggaatgtaggagtggctgggttggcccgaacggaggcatcaccaactttgataactttgcctttgccatgcttactgtgtttcagtgcatcaccatggagggctggacagacgtgctctactgggtaaatgatgcgataggatgggaatggccatgggtgtattttgttagtctgatcatccttggctcatttttcgtccttaacctggttcttggtgtccttagtggagaattctcaaaggaaagagagaaggcaaaagcacggggagatttccagaagctccgggagaagcagcagctggaggaggatctaaagggctacttggattggatcacccaagctgaggacatcgatccggagaatgaggaagaaggaggagaggaaggcaaacgaaatactagcatgcccaccagcgagactgagtctgtgaacacagagaacgtcagcggtgaaggcgagaaccgaggctgctgtggaagtctctggtgctggtggagacggagaggcgcggccaaggcggggccctctgggtgtcggcggtggggtcaagccatctcaaaatccaaactcagccgacgctggcgtcgctggaaccgattcaatcgcagaagatgtagggccgccgtgaagtctgtcacgttttactggctggttatcgtcctggtgtttctgaacaccttaaccatttcctctgagcactacaatcagccagattggttgacacagattcaagatattgccaacaaagtcctcttggctctgttcacctgcgagatgctggtaaaaatgtacagcttgggcctccaagcatatttcgtctctcttttcaaccggtttgattgcttcgtggtgtgtggtggaatcactgagacgatcttggtggaactggaaatcatgtctcccctggggatctctgtgtttcggtgtgtgcgcctcttaagaatcttcaaagtgaccaggcactggacttccctgagcaacttagtggcatccttattaaactccatgaagtccatcgcttcgctgttgcttctgctttttctcttcattatcatcttttccttgcttgggatgcagctgtttggcggcaagtttaattttgatgaaacgcaaaccaagcggagcacctttgacaatttccctcaagcacttctcacagtgttccagatcctgacaggcgaagactggaatgctgtgatgtacgatggcatcatggcttacgggggcccatcctcttcaggaatgatcgtctgcatctacttcatcatcctcttcatttgtggtaactatattctactgaatgtcttcttggccatcgctgtagacaatttggctgatgctgaaagtctgaacactgctcagaaagaagaagcggaagaaaaggagaggaaaaagattgccagaaaagagagcctagaaaataaaaagaacaacaaaccagaagtcaaccagatagccaacagtgacaacaaggttacaattgatgactatagagaagaggatgaagacaaggacccctatccgccttgcgatgtgccagtaggggaagaggaagaggaagaggaggaggatgaacctgaggttcctgccggaccccgtcctcgaaggatctcggagttgaacatgaaggaaaaaattgcccccatccctgaagggagcgctttcttcattcttagcaagaccaacccgatccgcgtaggctgccacaagctcatcaaccaccacatcttcaccaacctcatccttgtcttcatcatgctgagcagcgctgccctggccgcagaggaccccatccgcagccactccttccggaacacgatactgggttactttgactatgccttcacagccatctttactgttgagatcctgttgaagatgacaacttttggagctttcctccacaaaggggccttctgcaggaactacttcaatttgctggatatgctggtggttggggtgtctctggtgtcatttgggattcaatccagtgccatctccgttgtgaagattctgagggtcttaagggtcctgcgtcccctcagggccatcaacagagcaaaaggacttaagcacgtggtccagtgcgtcttcgtggccatccggaccatcggcaacatcatgatcgtcaccaccctcctgcagttcatgtttgcctgtatcggggtccagttgttcaaggggaagttctatcgctgtacggatgaagccaaaagtaaccctgaagaatgcaggggacttttcatcctctacaaggatggggatgttgacagtcctgtggtccgtgaacggatctggcaaaacagtgatttcaacttcgacaacgtcctctctgctatgatggcgctcttcacagtctccacgtttgagggctggcctgcgttgctgtataaagccatcgactcgaatggagagaacatcggcccaatctacaaccaccgcgtggagatctccatcttcttcatcatctacatcatcattgtagctttcttcatgatgaacatctttgtgggctttgtcatcgttacatttcaggaacaaggagaaaaagagtataagaactgtgagctggacaaaaatcagcgtcagtgtgttgaatacgccttgaaagcacgtcccttgcggagatacatccccaaaaacccctaccagtacaagttctggtacgtggtgaactcttcgcctttcgaatacatgatgtttgtcctcatcatgctcaacacactctgcttggccatgcagcactacgagcagtccaagatgttcaatgatgccatggacattctgaacatggtcttcaccggggtgttcaccgtcgagatggttttgaaagtcatcgcatttaagcctaaggggtattttagtgacgcctggaacacgtttgactccctcatcgtaatcggcagcattatagacgtggccctcagcgaagcagacccaactgaaagtgaaaatgtccctgtcccaactgctacacctgggaactctgaagagagcaatagaatctccatcacctttttccgtcttttccgagtgatgcgattggtgaagcttctcagcaggggggaaggcatccggacattgctgtggacttttattaagtcctttcaggcgctcccgtatgtggccctcctcatagccatgctgttcttcatctatgcggtcattggcatgcagatgtttgggaaagttgccatgagagataacaaccagatcaataggaacaataacttccagacgtttccccaggcggtgctgctgctcttcaggtgtgcaacaggtgaggcctggcaggagatcatgctggcctgtctcccagggaagctctgtgaccctgagtcagattacaaccccggggaggagtatacatgtgggagcaactttgccattgtctatttcatcagtttttacatgctctgtgcatttctgatcatcaatctgtttgtggctgtcatcatggataatttcgactatctgacccgggactggtctattttggggcctcaccatttagatgaattcaaaagaatatggtcagaatatgaccctgaggcaaagggaaggataaaacaccttgatgtggtcactctgcttcgacgcatccagcctcccctggggtttgggaagttatgtccacacagggtagcgtgcaagagattagttgccatgaacatgcctctcaacagtgacgggacagtcatgtttaatgcaaccctgtttgctttggttcgaacggctcttaagatcaagaccgaagggaacctggagcaagctaatgaagaacttcgggctgtgataaagaaaatttggaagaaaaccagcatgaaattacttgaccaagttgtccctccagctggtggtcagtgcagtctatttcctaagtagtccttggccagtgctttggttttaatgctagtgtctccagaaagtccagag

SEQ ID NO: 716 - DNA, 4400 bp, Homo sapiens
gggcgagcgcctccgtccccggatgtgagctccggctgcccgcggtcccgagccagcggcggcgcgggcggcggcggcgggcaccgggcaccgcggcgggcgggcagacgggcgggcatggggggagcgccgagcggccccggcggccgggccggcatcaccgcggcgtctctccgctagaggaggggacaagccagttctcctttgcagcaaaaaattacatgtatatattattaagataatatatacattggattttatttttttaaaaagtttattttgctccatttttgaaaaagagagagcttgggtggcgagcggttttttttttaaatcaattatccttattttctgttatttgtccccgtccctccccacccccctgctgaagcgagaataagggcagggaccgcggctcctacctcttggtgatccccttccccattccgcccccgcctcaacgcccagcacagtgccctgcacacagtagtcgctcaataaatgttcgtggatgatgatgatgatgatgatgaaaaaaatgcagcatcaacggcagcagcaagcggaccacgcgaacgaggcaaactatgcaagaggcaccagacttcctctttctggtgaaggaccaacttctcagccgaatagctccaagcaaactgtcctgtcttggcaagctgcaatcgatgctgctagacaggccaaggctgcccaaactatgagcacctctgcacccccacctgtaggatctctctcccaaagaaaacgtcagcaatacgccaagagcaaaaaacagggtaactcgtccaacagccgacctgcccgcgcccttttctgtttatcactcaataaccccatccgaagagcctgcattagtatagtggaatggaaaccatttgacatatttatattattggctatttttgccaattgtgtggccttagctatttacatcccattccctgaagatgattctaattcaacaaatcataacttggaaaaagtagaatatgccttcctgattatttttacagtcgagacatttttgaagattatagcgtatggattattgctacatcctaatgcttatgttaggaatggatggaatttactggattttgttatagtaatagtaggattgtttagtgtaattttggaacaattaaccaaagaaacagaaggcgggaaccactcaagcggcaaatctggaggctttgatgtcaaagccctccgtgcctttcgagtgttgcgaccacttcgactagtgtcaggagtgcccagtttacaagttgtcctgaactccattataaaagccatggttcccctccttcacatagcccttttggtattatttgtaatcataatctatgctattataggattggaactttttattggaaaaatgcacaaaacatgtttttttgctgactcagatatcgtagctgaagaggacccagctccatgtgcgttctcagggaatggacgccagtgtactgccaatggcacggaatgtaggagtggctgggttggcccgaacggaggcatcaccaactttgataactttgcctttgccatgcttactgtgtttcagtgcatcaccatggagggctggacagacgtgctctactgggtaaatgatgcgataggatgggaatggccatgggtgtattttgttagtctgatcatccttggctcatttttcgtccttaacctggttcttggtgtccttagtggagaattctcaaaggaaagagagaaggcaaaagcacggggagatttccagaagctccgggagaagcagcagctggaggaggatctaaagggctacttggattggatcacccaagctgaggacatcgatccggagaatgaggaagaaggaggagaggaaggcaaacgaaatactagcatgcccaccagcgagactgagtctgtgaacacagagaacgtcagcggtgaaggcgagaaccgaggctgctgtggaagtctctggtgctggtggagacggagaggcgcggccaaggcggggccctctgggtgtcggcggtggggtcaagccatctcaaaatccaaactcagccgacgctggcgtcgctggaaccgattcaatcgcagaagatgtagggccgccgtgaagtctgtcacgttttactggctggttatcgtcctggtgtttctgaacaccttaaccatttcctctgagcactacaatcagccagattggttgacacagattcaagatattgccaacaaagtcctcttggctctgttcacctgcgagatgctggtaaaaatgtacagcttgggcctccaagcatatttcgtctctcttttcaaccggtttgattgcttcgtggtgtgtggtggaatcactgagacgatcttggtggaactggaaatcatgtctcccctggggatctctgtgtttcggtgtgtgcgcctcttaagaatcttcaaagtgaccaggcactggacttccctgagcaacttagtggcatccttattaaactccatgaagtccatcgcttcgctgttgcttctgctttttctcttcattatcatcttttccttgcttgggatgcagctgtttggcggcaagtttaattttgatgaaacgcaaaccaagcggagcacctttgacaatttccctcaagcacttctcacagtgttccagatcctgacaggcgaagactggaatgctgtgatgtacgatggcatcatggcttacgggggcccatcctcttcaggaatgatcgtctgcatctacttcatcatcctcttcatttgtggtaactatattctactgaatgtcttcttggccatcgctgtagacaatttggctgatgctgaaagtctgaacactgctcagaaagaagaagcggaagaaaaggagaggaaaaagattgccagaaaagagagcctagaaaataaaaagaacaacaaaccagaagtcaaccagatagccaacagtgacaacaaggttacaattgatgactatagagaagaggatgaagacaaggacccctatccgccttgcgatgtgccagtaggggaagaggaagaggaagaggaggaggatgaacctgaggttcctgccggaccccgtcctcgaaggatctcggagttgaacatgaaggaaaaaattgcccccatccctgaagggagcgctttcttcattcttagcaagaccaacccgatccgcgtaggctgccacaagctcatcaaccaccacatcttcaccaacctcatccttgtcttcatcatgctgagcagcgctgccctggccgcagaggaccccatccgcagccactccttccggaacacgatactgggttactttgactatgccttcacagccatctttactgttgagatcctgttgaagatgacaacttttggagctttcctccacaaaggggccttctgcaggaactacttcaatttgctggatatgctggtggttggggtgtctctggtgtcatttgggattcaatccagtgccatctccgttgtgaagattctgagggtcttaagggtcctgcgtcccctcagggccatcaacagagcaaaaggacttaagcacgtggtccagtgcgtcttcgtggccatccggaccatcggcaacatcatgatcgtcaccaccctcctgcagttcatgtttgcctgtatcggggtccagttgttcaaggggaagttctatcgctgtacggatgaagccaaaagtaaccctgaagaatgcaggggacttttcatcctctacaaggatggggatgttgacagtcctgtggtccgtgaacggatctggcaaaacagtgatttcaacttcgacaacgtcctctctgctatgatggcgctcttcacagtctccacgtttgagggctggcctgcgttgctgtataaagccatcgactcgaatggagagaacatcggcccaatctacaaccaccgcgtggagatctccatcttcttcatcatctacatcatcattgtagctttcttcatgatgaacatctttgtgggctttgtcatcgttacatttcaggaacaaggagaaaaagagtataagaactgtgagctggacaaaaatcagcgtcagtgtgttgaatacgccttgaaagcacgtcccttgcggagatacatccccaaaaacccctaccagtacaagttctggtacgtggtgaactcttcgcctttcgaatacatgatgtttgtcctcatcatgctcaacacactctgcttggccatgcagcactacgagcagtccaagatgttcaatgatgccatggacattctgaacatggtcttcaccggggtgttcaccgtcgagatggttttgaaagtcatcgcatttaagcctaaggtgagttgcagaacccacttttcaaaggttgttgctgagtcac

SEQ ID NO: 717 - DNA, 3363 bp, Homo sapiens
gggcgagcgcctccgtccccggatgtgagctccggctgcccgcggtcccgagccagcggcggcgcgggcggcggcggcgggcaccgggcaccgcggcgggcgggcagacgggcgggcatggggggagcgccgagcggccccggcggccgggccggcatcaccgcggcgtctctccgctagaggaggggacaagccagttctcctttgcagcaaaaaattacatgtatatattattaagataatatatacattggattttatttttttaaaaagtttattttgctccatttttgaaaaagagagagcttgggtggcgagcggttttttttttaaatcaattatccttattttctgttatttgtccccgtccctccccacccccctgctgaagcgagaataagggcagggaccgcggctcctacctcttggtgatccccttccccattccgcccccgcctcaacgcccagcacagtgccctgcacacagtagtcgctcaataaatgttcgtggatgatgatgatgatgatgatgaaaaaaatgcagcatcaacggcagcagcaagcggaccacgcgaacgaggcaaactatgcaagaggcaccagacttcctctttctggtgaaggaccaacttctcagccgaatagctccaagcaaactgtcctgtcttggcaagctgcaatcgatgctgctagacaggccaaggctgcccaaactatgagcacctctgcacccccacctgtaggatctctctcccaaagaaaacgtcagcaatacgccaagagcaaaaaacagggtaactcgtccaacagccgacctgcccgcgcccttttctgtttatcactcaataaccccatccgaagagcctgcattagtatagtggaatggaaaccatttgacatatttatattattggctatttttgccaattgtgtggccttagctatttacatcccattccctgaagatgattctaattcaacaaatcataacttggaaaaagtagaatatgccttcctgattatttttacagtcgagacatttttgaagattatagcgtatggattattgctacatcctaatgcttatgttaggaatggatggaatttactggattttgttatagtaatagtaggattgtttagtgtaattttggaacaattaaccaaagaaacagaaggcgggaaccactcaagcggcaaatctggaggctttgatgtcaaagccctccgtgcctttcgagtgttgcgaccacttcgactagtgtcaggagtgcccagtttacaagttgtcctgaactccattataaaagccatggttcccctccttcacatagcccttttggtattatttgtaatcataatctatgctattataggattggaactttttattggaaaaatgcacaaaacatgtttttttgctgactcagatatcgtagctgaagaggacccagctccatgtgcgttctcagggaatggacgccagtgtactgccaatggcacggaatgtaggagtggctgggttggcccgaacggaggcatcaccaactttgataactttgcctttgccatgcttactgtgtttcagtgcatcaccatggagggctggacagacgtgctctactgggtaaatgatgcgataggatgggaatggccatgggtgtattttgttagtctgatcatccttggctcatttttcgtccttaacctggttcttggtgtccttagtggagaattctcaaaggaaagagagaaggcaaaagcacggggagatttccagaagctccgggagaagcagcagctggaggaggatctaaagggctacttggattggatcacccaagctgaggacatcgatccggagaatgaggaagaaggaggagaggaaggcaaacgaaatactagcatgcccaccagcgagactgagtctgtgaacacagagaacgtcagcggtgaaggcgagaaccgaggctgctgtggaagtctctggtgctggtggagacggagaggcgcggccaaggcggggccctctgggtgtcggcggtggggtcaagccatctcaaaatccaaactcagccgacgctggcgtcgctggaaccgattcaatcgcagaagatgtagggccgccgtgaagtctgtcacgttttactggctggttatcgtcctggtgtttctgaacaccttaaccatttcctctgagcactacaatcagccagattggttgacacagattcaagatattgccaacaaagtcctcttggctctgttcacctgcgagatgctggtaaaaatgtacagcttgggcctccaagcatatttcgtctctcttttcaaccggtttgattgcttcgtggtgtgtggtggaatcactgagacgatcttggtggaactggaaatcatgtctcccctggggatctctgtgtttcggtgtgtgcgcctcttaagaatcttcaaagtgaccaggcactggacttccctgagcaacttagtggcatccttattaaactccatgaagtccatcgcttcgctgttgcttctgctttttctcttcattatcatcttttccttgcttgggatgcagctgtttggcggcaagtttaattttgatgaaacgcaaaccaagcggagcacctttgacaatttccctcaagcacttctcacagtgttccagatcctgacaggcgaagactggaatgctgtgatgtacgatggcatcatggcttacgggggcccatcctcttcaggaatgatcgtctgcatctacttcatcatcctcttcatttgtggtaactatattctactgaatgtcttcttggccatcgctgtagacaatttggctgatgctgaaagtctgaacactgctcagaaagaagaagcggaagaaaaggagaggaaaaagattgccagaaaagagagcctagaaaataaaaagaacaacaaaccagaagtcaaccagatagccaacagtgacaacaaggttacaattgatgactatagagaagaggatgaagacaaggacccctatccgccttgcgatgtgccagtaggggaagaggaagaggaagaggaggaggatgaacctgaggttcctgccggaccccgtcctcgaaggatctcggagttgaacatgaaggaaaaaattgcccccatccctgaagggagcgctttcttcattcttagcaagaccaacccgatccgcgtaggctgccacaagctcatcaaccaccacatcttcaccaacctcatccttgtcttcatcatgctgagcagcgctgccctggccgcagaggaccccatccgcagccactccttccggaacacggtaagtccccagggtggggctcgctctgggatagccctggc

SEQ ID NO: 718 - DNA, 4970 bp, Homo sapiens
cgtcgttgatattgctataactgaagtgaatccaactgaaagtgaaaatgtccctgtcccaactgctacacctgggaactctgaagagagcaatagaatctccatcacctttttccgtcttttccgagtgatgcgattggtgaagcttctcagcaggggggaaggcatccggacattgctgtggacttttattaagtcctttcaggcgctcccgtatgtggccctcctcatagccatgctgttcttcatctatgcggtcattggcatgcagatgtttgggaaagttgccatgagagataacaaccagatcaataggaacaataacttccagacgtttccccaggcggtgctgctgctcttcaggtgtgcaacaggtgaggcctggcaggagatcatgctggcctgtctcccagggaagctctgtgaccctgagtcagattacaaccccggggaggagtatacatgtgggagcaactttgccattgtctatttcatcagtttttacatgctctgtgcatttctgatcatcaatctgtttgtggctgtcatcatggataatttcgactatctgacccgggactggtctattttggggcctcaccatttagatgaattcaaaagaatatggtcagaatatgaccctgaggcaaagggaaggataaaacaccttgatgtggtcactctgcttcgacgcatccagcctcccctggggtttgggaagttatgtccacacagggtagcgtgcaagagattagttgccatgaacatgcctctcaacagtgacgggacagtcatgtttaatgcaaccctgtttgctttggttcgaacggctcttaagatcaagaccgaagggaacctggagcaagctaatgaagaacttcgggctgtgataaagaaaatttggaagaaaaccagcatgaaattacttgaccaagttgtccctccagctggtgatgatgaggtaaccgtggggaagttctatgccactttcctgatacaggactactttaggaaattcaagaaacggaaagaacaaggactggtgggaaagtaccctgcgaagaacaccacaattgccctacaggcgggattaaggacactgcatgacattgggccagaaatccggcgtgctatatcgtgtgatttgcaagatgacgagcctgaggaaacaaaacgagaagaagaagatgatgtgttcaaaagaaatggtgccctgcttggaaaccatgtcaatcatgttaatagtgataggagagattcccttcagcagaccaataccacccaccgtcccctgcatgtccaaaggccttcaattccacctgcaagtgatactgagaaaccgctgtttcctccagcaggaaattcggtgtgtcataaccatcataaccataattccataggaaagcaagttcccacctcaacaaatgccaatctcaataatgccaatatgtccaaagctgcccatggaaagcggcccagcattgggaaccttgagcatgtgtctgaaaatgggcatcattcttcccacaagcatgaccgggagcctcagagaaggtccagtgtgaaaagaacccgctattatgaaacttacattaggtccgactcaggagatgaacagctcccaactatttgccgggaagacccagagatacatggctatttcagggacccccactgcttgggggagcaggagtatttcagtagtgaggaatgctacgaggatgacagctcgcccacctggagcaggcaaaactatggctactacagcagatacccaggcagaaacatcgactctgagaggccccgaggctaccatcatccccaaggattcttggaggacgatgactcgcccgtttgctatgattcacggagatctccaaggagacgcctactacctcccaccccagcatcccaccggagatcctccttcaactttgagtgcctgcgccggcagagcagccaggaagaggtcccgtcgtctcccatcttcccccatcgcacggccctgcctctgcatctaatgcagcaacagatcatggcagttgccggcctagattcaagtaaagcccagaagtactcaccgagtcactcgacccggtcgtgggccacccctccagcaacccctccctaccgggactggacaccgtgctacacccccctgatccaagtggagcagtcagaggccctggaccaggtgaacggcagcctgccgtccctgcaccgcagctcctggtacacagacgagcccgacatctcctaccggactttcacaccagccagcctgactgtccccagcagcttccggaacaaaaacagcgacaagcagaggagtgcggacagcttggtggaggcagtcctgatatccgaaggcttgggacgctatgcaagggacccaaaatttgtgtcagcaacaaaacacgaaatcgctgatgcctgtgacctcaccatcgacgagatggagagtgcagccagcaccctgcttaatgggaacgtgcgtccccgagccaacggggatgtgggccccctctcacaccggcaggactatgagctacaggactttggtcctggctacagcgacgaagagccagaccctgggagggatgaggaggacctggcggatgaaatgatatgcatcaccaccttgtagcccccagcgaggggcagactggctctggcctcaggtggggcgcaggagagccaggggaaaagtgcctcatagttaggaaagtttaggcactagttgggagtaatattcaattaattagacttttgtataagagatgtcatgcctcaagaaagccataaacctggtaggaacaggtcccaagcggttgagcctggcagagtaccatgcgctcggccccagctgcaggaaacagcaggccccgccctctcacagaggatgggtgaggaggccagacctgccctgccccattgtccagatgggcactgctgtggagtctgcttctcccatgtaccagggcaccaggcccacccaactgaaggcatggcggcggggtgcaggggaaagttaaaggtgatgacgatcatcacacctgtgtcgttacctcagccatcggtctagcatatcagtcactgggcccaacatatccatttttaaaccctttcccccaaatacactgcgtcctggttcctgtttagctgttctgaaatacggtgtgtaagtaagtcagaacccagctaccagtgattattgcgagggcaatgggacctcataaataaggttttctgtgatgtgacgccagtttacataagagaatatcactccgatggtcggtttctgactgtcacgctaagggcaactgtaaactggaataataatgcactcgcaaccaggtaaacttagatacactagtttgtttaaaattatagatttactgtacatgacttgtaatatactataatttgtatttgtaaagagatggtctatattttgtaattactgtattgtatttgaactgcagcaatatccatgggtcctaataattgtagttccccactaaaatctagaaattattagtatttttactcgggctatccagaagtagaagaaatagagccaattctcatttattcagcgaaaatcctctggggttaaaattttaagtttgaaagaacttgacactacagaaatttttctaaaatattttgagtcactataaacctatcatctttccacaagatataccagatgactatttgcagtcttttctttgggcaagagttccatgattttgatactgtacctttggatccaccatgggttgcaactgtctttggttttgtttgtttgacttgaaccaccctctggtaagtaagtgaattacagagcaggtccagctggctgctctgccccttgggtatccatagttacggttttctctgtggcccacccagggtgttttttgcatcgctggtgcagaaatgcataggtggatgagatatagctgctcttgtcctctggggactggtggtgctgcttaagaaataaggggtgctggggacagaggagcaacgtggtgatctataggattggagtgtcggggtctgtacaaatcgtattgttgccttttacaaaactgctgtactgtatgttctctttgagggcttttgtatgcaattgaatgagggctgaagaagttttcattagaatgcactcacactctgactgtacgtcctgatgaaaacccacttttggataattagaaccgtcaaggcttcattttctgtcaacagaattaggccgactgtcaagttaccttggcagggattccctgcaatcaaaaagatagatgataggtagcaattttggtccaaaatttttaatagtatacagacaacctgttaattttttttttttttttttttgtaaataacaaacaccactttgttatgaagaccttacaaacctcttcttaagacattcttactctgatccaggcaaaaacacttcaaggtttgtaaatgactctttcctgacataaatccttttttattaaaatgcaaaatgttcttcagaataaaactgtgtaataatttttatacttgggagtgctccttgcacagagctgtcatttgccagtgagagcctccgacggggcaggtactgtgccagggcagctctgaaattatggatattcttatcctcctggttccttcggtgccaatggtaacctaataccagccgcagggagcgccatttctcctaaagggctacaccactgtcaacattatcctggactctgtgtctctctctgttgggtcttgtggcatcacatcaggccaaaattgccagaccaggaccctaagtgtctgatagaggcgatgatcttttccaaagtcagtacttacaaactggcattcttacaggctgcaccatttcctagtatgtctgctttaagcctggttcaacctctcatcgaatattaaatttttctttgtaagaaaaa

SEQ ID NO: 719 - DNA, 4221 bp, Homo sapiens
attttgagccttagttgctttgcaaaaccttgctttttgctggtttgagacccctgtgttatatgctgagacctcggtgccttctgcgccggaccgcccacccgccccactctgcccctgcccctgccccagccagaagcaagtgtttaggctcttggtctaatgtgctgattcgggagagctctgtctggtctctccgtttagatgatgaggtaaccgtggggaagttctatgccactttcctgatacaggactactttaggaaattcaagaaacggaaagaacaaggactggtgggaaagtaccctgcgaagaacaccacaattgccctacaggcgggattaaggacactgcatgacattgggccagaaatccggcgtgctatatcgtgtgatttgcaagatgacgagcctgaggaaacaaaacgagaagaagaagatgatgtgttcaaaagaaatggtgccctgcttggaaaccatgtcaatcatgttaatagtgataggagagattcccttcagcagaccaataccacccaccgtcccctgcatgtccaaaggccttcaattccacctgcaagtgatactgagaaaccgctgtttcctccagcaggaaattcggtgtgtcataaccatcataaccataattccataggaaagcaagttcccacctcaacaaatgccaatctcaataatgccaatatgtccaaagctgcccatggaaagcggcccagcattgggaaccttgagcatgtgtctgaaaatgggcatcattcttcccacaagcatgaccgggagcctcagagaaggtccagtgtgaaaagaacccgctattatgaaacttacattaggtccgactcaggagatgaacagctcccaactatttgccgggaagacccagagatacatggctatttcagggacccccactgcttgggggagcaggagtatttcagtagtgaggaatgctacgaggatgacagctcgcccacctggagcaggcaaaactatggctactacagcagatacccaggcagaaacatcgactctgagaggccccgaggctaccatcatccccaaggattcttggaggacgatgactcgcccgtttgctatgattcacggagatctccaaggagacgcctactacctcccaccccagcatcccaccggagatcctccttcaactttgagtgcctgcgccggcagagcagccaggaagaggtcccgtcgtctcccatcttcccccatcgcacggccctgcctctgcatctaatgcagcaacagatcatggcagttgccggcctagattcaagtaaagcccagaagtactcaccgagtcactcgacccggtcgtgggccacccctccagcaacccctccctaccgggactggacaccgtgctacacccccctgatccaagtggagcagtcagaggccctggaccaggtgaacggcagcctgccgtccctgcaccgcagctcctggtacacagacgagcccgacatctcctaccggactttcacaccagccagcctgactgtccccagcagcttccggaacaaaaacagcgacaagcagaggagtgcggacagcttggtggaggcagtcctgatatccgaaggcttgggacgctatgcaagggacccaaaatttgtgtcagcaacaaaacacgaaatcgctgatgcctgtgacctcaccatcgacgagatggagagtgcagccagcaccctgcttaatgggaacgtgcgtccccgagccaacggggatgtgggccccctctcacaccggcaggactatgagctacaggactttggtcctggctacagcgacgaagagccagaccctgggagggatgaggaggacctggcggatgaaatgatatgcatcaccaccttgtagcccccagcgaggggcagactggctctggcctcaggtggggcgcaggagagccaggggaaaagtgcctcatagttaggaaagtttaggcactagttgggagtaatattcaattaattagacttttgtataagagatgtcatgcctcaagaaagccataaacctggtaggaacaggtcccaagcggttgagcctggcagagtaccatgcgctcggccccagctgcaggaaacagcaggccccgccctctcacagaggatgggtgaggaggccagacctgccctgccccattgtccagatgggcactgctgtggagtctgcttctcccatgtaccagggcaccaggcccacccaactgaaggcatggcggcggggtgcaggggaaagttaaaggtgatgacgatcatcacacctgtgtcgttacctcagccatcggtctagcatatcagtcactgggcccaacatatccatttttaaaccctttcccccaaatacactgcgtcctggttcctgtttagctgttctgaaatacggtgtgtaagtaagtcagaacccagctaccagtgattattgcgagggcaatgggacctcataaataaggttttctgtgatgtgacgccagtttacataagagaatatcactccgatggtcggtttctgactgtcacgctaagggcaactgtaaactggaataataatgcactcgcaaccaggtaaacttagatacactagtttgtttaaaattatagatttactgtacatgacttgtaatatactataatttgtatttgtaaagagatggtctatattttgtaattactgtattgtatttgaactgcagcaatatccatgggtcctaataattgtagttccccactaaaatctagaaattattagtatttttactcgggctatccagaagtagaagaaatagagccaattctcatttattcagcgaaaatcctctggggttaaaattttaagtttgaaagaacttgacactacagaaatttttctaaaatattttgagtcactataaacctatcatctttccacaagatataccagatgactatttgcagtcttttctttgggcaagagttccatgattttgatactgtacctttggatccaccatgggttgcaactgtctttggttttgtttgtttgacttgaaccaccctctggtaagtaagtgaattacagagcaggtccagctggctgctctgccccttgggtatccatagttacggttttctctgtggcccacccagggtgttttttgcatcgctggtgcagaaatgcataggtggatgagatatagctgctcttgtcctctggggactggtggtgctgcttaagaaataaggggtgctggggacagaggagcaacgtggtgatctataggattggagtgtcggggtctgtacaaatcgtattgttgccttttacaaaactgctgtactgtatgttctctttgagggcttttgtatgcaattgaatgagggctgaagaagttttcattagaatgcactcacactctgactgtacgtcctgatgaaaacccacttttggataattagaaccgtcaaggcttcattttctgtcaacagaattaggccgactgtcaagttaccttggcagggattccctgcaatcaaaaagatagatgataggtagcaattttggtccaaaatttttaatagtatacagacaacctgttaattttttttttttttttttttgtaaataacaaacaccactttgttatgaagaccttacaaacctcttcttaagacattcttactctgatccaggcaaaaacacttcaaggtttgtaaatgactctttcctgacataaatccttttttattaaaatgcaaaatgttcttcagaataaaactgtgtaataatttttatacttgggagtgctccttgcacagagctgtcatttgccagtgagagcctccgacggggcaggtactgtgccagggcagctctgaaattatggatattcttatcctcctggttccttcggtgccaatggtaacctaataccagccgcagggagcgccatttctcctaaagggctacaccactgtcaacattatcctggactctgtgtctctctctgttgggtcttgtggcatcacatcaggccaaaattgccagaccaggaccctaagtgtctgatagaggcgatgatcttttccaaagtcagtacttacaaactggcattcttacaggctgcaccatttcctagtatgtctgctttaagcctggttcaacctctcatcgaatattaaatttttctttgtaagaaaaa

SEQ ID NO: 720 - DNA, 5342 bp, Homo sapiens
gagcatccccagaccagtgggacccagccctgatggatctggccagactgcagccaccatcccctcctcctccctgaaccactgctgggcatctgttctaccccatgcttgtctcagggatggtcatcatgcctatctgtccttgccacagctgcccacatgctaagaggtgttgtggaggaaggacagggaagcggtctcctctccgaggacccaccacttagtccagttttcctttgcaaaccaccctgaggttgaagcatttgctgcacatccattgtcttagctgttctccaggcctttagggctacagagctgtggacagactgccagtgagtgaggaggggctgcctggatacaggaccgtagacccagggcagagaggacatgccttcttcagatgcaggactttctgtggaaaagaataaagttgccatacagtccctattagtctttaactcagcatactgttttccttcaaactggtggtcaaaacatcatcattctctcagagctggagcagtaccttcctccatgcaccgtgcataagcatcttggaatgcttccctaatgaagtcgtgaacaatggaagggcttatcctgggccctgtctcaacatagcagggaccacagtgaggaaggcagctgtgagggcgccaggggagatgcagagtatctgtgacgggcccagagggatctaccaggggtgtcttctggtgggtcttgcactgcctgcaaaggctgataagccactttcagtttgttgtgatcttcaaaaagcggaccccctgttggtgagttctcagcctgcacacaggctacaggccagggtatcctgatgaccacggtggccgggtcggtgtgcgtgtcagtctgctccgtcgtggtccgagtgtgctggtggttgcagtgtgttgtgtcactcactcgttccatggctttttagcagaaccagtggcctgaggactgcttggtctgcttgtgcctctggcacctacacctaggcttcctcatcctagatgcagcaagggagtccacatcagcctccctttagatcggccaggctgtgctccttgccctgctctgggcttggagagatagggctcttgtaggcgagcctactgaagactgtcactgagacaggggcataagctcttggcctggcagatcctagcactagtaaccaggcagtgttccttggaagtgggggttttgcaaaggaggttacggggttgcaggcctcaggcatcctacctaggaccttcttgaccctctggatgcctgaccataccaacaacccttagactgccttcagtgacatcagtcagtgccctggattggcttttggggaagccttcctccccaccgctgaatcaggaaggagcaaagccaggacccaggctggccccagggcccatgtgtggtctaacctgttctgccattttcattgatctaggcgggattaaggacactgcatgacattgggccagaaatccggcgtgctatatcgtgtgatttgcaagatgacgagcctgaggaaacaaaacgagaagaagaagatgatgtgttcaaaagaaatggtgccctgcttggaaaccatgtcaatcatgttaatagtgataggagagattcccttcagcagaccaataccacccaccgtcccctgcatgtccaaaggccttcaattccacctgcaagtgatactgagaaaccgctgtttcctccagcaggaaattcggtgtgtcataaccatcataaccataattccataggaaagcaagttcccacctcaacaaatgccaatctcaataatgccaatatgtccaaagctgcccatggaaagcggcccagcattgggaaccttgagcatgtgtctgaaaatgggcatcattcttcccacaagcatgaccgggagcctcagagaaggtccagtgtgaaaagaacccgctattatgaaacttacattaggtccgactcaggagatgaacagctcccaactatttgccgggaagacccagagatacatggctatttcagggacccccactgcttgggggagcaggagtatttcagtagtgaggaatgctacgaggatgacagctcgcccacctggagcaggcaaaactatggctactacagcagatacccaggcagaaacatcgactctgagaggccccgaggctaccatcatccccaaggattcttggaggacgatgactcgcccgtttgctatgattcacggagatctccaaggagacgcctactacctcccaccccagcatcccaccggagatcctccttcaactttgagtgcctgcgccggcagagcagccaggaagaggtcccgtcgtctcccatcttcccccatcgcacggccctgcctctgcatctaatgcagcaacagatcatggcagttgccggcctagattcaagtaaagcccagaagtactcaccgagtcactcgacccggtcgtgggccacccctccagcaacccctccctaccgggactggacaccgtgctacacccccctgatccaagtggagcagtcagaggccctggaccaggtgaacggcagcctgccgtccctgcaccgcagctcctggtacacagacgagcccgacatctcctaccggactttcacaccagccagcctgactgtccccagcagcttccggaacaaaaacagcgacaagcagaggagtgcggacagcttggtggaggcagtcctgatatccgaaggcttgggacgctatgcaagggacccaaaatttgtgtcagcaacaaaacacgaaatcgctgatgcctgtgacctcaccatcgacgagatggagagtgcagccagcaccctgcttaatgggaacgtgcgtccccgagccaacggggatgtgggccccctctcacaccggcaggactatgagctacaggactttggtcctggctacagcgacgaagagccagaccctgggagggatgaggaggacctggcggatgaaatgatatgcatcaccaccttgtagcccccagcgaggggcagactggctctggcctcaggtggggcgcaggagagccaggggaaaagtgcctcatagttaggaaagtttaggcactagttgggagtaatattcaattaattagacttttgtataagagatgtcatgcctcaagaaagccataaacctggtaggaacaggtcccaagcggttgagcctggcagagtaccatgcgctcggccccagctgcaggaaacagcaggccccgccctctcacagaggatgggtgaggaggccagacctgccctgccccattgtccagatgggcactgctgtggagtctgcttctcccatgtaccagggcaccaggcccacccaactgaaggcatggcggcggggtgcaggggaaagttaaaggtgatgacgatcatcacacctgtgtcgttacctcagccatcggtctagcatatcagtcactgggcccaacatatccatttttaaaccctttcccccaaatacactgcgtcctggttcctgtttagctgttctgaaatacggtgtgtaagtaagtcagaacccagctaccagtgattattgcgagggcaatgggacctcataaataaggttttctgtgatgtgacgccagtttacataagagaatatcactccgatggtcggtttctgactgtcacgctaagggcaactgtaaactggaataataatgcactcgcaaccaggtaaacttagatacactagtttgtttaaaattatagatttactgtacatgacttgtaatatactataatttgtatttgtaaagagatggtctatattttgtaattactgtattgtatttgaactgcagcaatatccatgggtcctaataattgtagttccccactaaaatctagaaattattagtatttttactcgggctatccagaagtagaagaaatagagccaattctcatttattcagcgaaaatcctctggggttaaaattttaagtttgaaagaacttgacactacagaaatttttctaaaatattttgagtcactataaacctatcatctttccacaagatataccagatgactatttgcagtcttttctttgggcaagagttccatgattttgatactgtacctttggatccaccatgggttgcaactgtctttggttttgtttgtttgacttgaaccaccctctggtaagtaagtgaattacagagcaggtccagctggctgctctgccccttgggtatccatagttacggttttctctgtggcccacccagggtgttttttgcatcgctggtgcagaaatgcataggtggatgagatatagctgctcttgtcctctggggactggtggtgctgcttaagaaataaggggtgctggggacagaggagcaacgtggtgatctataggattggagtgtcggggtctgtacaaatcgtattgttgccttttacaaaactgctgtactgtatgttctctttgagggcttttgtatgcaattgaatgagggctgaagaagttttcattagaatgcactcacactctgactgtacgtcctgatgaaaacccacttttggataattagaaccgtcaaggcttcattttctgtcaacagaattaggccgactgtcaagttaccttggcagggattccctgcaatcaaaaagatagatgataggtagcaattttggtccaaaatttttaatagtatacagacaacctgttaattttttttttttttttttttgtaaataacaaacaccactttgttatgaagaccttacaaacctcttcttaagacattcttactctgatccaggcaaaaacacttcaaggtttgtaaatgactctttcctgacataaatccttttttattaaaatgcaaaatgttcttcagaataaaactgtgtaataatttttatacttgggagtgctccttgcacagagctgtcatttgccagtgagagcctccgacggggcaggtactgtgccagggcagctctgaaattatggatattcttatcctcctggttccttcggtgccaatggtaacctaataccagccgcagggagcgccatttctcctaaagggctacaccactgtcaacattatcctggactctgtgtctctctctgttgggtcttgtggcatcacatcaggccaaaattgccagaccaggaccctaagtgtctgatagaggcgatgatcttttccaaagtcagtacttacaaactggcattcttacaggctgcaccatttcctagtatgtctgctttaagcctggttcaacctctcatcgaatattaaatttttctttgtaagaaaaa

SEQ ID NO: 721 - DNA, 1973 bp, Homo sapiens
gggcgagcgcctccgtccccggatgtgagctccggctgcccgcggtcccgagccagcggcggcgcgggcggcggcggcgggcaccgggcaccgcggcgggcgggcagacgggcgggcatggggggagcgccgagcggccccggcggccgggccggcatcaccgcggcgtctctccgctagaggaggggacaagccagttctcctttgcagcaaaaaattacatgtatatattattaagataatatatacattggattttatttttttaaaaagtttattttgctccatttttgaaaaagagagagcttgggtggcgagcggttttttttttaaatcaattatccttattttctgttatttgtccccgtccctccccacccccctgctgaagcgagaataagggcagggaccgcggctcctacctcttggtgatccccttccccattccgcccccgcctcaacgcccagcacagtgccctgcacacagtagtcgctcaataaatgttcgtggatgatgatgatgatgatgatgaaaaaaatgcagcatcaacggcagcagcaagcggaccacgcgaacgaggcaaactatgcaagaggcaccagacttcctctttctggtgaaggaccaacttctcagccgaatagctccaagcaaactgtcctgtcttggcaagctgcaatcgatgctgctagacaggccaaggctgcccaaactatgagcacctctgcacccccacctgtaggatctctctcccaaagaaaacgtcagcaatacgccaagagcaaaaaacagggtaactcgtccaacagccgacctgcccgcgcccttttctgtttatcactcaataaccccatccgaagagcctgcattagtatagtggaatggaaaccatttgacatatttatattattggctatttttgccaattgtgtggccttagctatttacatcccattccctgaagatgattctaattcaacaaatcataacttggaaaaagtagaatatgccttcctgattatttttacagtcgagacatttttgaagattatagcgtatggattattgctacatcctaatgcttatgttaggaatggatggaatttactggattttgttatagtaatagtaggattgtttagtgtaattttggaacaattaaccaaagaaacagaaggcgggaaccactcaagcggcaaatctggaggctttgatgtcaaagccctccgtgcctttcgagtgttgcgaccacttcgactagtgtcaggagtgcccagtttacaagttgtcctgaactccattataaaagccatggttcccctccttcacatagcccttttggtattatttgtaatcataatctatgctattataggattggaactttttattggaaaaatgcacaaaacatgtttttttgctgactcagatatcgtagctgaagaggacccagctccatgtgcgttctcagggaatggacgccagtgtactgccaatggcacggaatgtaggagtggctgggttggcccgaacggaggcatcaccaactttgataactttgcctttgccatgcttactgtgtttcagtgcatcaccatggagggctggacagacgtgctctactgggtaaatgatgcgataggatgggaatggccatgggtgtattttgttagtctgatcatccttggctcatttttcgtccttaacctggttcttggtgtccttagtgggtaagcagtcggatccgtgttgcaccttctcctgctgccacgtgtgaggcaactctgcgtgtctcctagctgctccctgacagcttctctgcatgtgtttggactctgatgtcctctcagtgtgttgcttttggattgaactgtgattctttctgcctgtatctgtctgtgagattccgtgtttccaatgcttgccaaacactgttaatttaatgaaaacgttcccccaaagccagttgtgt

SEQ ID NO: 722 - DNA, 3379 bp, Homo sapiens
gggcgagcgcctccgtccccggatgtgagctccggctgcccgcggtcccgagccagcggcggcgcgggcggcggcggcgggcaccgggcaccgcggcgggcgggcagacgggcgggcatggggggagcgccgagcggccccggcggccgggccggcatcaccgcggcgtctctccgctagaggaggggacaagccagttctcctttgcagcaaaaaattacatgtatatattattaagataatatatacattggattttatttttttaaaaagtttattttgctccatttttgaaaaagagagagcttgggtggcgagcggttttttttttaaatcaattatccttattttctgttatttgtccccgtccctccccacccccctgctgaagcgagaataagggcagggaccgcggctcctacctcttggtgatccccttccccattccgcccccgcctcaacgcccagcacagtgccctgcacacagtagtcgctcaataaatgttcgtggatgatgatgatgatgatgatgaaaaaaatgcagcatcaacggcagcagcaagcggaccacgcgaacgaggcaaactatgcaagaggcaccagacttcctctttctggtgaaggaccaacttctcagccgaatagctccaagcaaactgtcctgtcttggcaagctgcaatcgatgctgctagacaggccaaggctgcccaaactatgagcacctctgcacccccacctgtaggatctctctcccaaagaaaacgtcagcaatacgccaagagcaaaaaacagggtaactcgtccaacagccgacctgcccgcgcccttttctgtttatcactcaataaccccatccgaagagcctgcattagtatagtggaatggaaaccatttgacatatttatattattggctatttttgccaattgtgtggccttagctatttacatcccattccctgaagatgattctaattcaacaaatcataacttggaaaaagtagaatatgccttcctgattatttttacagtcgagacatttttgaagattatagcgtatggattattgctacatcctaatgcttatgttaggaatggatggaatttactggattttgttatagtaatagtaggattgtttagtgtaattttggaacaattaaccaaagaaacagaaggcgggaaccactcaagcggcaaatctggaggctttgatgtcaaagccctccgtgcctttcgagtgttgcgaccacttcgactagtgtcaggagtgcccagtttacaagttgtcctgaactccattataaaagccatggttcccctccttcacatagcccttttggtattatttgtaatcataatctatgctattataggattggaactttttattggaaaaatgcacaaaacatgtttttttgctgactcagatatcgtagctgaagaggacccagctccatgtgcgttctcagggaatggacgccagtgtactgccaatggcacggaatgtaggagtggctgggttggcccgaacggaggcatcaccaactttgataactttgcctttgccatgcttactgtgtttcagtgcatcaccatggagggctggacagacgtgctctactggatgaatgatgctatgggatttgaattgccctgggtgtattttgtcagtctcgtcatctttgggtcatttttcgtactaaatcttgtacttggtgtattgagcgggcacggtggctcacgcctataatcccagcactttcggaggccgaggcagctggaccacccgagatcaggagtttgagaccagcctgactaaggcagtgaaaccctgtctctactaagaatacaaaaattagccaggcatggtggcgcatgcctgtaatcccagctacttgggaggctgaggcaggagaatcacttgaaccagggaggtggagattgcagtgagccaagactgcaccattgcattccagcctgggtgacaagagcaaaactccatctcaaaaaaaaaaaaaaaaaaaaaaaaaaaaaaaaaaaaagacttttctctcattcaacactttaccagcatctactgacagaaaatggacaattgaatttcctccaatatatatacctctgatatgtctgctttgtaaaagagtagtgtaattgcttacaacattgaaaaggttgttattggggtcctggggtagccaggatatcggcatgatttgtcaccatattcagaataaaactgtactgcaatagtgagttaattccatatcttggccaacagagaatttttggccagtggctactaaggcacacggaagtccagtctaaaagggacaggggaggactctttgtagatagttcttatgattaaaaaataacttcctatgtgttgtagtgatgattaagctgacagaatgctaaagacacccttaatgattacttgtagcaaagtacttccccacatttagctggatttgtctttggtttgaagaggctaatacgtgaaagatttgttcacagttggatgtccccttttctgaaccatgaagtaatattgtgaatggagttgaatgctgaggttagggtgccggaaagattcagggtccttcggtaccctcacatggcttggctttggtagaacaagaaactaagctctgatttggctttaaatgagagtgctaaatttcctttttctaataaagaacctagctaaacatttatatatacttttgaacactgaactttcttgttgcagagttaacagctgttgggggtagctgacagctggatcctggtgctgttggtaccatggtacctgaagtgcacaggctggtagccacacctgacattaacaagtgagtggtaacctctctgccgctggctcacagctactgtttccatagaaatggctgtcgggatcagtggaaacgaggtaagtgaaagttttcgctgatccttgtttccatcaagctgacgtctgtttccctggcaacagcagtggacagcagccaggcgctagcaacagattcagtagagctctcacttgtcagctgtggctatcatctgttcctgaccaagttcttttttttttttttaataatgtacagaaagacctctgaggacccaggaggcacctctggccacatgtgccctcctggatgctcgttttgcagatggagagctgtgtgctgagttgacttctctgtccgcagttccccctccacctgtgctctgggttgttgatgtgcaggttaaaagagggaggttgttgagggtattagtgttgcaggggaggctgttgaatctggttgatcccaaatccctaggggaagagaattcattacagtgctttcatgcacagacccagctctttata

SEQ ID NO: 723 - DNA, 468 bp, Artificial
  Synthetic oligonucleotide
gggcgagcgcctccgtccccggatgtgagctccggctgcccgcggtcccgagccagcggcggcgcgggcggcggcggcgggcaccgggcaccgcggcgggcgggcagacgggcgggcatggggggagcgccgagcggccccggcggccgggccggcatcaccgcggcgtctctccgctagaggaggggacaagccagttctcctttgcagcaaaaaattacatgtatatattattaagataatatatacattggattttatttttttaaaaagtttattttgctccatttttgaaaaagagagagcttgggtggcgagcggttttttttttaaatcaattatccttattttctgttatttgtccccgtccctccccacccccctgctgaagcgagaataagggcagggaccgcggctcctacctcttggtgatccccttccccattccgcccccgcctcaacgcccag

SEQ ID NO: 724 - DNA, 310 bp, Artificial
  Synthetic oligonucleotide
aggcaaactatgcaagaggcaccagacttcctctttctggtgaaggaccaacttctcagccgaatagctccaagcaaactgtcctgtcttggcaagctgcaatcgatgctgctagacaggccaaggctgcccaaactatgagcacctctgcacccccacctgtaggatctctctcccaaagaaaacgtcagcaatacgccaagagcaaaaaacagggtaactcgtccaacagccgacctgcccgcgcccttttctgtttatcactcaataaccccatccgaagagcctgcattagtatagtggaatggaa

SEQ ID NO: 725 - DNA, 140 bp, Artificial
  Synthetic oligonucleotide
gaaaaagtagaatatgccttcctgattatttttacagtcgagacatttttgaagattatagcgtatggattattgctacatcctaatgcttatgttaggaatggatggaatttactggattttgttatagtaatagtagg

SEQ ID NO: 726 - DNA, 143 bp, Artificial
  Synthetic oligonucleotide
attgtttagtgtaattttggaacaattaaccaaagaaacagaaggcgggaaccactcaagcggcaaatctggaggctttgatgtcaaagccctccgtgcctttcgagtgttgcgaccacttcgactagtgtcaggagtgccca

SEQ ID NO: 727 - DNA, 153 bp, Artificial
  Synthetic oligonucleotide
gtttacaagttgtcctgaactccattataaaagccatggttcccctccttcacatagcccttttggtattatttgtaatcataatctatgctattataggattggaactttttattggaaaaatgcacaaaacatgtttttttgctgactcag

SEQ ID NO: 728 - DNA, 197 bp, Artificial
  Synthetic oligonucleotide
atatcgtagctgaagaggacccagctccatgtgcgttctcagggaatggacgccagtgtactgccaatggcacggaatgtaggagtggctgggttggcccgaacggaggcatcaccaactttgataactttgcctttgccatgcttactgtgtttcagtgcatcaccatggagggctggacagacgtgctctactgg

SEQ ID NO: 729 - DNA, 242 bp, Artificial
  Synthetic oligonucleotide
gtaagcagtcggatccgtgttgcaccttctcctgctgccacgtgtgaggcaactctgcgtgtctcctagctgctccctgacagcttctctgcatgtgtttggactctgatgtcctctcagtgtgttgcttttggattgaactgtgattctttctgcctgtatctgtctgtgagattccgtgtttccaatgcttgccaaacactgttaatttaatgaaaacgttcccccaaagccagttgtgt

SEQ ID NO: 730 - DNA, 1648 bp, Artificial
  Synthetic oligonucleotide
gcacggtggctcacgcctataatcccagcactttcggaggccgaggcagctggaccacccgagatcaggagtttgagaccagcctgactaaggcagtgaaaccctgtctctactaagaatacaaaaattagccaggcatggtggcgcatgcctgtaatcccagctacttgggaggctgaggcaggagaatcacttgaaccagggaggtggagattgcagtgagccaagactgcaccattgcattccagcctgggtgacaagagcaaaactccatctcaaaaaaaaaaaaaaaaaaaaaaaaaaaaaaaaaaaaagacttttctctcattcaacactttaccagcatctactgacagaaaatggacaattgaatttcctccaatatatatacctctgatatgtctgctttgtaaaagagtagtgtaattgcttacaacattgaaaaggttgttattggggtcctggggtagccaggatatcggcatgatttgtcaccatattcagaataaaactgtactgcaatagtgagttaattccatatcttggccaacagagaatttttggccagtggctactaaggcacacggaagtccagtctaaaagggacaggggaggactctttgtagatagttcttatgattaaaaaataacttcctatgtgttgtagtgatgattaagctgacagaatgctaaagacacccttaatgattacttgtagcaaagtacttccccacatttagctggatttgtctttggtttgaagaggctaatacgtgaaagatttgttcacagttggatgtccccttttctgaaccatgaagtaatattgtgaatggagttgaatgctgaggttagggtgccggaaagattcagggtccttcggtaccctcacatggcttggctttggtagaacaagaaactaagctctgatttggctttaaatgagagtgctaaatttcctttttctaataaagaacctagctaaacatttatatatacttttgaacactgaactttcttgttgcagagttaacagctgttgggggtagctgacagctggatcctggtgctgttggtaccatggtacctgaagtgcacaggctggtagccacacctgacattaacaagtgagtggtaacctctctgccgctggctcacagctactgtttccatagaaatggctgtcgggatcagtggaaacgaggtaagtgaaagttttcgctgatccttgtttccatcaagctgacgtctgtttccctggcaacagcagtggacagcagccaggcgctagcaacagattcagtagagctctcacttgtcagctgtggctatcatctgttcctgaccaagttcttttttttttttttaataatgtacagaaagacctctgaggacccaggaggcacctctggccacatgtgccctcctggatgctcgttttgcagatggagagctgtgtgctgagttgacttctctgtccgcagttccccctccacctgtgctctgggttgttgatgtgcaggttaaaagagggaggttgttgagggtattagtgttgcaggggaggctgttgaatctggttgatcccaaatccctaggggaagagaattcattacagtgctttcatgcacagacccagctctttata

SEQ ID NO: 731 - DNA, 170 bp, Artificial
  Synthetic oligonucleotide
agaattctcaaaggaaagagagaaggcaaaagcacggggagatttccagaagctccgggagaagcagcagctggaggaggatctaaagggctacttggattggatcacccaagctgaggacatcgatccggagaatgaggaagaaggaggagaggaaggcaaacgaaata

SEQ ID NO: 732 - DNA, 161 bp, Artificial
  Synthetic oligonucleotide
ccgacgctggcgtcgctggaaccgattcaatcgcagaagatgtagggccgccgtgaagtctgtcacgttttactggctggttatcgtcctggtgtttctgaacaccttaaccatttcctctgagcactacaatcagccagattggttgacacagattcaag

SEQ ID NO: 733 - DNA, 226 bp, Artificial
  Synthetic oligonucleotide
atattgccaacaaagtcctcttggctctgttcacctgcgagatgctggtaaaaatgtacagcttgggcctccaagcatatttcgtctctcttttcaaccggtttgattgcttcgtggtgtgtggtggaatcactgagacgatcttggtggaactggaaatcatgtctcccctggggatctctgtgtttcggtgtgtgcgcctcttaagaatcttcaaagtgaccag

SEQ ID NO: 734 - DNA, 208 bp, Artificial
  Synthetic oligonucleotide
gcactggacttccctgagcaacttagtggcatccttattaaactccatgaagtccatcgcttcgctgttgcttctgctttttctcttcattatcatcttttccttgcttgggatgcagctgtttggcggcaagtttaattttgatgaaacgcaaaccaagcggagcacctttgacaatttccctcaagcacttctcacagtgttccag

SEQ ID NO: 735 - DNA, 121 bp, Artificial
  Synthetic oligonucleotide
atcctgacaggcgaagactggaatgctgtgatgtacgatggcatcatggcttacgggggcccatcctcttcaggaatgatcgtctgcatctacttcatcatcctcttcatttgtggtaact

SEQ ID NO: 736 - DNA, 148 bp, Artificial
  Synthetic oligonucleotide
taggggaagaggaagaggaagaggaggaggatgaacctgaggttcctgccggaccccgtcctcgaaggatctcggagttgaacatgaaggaaaaaattgcccccatccctgaagggagcgctttcttcattcttagcaagaccaaccc

SEQ ID NO: 737 - DNA, 130 bp, Artificial
  Synthetic oligonucleotide
gatccgcgtaggctgccacaagctcatcaaccaccacatcttcaccaacctcatccttgtcttcatcatgctgagcagcgctgccctggccgcagaggaccccatccgcagccactccttccggaacacg

SEQ ID NO: 738 - DNA, 147 bp, Artificial
  Synthetic oligonucleotide
gggacttttcatcctctacaaggatggggatgttgacagtcctgtggtccgtgaacggatctggcaaaacagtgatttcaacttcgacaacgtcctctctgctatgatggcgctcttcacagtctccacgtttgagggctggcctgc

SEQ ID NO: 739 - DNA, 202 bp, Artificial
  Synthetic oligonucleotide
gttgctgtataaagccatcgactcgaatggagagaacatcggcccaatctacaaccaccgcgtggagatctccatcttcttcatcatctacatcatcattgtagctttcttcatgatgaacatctttgtgggctttgtcatcgttacatttcaggaacaaggagaaaaagagtataagaactgtgagctggacaaaaatcag

SEQ ID NO: 740 - DNA, 159 bp, Artificial
  Synthetic oligonucleotide
cgtcagtgtgttgaatacgccttgaaagcacgtcccttgcggagatacatccccaaaaacccctaccagtacaagttctggtacgtggtgaactcttcgcctttcgaatacatgatgtttgtcctcatcatgctcaacacactctgcttggccatgcag

SEQ ID NO: 741 - DNA, 129 bp, Artificial
  Synthetic oligonucleotide
aactctgaagagagcaatagaatctccatcacctttttccgtcttttccgagtgatgcgattggtgaagcttctcagcaggggggaaggcatccggacattgctgtggacttttattaagtcctttcag

SEQ ID NO: 742 - DNA, 160 bp, Artificial
  Synthetic oligonucleotide
gtgtgcaacaggtgaggcctggcaggagatcatgctggcctgtctcccagggaagctctgtgaccctgagtcagattacaaccccggggaggagtatacatgtgggagcaactttgccattgtctatttcatcagtttttacatgctctgtgcatttctg

SEQ ID NO: 743 - DNA, 128 bp, Artificial
  Synthetic oligonucleotide
atcatcaatctgtttgtggctgtcatcatggataatttcgactatctgacccgggactggtctattttggggcctcaccatttagatgaattcaaaagaatatggtcagaatatgaccctgaggcaaa

SEQ ID NO: 744 - DNA, 204 bp, Artificial
  Synthetic oligonucleotide
attttgagccttagttgctttgcaaaaccttgctttttgctggtttgagacccctgtgttatatgctgagacctcggtgccttctgcgccggaccgcccacccgccccactctgcccctgcccctgccccagccagaagcaagtgtttaggctcttggtctaatgtgctgattcgggagagctctgtctggtctctccgtttag

SEQ ID NO: 745 - DNA, 131 bp, Artificial
  Synthetic oligonucleotide
atgatgaggtaaccgtggggaagttctatgccactttcctgatacaggactactttaggaaattcaagaaacggaaagaacaaggactggtgggaaagtaccctgcgaagaacaccacaattgccctacag

SEQ ID NO: 746 - DNA, 1456 bp, Artificial
  Synthetic oligonucleotide
gagcatccccagaccagtgggacccagccctgatggatctggccagactgcagccaccatcccctcctcctccctgaaccactgctgggcatctgttctaccccatgcttgtctcagggatggtcatcatgcctatctgtccttgccacagctgcccacatgctaagaggtgttgtggaggaaggacagggaagcggtctcctctccgaggacccaccacttagtccagttttcctttgcaaaccaccctgaggttgaagcatttgctgcacatccattgtcttagctgttctccaggcctttagggctacagagctgtggacagactgccagtgagtgaggaggggctgcctggatacaggaccgtagacccagggcagagaggacatgccttcttcagatgcaggactttctgtggaaaagaataaagttgccatacagtccctattagtctttaactcagcatactgttttccttcaaactggtggtcaaaacatcatcattctctcagagctggagcagtaccttcctccatgcaccgtgcataagcatcttggaatgcttccctaatgaagtcgtgaacaatggaagggcttatcctgggccctgtctcaacatagcagggaccacagtgaggaaggcagctgtgagggcgccaggggagatgcagagtatctgtgacgggcccagagggatctaccaggggtgtcttctggtgggtcttgcactgcctgcaaaggctgataagccactttcagtttgttgtgatcttcaaaaagcggaccccctgttggtgagttctcagcctgcacacaggctacaggccagggtatcctgatgaccacggtggccgggtcggtgtgcgtgtcagtctgctccgtcgtggtccgagtgtgctggtggttgcagtgtgttgtgtcactcactcgttccatggctttttagcagaaccagtggcctgaggactgcttggtctgcttgtgcctctggcacctacacctaggcttcctcatcctagatgcagcaagggagtccacatcagcctccctttagatcggccaggctgtgctccttgccctgctctgggcttggagagatagggctcttgtaggcgagcctactgaagactgtcactgagacaggggcataagctcttggcctggcagatcctagcactagtaaccaggcagtgttccttggaagtgggggttttgcaaaggaggttacggggttgcaggcctcaggcatcctacctaggaccttcttgaccctctggatgcctgaccataccaacaacccttagactgccttcagtgacatcagtcagtgccctggattggcttttggggaagccttcctccccaccgctgaatcaggaaggagcaaagccaggacccaggctggccccagggcccatgtgtggtctaacctgttctgccattttcattgatctag

SEQ ID NO: 747 - DNA, 368 bp, Artificial
  Synthetic oligonucleotide
agaaatggtgccctgcttggaaaccatgtcaatcatgttaatagtgataggagagattcccttcagcagaccaataccacccaccgtcccctgcatgtccaaaggccttcaattccacctgcaagtgatactgagaaaccgctgtttcctccagcaggaaattcggtgtgtcataaccatcataaccataattccataggaaagcaagttcccacctcaacaaatgccaatctcaataatgccaatatgtccaaagctgcccatggaaagcggcccagcattgggaaccttgagcatgtgtctgaaaatgggcatcattcttcccacaagcatgaccgggagcctcagagaaggtccagtgtgaaaag

SEQ ID NO: 748 - DNA, 150 bp, Artificial
  Synthetic oligonucleotide
gtccgactcaggagatgaacagctcccaactatttgccgggaagacccagagatacatggctatttcagggacccccactgcttgggggagcaggagtatttcagtagtgaggaatgctacgaggatgacagctcgcccacctggagcag

SEQ ID NO: 749 - DNA, 179 bp, Artificial
  Synthetic oligonucleotide
gtgagctgctctggctcctgtggagagcgggaggccgccctgccctggtgctcggcccactccggaagccagggccaccggcagctgcacttgggcttcccctaaaaagcaaaatgggagcagaaactccaggccagagggagagtggagctggagaaagagagccgcagagaggcagg

SEQ ID NO: 750 - DNA, 164 bp, Artificial
  Synthetic oligonucleotide
gcaaaactatggctactacagcagatacccaggcagaaacatcgactctgagaggccccgaggctaccatcatccccaaggattcttggaggacgatgactcgcccgtttgctatgattcacggagatctccaaggagacgcctactacctcccaccccagcat

SEQ ID NO: 751 - DNA, 122 bp, Artificial
  Synthetic oligonucleotide
cccaccggagatcctccttcaactttgagtgcctgcgccggcagagcagccaggaagaggtcccgtcgtctcccatcttcccccatcgcacggccctgcctctgcatctaatgcagcaacag

SEQ ID NO: 752 - DNA, 321 bp, Artificial
  Synthetic oligonucleotide
atcatggcagttgccggcctagattcaagtaaagcccagaagtactcaccgagtcactcgacccggtcgtgggccacccctccagcaacccctccctaccgggactggacaccgtgctacacccccctgatccaagtggagcagtcagaggccctggaccaggtgaacggcagcctgccgtccctgcaccgcagctcctggtacacagacgagcccgacatctcctaccggactttcacaccagccagcctgactgtccccagcagcttccggaacaaaaacagcgacaagcagaggagtgcggacagcttggtggaggca

SEQ ID NO: 753 - DNA, 787 bp, Artificial
  Synthetic oligonucleotide
gtcctgatatccgaaggcttgggacgctatgcaagggacccaaaatttgtgtcagcaacaaaacacgaaatcgctgatgcctgtgacctcaccatcgacgagatggagagtgcagccagcaccctgcttaatgggaacgtgcgtccccgagccaacggggatgtgggccccctctcacaccggcaggactatgagctacaggactttggtcctggctacagcgacgaagagccagaccctgggagggatgaggaggacctggcggatgaaatgatatgcatcaccaccttgtagcccccagcgaggggcagactggctctggcctcaggtggggcgcaggagagccaggggaaaagtgcctcatagttaggaaagtttaggcactagttgggagtaatattcaattaattagacttttgtataagagatgtcatgcctcaagaaagccataaacctggtaggaacaggtcccaagcggttgagcctggcagagtaccatgcgctcggccccagctgcaggaaacagcaggccccgccctctcacagaggatgggtgaggaggccagacctgccctgccccattgtccagatgggcactgctgtggagtctgcttctcccatgtaccagggcaccaggcccacccaactgaaggcatggcggcggggtgcaggggaaagttaaaggtgatgacgatcatcacacctgtgtcgttacctcagccatcggtctagcatatcagtcactgggcccaacatatccatttttaaaccctttcccccaaataca

SEQ ID NO: 754 - DNA, 1661 bp, Artificial
  Synthetic oligonucleotide
ataaggttttctgtgatgtgacgccagtttacataagagaatatcactccgatggtcggtttctgactgtcacgctaagggcaactgtaaactggaataataatgcactcgcaaccaggtaaacttagatacactagtttgtttaaaattatagatttactgtacatgacttgtaatatactataatttgtatttgtaaagagatggtctatattttgtaattactgtattgtatttgaactgcagcaatatccatgggtcctaataattgtagttccccactaaaatctagaaattattagtatttttactcgggctatccagaagtagaagaaatagagccaattctcatttattcagcgaaaatcctctggggttaaaattttaagtttgaaagaacttgacactacagaaatttttctaaaatattttgagtcactataaacctatcatctttccacaagatataccagatgactatttgcagtcttttctttgggcaagagttccatgattttgatactgtacctttggatccaccatgggttgcaactgtctttggttttgtttgtttgacttgaaccaccctctggtaagtaagtgaattacagagcaggtccagctggctgctctgccccttgggtatccatagttacggttttctctgtggcccacccagggtgttttttgcatcgctggtgcagaaatgcataggtggatgagatatagctgctcttgtcctctggggactggtggtgctgcttaagaaataaggggtgctggggacagaggagcaacgtggtgatctataggattggagtgtcggggtctgtacaaatcgtattgttgccttttacaaaactgctgtactgtatgttctctttgagggcttttgtatgcaattgaatgagggctgaagaagttttcattagaatgcactcacactctgactgtacgtcctgatgaaaacccacttttggataattagaaccgtcaaggcttcattttctgtcaacagaattaggccgactgtcaagttaccttggcagggattccctgcaatcaaaaagatagatgataggtagcaattttggtccaaaatttttaatagtatacagacaacctgttaattttttttttttttttttttgtaaataacaaacaccactttgttatgaagaccttacaaacctcttcttaagacattcttactctgatccaggcaaaaacacttcaaggtttgtaaatgactctttcctgacataaatccttttttattaaaatgcaaaatgttcttcagaataaaactgtgtaataatttttatacttgggagtgctccttgcacagagctgtcatttgccagtgagagcctccgacggggcaggtactgtgccagggcagctctgaaattatggatattcttatcctcctggttccttcggtgccaatggtaacctaataccagccgcagggagcgccatttctcctaaagggctacaccactgtcaacattatcctggactctgtgtctctctctgttgggtcttgtggcatcacatcaggccaaaattgccagaccaggaccctaagtgtctgatagaggcgatgatcttttccaaagtcagtacttacaaactggcattcttacaggctgcaccat

SEQ ID NO: 755 - DNA, 148 bp, Artificial
  Synthetic oligonucleotide
tctagtgcctggacccaagtcctgtccacatctgttcacccctcacagggggctcacccagcaccacaccataaaatgtcagctatttgccaaaaggatggcatcagctctgctctctaccagggccaattctgccactgcccatgcc

SEQ ID NO: 756 - DNA, 45 bp, Artificial
  Synthetic oligonucleotide
gggcagcccgccgctggagcgcgcttaaccctttggagcccgcag

SEQ ID NO: 757 - DNA, 110 bp, Artificial
  Synthetic oligonucleotide
cacagtgccctgcacacagtagtcgctcaataaatgttcgtggatgatgatgatgatgatgatgaaaaaaatgcagcatcaacggcagcagcaagcggaccacgcgaacg

SEQ ID NO: 758 - DNA, 106 bp, Artificial
  Synthetic oligonucleotide
accatttgacatatttatattattggctatttttgccaattgtgtggccttagctatttacatcccattccctgaagatgattctaattcaacaaatcataacttg

SEQ ID NO: 759 - DNA, 104 bp, Artificial
  Synthetic oligonucleotide
atgaatgatgctatgggatttgaattgccctgggtgtattttgtcagtctcgtcatctttgggtcatttttcgtactaaatcttgtacttggtgtattgagcgg

SEQ ID NO: 760 - DNA, 104 bp, Artificial
  Synthetic oligonucleotide
gtaaatgatgcgataggatgggaatggccatgggtgtattttgttagtctgatcatccttggctcatttttcgtccttaacctggttcttggtgtccttagtgg

SEQ ID NO: 761 - DNA, 64 bp, Artificial
  Synthetic oligonucleotide
gtggctcaggatgcaggtccccaaggatgtcctgatatgtgcttgtcctctttgcctccttcag

SEQ ID NO: 762 - DNA, 88 bp, Artificial
  Synthetic oligonucleotide
ctagcatgcccaccagcgagactgagtctgtgaacacagagaacgtcagcggtgaaggcgagaaccgaggctgctgtggaagtctctg

SEQ ID NO: 763 - DNA, 60 bp, Artificial
  Synthetic oligonucleotide
gtgctggtggagacggagaggcgcggccaaggcggggccctctgggtgtcggcggtgggg

SEQ ID NO: 764 - DNA, 27 bp, Artificial
  Synthetic oligonucleotide
tcaagccatctcaaaatccaaactcag

SEQ ID NO: 765 - DNA, 115 bp, Artificial
  Synthetic oligonucleotide
atattctactgaatgtcttcttggccatcgctgtagacaatttggctgatgctgaaagtctgaacactgctcagaaagaagaagcggaagaaaaggagaggaaaaagattgccag

SEQ ID NO: 766 - DNA, 70 bp, Artificial
  Synthetic oligonucleotide
aaaagagagcctagaaaataaaaagaacaacaaaccagaagtcaaccagatagccaacagtgacaacaag

SEQ ID NO: 767 - DNA, 67 bp, Artificial
  Synthetic oligonucleotide
gttacaattgatgactatagagaagaggatgaagacaaggacccctatccgccttgcgatgtgccag

SEQ ID NO: 768 - DNA, 41 bp, Artificial
  Synthetic oligonucleotide
gtaagtccccagggtggggctcgctctgggatagccctggc

SEQ ID NO: 769 - DNA, 60 bp, Artificial
  Synthetic oligonucleotide
atactgggttactttgactatgccttcacagccatctttactgttgagatcctgttgaag

SEQ ID NO: 770 - DNA, 107 bp, Artificial
  Synthetic oligonucleotide
atgacaacttttggagctttcctccacaaaggggccttctgcaggaactacttcaatttgctggatatgctggtggttggggtgtctctggtgtcatttgggattca

SEQ ID NO: 771 - DNA, 88 bp, Artificial
  Synthetic oligonucleotide
atccagtgccatctccgttgtgaagattctgagggtcttaagggtcctgcgtcccctcagggccatcaacagagcaaaaggacttaag

SEQ ID NO: 772 - DNA, 108 bp, Artificial
  Synthetic oligonucleotide
cacgtggtccagtgcgtcttcgtggccatccggaccatcggcaacatcatgatcgtcaccaccctcctgcagttcatgtttgcctgtatcggggtccagttgttcaag

SEQ ID NO: 773 - DNA, 53 bp, Artificial
  Synthetic oligonucleotide
gggaagttctatcgctgtacggatgaagccaaaagtaaccctgaagaatgcag

SEQ ID NO: 774 - DNA, 111 bp, Artificial
  Synthetic oligonucleotide
cactacgagcagtccaagatgttcaatgatgccatggacattctgaacatggtcttcaccggggtgttcaccgtcgagatggttttgaaagtcatcgcatttaagcctaag

SEQ ID NO: 775 - DNA, 43 bp, Artificial
  Synthetic oligonucleotide
gtgagttgcagaacccacttttcaaaggttgttgctgagtcac

SEQ ID NO: 776 - DNA, 84 bp, Artificial
  Synthetic oligonucleotide
gggtattttagtgacgcctggaacacgtttgactccctcatcgtaatcggcagcattatagacgtggccctcagcgaagcagac

SEQ ID NO: 777 - DNA, 31 bp, Artificial
  Synthetic oligonucleotide
cgtcgttgatattgctataactgaagtgaat

SEQ ID NO: 778 - DNA, 45 bp, Artificial
  Synthetic oligonucleotide
ccaactgaaagtgaaaatgtccctgtcccaactgctacacctggg

SEQ ID NO: 779 - DNA, 66 bp, Artificial
  Synthetic oligonucleotide
gcgctcccgtatgtggccctcctcatagccatgctgttcttcatctatgcggtcattggcatgcag

SEQ ID NO: 780 - DNA, 92 bp, Artificial
  Synthetic oligonucleotide
atgtttgggaaagttgccatgagagataacaaccagatcaataggaacaataacttccagacgtttccccaggcggtgctgctgctcttcag

SEQ ID NO: 781 - DNA, 97 bp, Artificial
  Synthetic oligonucleotide
gggaaggataaaacaccttgatgtggtcactctgcttcgacgcatccagcctcccctggggtttgggaagttatgtccacacagggtagcgtgcaag

SEQ ID NO: 782 - DNA, 103 bp, Artificial
  Synthetic oligonucleotide
agattagttgccatgaacatgcctctcaacagtgacgggacagtcatgtttaatgcaaccctgtttgctttggttcgaacggctcttaagatcaagaccgaag

SEQ ID NO: 783 - DNA, 102 bp, Artificial
  Synthetic oligonucleotide
ggaacctggagcaagctaatgaagaacttcgggctgtgataaagaaaatttggaagaaaaccagcatgaaattacttgaccaagttgtccctccagctggtg

SEQ ID NO: 784 - DNA, 77 bp, Artificial
  Synthetic oligonucleotide
gtcagtgcagtctatttcctaagtagtccttggccagtgctttggttttaatgctagtgtctccagaaagtccagag

SEQ ID NO: 785 - DNA, 117 bp, Artificial
  Synthetic oligonucleotide
gcgggattaaggacactgcatgacattgggccagaaatccggcgtgctatatcgtgtgatttgcaagatgacgagcctgaggaaacaaaacgagaagaagaagatgatgtgttcaaa

SEQ ID NO: 786 - DNA, 27 bp, Artificial
  Synthetic oligonucleotide
aacccgctattatgaaacttacattag

SEQ ID NO: 787 - DNA, 72 bp, Artificial
  Synthetic oligonucleotide
gtgaggccagattttttgttttgggtggaacctcccggggaacagtgtacctctcccccaacccccgctctg

SEQ ID NO: 788 - DNA, 99 bp, Artificial
  Synthetic oligonucleotide
ctgcgtcctggttcctgtttagctgttctgaaatacggtgtgtaagtaagtcagaacccagctaccagtgattattgcgagggcaatgggacctcataa

SEQ ID NO: 789 - DNA, 70 bp, Artificial
  Synthetic oligonucleotide
ttcctagtatgtctgctttaagcctggttcaacctctcatcgaatattaaatttttctttgtaagaaaaa

SEQ ID NO: 790 - protein, 2161 aa, Homo sapiens [sequence omitted]

SEQ ID NO: 791 - protein, 2161 aa, Homo sapiens
MMMMMMMKKMQHQRQQQADHANEANYARGTRLPLSGEGPTSQPNSSKQTVLSWQAAIDAARQAKAAQTMSTSAPPPVGSLSQRKRQQYAKSKKQGNSSNSRPARALFCLSLNNPIRRACISIVEWKPFDIFILLAIFANCVALAIYIPFPEDDSNSTNHNLEKVEYAFLIIFTVETFLKIIAYGLLLHPNAYVRNGWNLLDFVIVIVGLFSVILEQLTKETEGGNHSSGKSGGFDVKALRAFRVLRPLRLVSGVPSLQVVLNSIIKAMVPLLHIALLVLFVIIIYAIIGLELFIGKMHKTCFFADSDIVAEEDPAPCAFSGNGRQCTANGTECRSGWVGPNGGITNFDNFAFAMLTVFQCITMEGWTDVLYWMNDAMGFELPWVYFVSLVIFGSFFVLNLVLGVLSGEFSKEREKAKARGDFQKLREKQQLEEDLKGYLDWITQAEDIDPENEEEGGEEGKRNTSMPTSETESVNTENVSGEGENRGCCGSLCQAISKSKLSRRWRRWNRFNRRRCRAAVKSVTFYWLVIVLVFLNTLTISSEHYNQPDWLTQIQDIANKVLLALFTCEMLVKMYSLGLQAYFVSLFNRFDCFVVCGGITETILVELEIMSPLGISVFRCVRLLRIFKVTRHWTSLSNLVASLLNSMKSIASLLLLLFLFIIIFSLLGMQLFGGKFNFDETQTKRSTFDNFPQALLTVFQILTGEDWNAVMYDGIMAYGGPSSSGMIVCIYFIILFICGNYILLNVFLAIAVDNLADAESLNTAQKEEAEEKERKKIARKESLENKKNNKPEVNQIANSDNKVTIDDYREEDEDKDPYPPCDVPVGEEEEEEEEDEPEVPAGPRPRRISELNMKEKIAPIPEGSAFFILSKTNPIRVGCHKLINHHIFTNLILVFIMLSSAALAAEDPIRSHSFRNTILGYFDYAFTAIFTVEILLKMTTFGAFLHKGAFCRNYFNLLDMLVVGVSLVSFGIQSSAISVVKILRVLRVLRPLRAINRAKGLKHVVQCVFVAIRTIGNIMIVTTLLQFMFACIGVQLFKGKFYRCTDEAKSNPEECRGLFILYKDGDVDSPVVRERIWQNSDFNFDNVLSAMMALFTVSTFEGWPALLYKAIDSNGENIGPIYNHRVEISIFFIIYIIIVAFFMMNIFVGFVIVTFQEQGEKEYKNCELDKNQRQCVEYALKARPLRRYIPKNPYQYKFWYVVNSSPFEYMMFVLIMLNTLCLAMQHYEQSKMFNDAMDILNMVFTGVFTVEMVLKVIAFKPKGYFSDAWNTFDSLIVIGSIIDVALSEADPTESENVPVPTATPGNSEESNRISITFFRLFRVMRLVKLLSRGEGIRTLLWTFIKSFQALPYVALLIAMLFFIYAVIGMQMFGKVAMRDNNQINRNNNFQTFPQAVLLLFRCATGEAWQEIMLACLPGKLCDPESDYNPGEEYTCGSNFAIVYFISFYMLCAFLIINLFVAVIMDNFDYLTRDWSILGPHHLDEFKRIWSEYDPEAKGRIKHLDVVTLLRRIQPPLGFGKLCPHRVACKRLVAMNMPLNSDGTVMFNATLFALVRTALKIKTEGNLEQANEELRAVIKKIWKKTSMKLLDQVVPPAGDDEVTVGKFYATFLIQDYFRKFKKRKEQGLVGKYPAKNTTIALQAGLRTLHDIGPEIRRAISCDLQDDEPEETKREEEDDVFKRNGALLGNHVNHVNSDRRDSLQQTNTTHRPLHVQRPSIPPASDTEKPLFPPAGNSVCHNHHNHNSIGKQVPTSTNANLNNANMSKAAHGKRPSIGNLEHVSENGHHSSHKHDREPQRRSSVKRTRYYETYIRSDSGDEQLPTICREDPEIHGYFRDPHCLGEQEYFSSEECYEDDSSPTWSRQNYGYYSRYPGRNIDSERPRGYHHPQGFLEDDDSPVCYDSRRSPRRRLLPPTPASHRRSSFNFECLRRQSSQEEVPSSPIFPHRTALPLHLMQQQIMAVAGLDSSKAQKYSPSHSTRSWATPPATPPYRDWTPCYTPLIQVEQSEALDQVNGSLPSLHRSSWYTDEPDISYRTFTPASLTVPSSFRNKNSDKQRSADSLVEAVLISEGLGRYARDPKFVSATKHEIADACDLTIDEMESAASTLLNGNVRPRANGDVGPLSHRQDYELQDFGPGYSDEEPDPGRDEEDLADEMICITTL

SEQ ID NO: 792 - protein, 2181 aa, Homo sapiens
MMMMMMMKKMQHQRQQQADHANEANYARGTRLPLSGEGPTSQPNSSKQTVLSWQAAIDAARQAKAAQTMSTSAPPPVGSLSQRKRQQYAKSKKQGNSSNSRPARALFCLSLNNPIRRACISIVEWKPFDIFILLAIFANCVALAIYIPFPEDDSNSTNHNLEKVEYAFLIIFTVETFLKIIAYGLLLHPNAYVRNGWNLLDFVIVIVGLFSVILEQLTKETEGGNHSSGKSGGFDVKALRAFRVLRPLRLVSGVPSLQVVLNSIIKAMVPLLHIALLVLFVIIIYAIIGLELFIGKMHKTCFFADSDIVAEEDPAPCAFSGNGRQCTANGTECRSGWVGPNGGITNFDNFAFAMLTVFQCITMEGWTDVLYWVNDAIGWEWPWVYFVSLIILGSFFVLNLVLGVLSGEFSKEREKAKARGDFQKLREKQQLEEDLKGYLDWITQAEDIDPENEEEGGEEGKRNTSMPTSETESVNTENVSGEGENRGCCGSLWCWWRRRGAAKAGPSGCRRWGQAISKSKLSRRWRRWNRFNRRRCRAAVKSVTFYWLVIVLVFLNTLTISSEHYNQPDWLTQIQDIANKVLLALFTCEMLVKMYSLGLQAYFVSLFNRFDCFVVCGGITETILVELEIMSPLGISVFRCVRLLRIFKVTRHWTSLSNLVASLLNSMKSIASLLLLLFLFIIIFSLLGMQLFGGKFNFDETQTKRSTFDNFPQALLTVFQILTGEDWNAVMYDGIMAYGGPSSSGMIVCIYFIILFICGNYILLNVFLAIAVDNLADAESLNTAQKEEAEEKERKKIARKESLENKKNNKPEVNQIANSDNKVTIDDYREEDEDKDPYPPCDVPVGEEEEEEEEDEPEVPAGPRPRRISELNMKEKIAPIPEGSAFFILSKTNPIRVGCHKLINHHIFTNLILVFIMLSSAALAAEDPIRSHSFRNTILGYFDYAFTAIFTVEILLKMTTFGAFLHKGAFCRNYFNLLDMLVVGVSLVSFGIQSSAISVVKILRVLRVLRPLRAINRAKGLKHVVQCVFVAIRTIGNIMIVTTLLQFMFACIGVQLFKGKFYRCTDEAKSNPEECRGLFILYKDGDVDSPVVRERIWQNSDFNFDNVLSAMMALFTVSTFEGWPALLYKAIDSNGENIGPIYNHRVEISIFFIIYIIIVAFFMMNIFVGFVIVTFQEQGEKEYKNCELDKNQRQCVEYALKARPLRRYIPKNPYQYKFWYVVNSSPFEYMMFVLIMLNTLCLAMQHYEQSKMFNDAMDILNMVFTGVFTVEMVLKVIAFKPKGYFSDAWNTFDSLIVIGSIIDVALSEADPTESENVPVPTATPGNSEESNRISITFFRLFRVMRLVKLLSRGEGIRTLLWTFIKSFQALPYVALLIAMLFFIYAVIGMQMFGKVAMRDNNQINRNNNFQTFPQAVLLLFRCATGEAWQEIMLACLPGKLCDPESDYNPGEEYTCGSNFAIVYFISFYMLCAFLIINLFVAVIMDNFDYLTRDWSILGPHHLDEFKRIWSEYDPEAKGRIKHLDVVTLLRRIQPPLGFGKLCPHRVACKRLVAMNMPLNSDGTVMFNATLFALVRTALKIKTEGNLEQANEELRAVIKKIWKKTSMKLLDQVVPPAGDDEVTVGKFYATFLIQDYFRKFKKRKEQGLVGKYPAKNTTIALQAGLRTLHDIGPEIRRAISCDLQDDEPEETKREEEDDVFKRNGALLGNHVNHVNSDRRDSLQQTNTTHRPLHVQRPSIPPASDTEKPLFPPAGNSVCHNHHNHNSIGKQVPTSTNANLNNANMSKAAHGKRPSIGNLEHVSENGHHSSHKHDREPQRRSSVKRTRYYETYIRSDSGDEQLPTICREDPEIHGYFRDPHCLGEQEYFSSEECYEDDSSPTWSRQNYGYYSRYPGRNIDSERPRGYHHPQGFLEDDDSPVCYDSRRSPRRRLLPPTPASHRRSSFNFECLRRQSSQEEVPSSPIFPHRTALPLHLMQQQIMAVAGLDSSKAQKYSPSHSTRSWATPPATPPYRDWTPCYTPLIQVEQSEALDQVNGSLPSLHRSSWYTDEPDISYRTFTPASLTVPSSFRNKNSDKQRSADSLVEAVLISEGLGRYARDPKFVSATKHEIADACDLTIDEMESAASTLLNGNVRPRANGDVGPLSHRQDYELQDFGPGYSDEEPDPGRDEEDLADEMICITTL

SEQ ID NO: 793 - protein, 1882 aa, Homo sapiens
MMMMMMMKKMQHQRQQQADHANEANYARGTRLPLSGEGPTSQPNSSKQTVLSWQAAIDAARQAKAAQTMSTSAPPPVGSLSQRKRQQYAKSKKQGNSSNSRPARALFCLSLNNPIRRACISIVEWKPFDIFILLAIFANCVALAIYIPFPEDDSNSTNHNLEKVEYAFLIIFTVETFLKIIAYGLLLHPNAYVRNGWNLLDFVIVIVGLFSVILEQLTKETEGGNHSSGKSGGFDVKALRAFRVLRPLRLVSGVPSLQVVLNSIIKAMVPLLHIALLVLFVIIIYAIIGLELFIGKMHKTCFFADSDIVAEEDPAPCAFSGNGRQCTANGTECRSGWVGPNGGITNFDNFAFAMLTVFQCITMEGWTDVLYWVNDAIGWEWPWVYFVSLIILGSFFVLNLVLGVLSGEFSKEREKAKARGDFQKLREKQQLEEDLKGYLDWITQAEDIDPENEEEGGEEGKRNTSMPTSETESVNTENVSGEGENRGCCGSLWCWWRRRGAAKAGPSGCRRWGQAISKSKLSRRWRRWNRFNRRRCRAAVKSVTFYWLVIVLVFLNTLTISSEHYNQPDWLTQIQDIANKVLLALFTCEMLVKMYSLGLQAYFVSLFNRFDCFVVCGGITETILVELEIMSPLGISVFRCVRLLRIFKVTRHWTSLSNLVASLLNSMKSIASLLLLLFLFIIIFSLLGMQLFGGKFNFDETQTKRSTFDNFPQALLTVFQILTGEDWNAVMYDGIMAYGGPSSSGMIVCIYFIILFICGNYILLNVFLAIAVDNLADAESLNTAQKEEAEEKERKKIARKESLENKKNNKPEVNQIANSDNKVTIDDYREEDEDKDPYPPCDVPVGEEEEEEEEDEPEVPAGPRPRRISELNMKEKIAPIPEGSAFFILSKTNPIRVGCHKLINHHIFTNLILVFIMLSSAALAAEDPIRSHSFRNTILGYFDYAFTAIFTVEILLKMTTFGAFLHKGAFCRNYFNLLDMLVVGVSLVSFGIQSSAISVVKILRVLRVLRPLRAINRAKGLKHVVQCVFVAIRTIGNIMIVTTLLQFMFACIGVQLFKGKFYRCTDEAKSNPEECRGLFILYKDGDVDSPVVRERIWQNSDFNFDNVLSAMMALFTVSTFEGWPALLYKAIDSNGENIGPIYNHRVEISIFFIIYIIIVAFFMMNIFVGFVIVTFQEQGEKEYKNCELDKNQRQCVEYALKARPLRRYIPKNPYQYKFWYVVNSSPFEYMMFVLIMLNTLCLAMQHYEQSKMFNDAMDILNMVFTGVFTVEMVLKVIAFKPKGYFSDAWNTFDSLIVIGSIIDVALSEADPTESENVPVPTATPGNSEESNRISITFFRLFRVMRLVKLLSRGEGIRTLLWTFIKSFQALPYVALLIAMLFFIYAVIGMQMFGKVAMRDNNQINRNNNFQTFPQAVLLLFRCATGEAWQEIMLACLPGKLCDPESDYNPGEEYTCGSNFAIVYFISFYMLCAFLIINLFVAVIMDNFDYLTRDWSILGPHHLDEFKRIWSEYDPEAKGRIKHLDVVTLLRRIQPPLGFGKLCPHRVACKRLVAMNMPLNSDGTVMFNATLFALVRTALKIKTEGNLEQANEELRAVIKKIWKKTSMKLLDQVVPPAGDDEVTVGKFYATFLIQDYFRKFKKRKEQGLVGKYPAKNTTIALQAGLRTLHDIGPEIRRAISCDLQDDEPEETKREEEDDVFKRNGALLGNHVNHVNSDRRDSLQQTNTTHRPLHVQRPSIPPASDTEKPLFPPAGNSVCHNHHNHNSIGKQVPTSTNANLNNANMSKAAHGKRPSIGNLEHVSENGHHSSHKHDREPQRRSSVKRTRYYETYIRSDSGDEQLPTICREDPEIHGYFRDPHCLGEQEYFSSEECYEDDSSPTWSR

SEQ ID NO: 794 - protein, 2172 aa, Homo sapiens
MMMMMMMKKMQHQRQQQADHANEANYARGTRLPLSGEGPTSQPNSSKQTVLSWQAAIDAARQAKAAQTMSTSAPPPVGSLSQRKRQQYAKSKKQGNSSNSRPARALFCLSLNNPIRRACISIVEWKPFDIFILLAIFANCVALAIYIPFPEDDSNSTNHNLEKVEYAFLIIFTVETFLKIIAYGLLLHPNAYVRNGWNLLDFVIVIVGLFSVILEQLTKETEGGNHSSGKSGGFDVKALRAFRVLRPLRLVSGVPSLQVVLNSIIKAMVPLLHIALLVLFVIIIYAIIGLELFIGKMHKTCFFADSDIVAEEDPAPCAFSGNGRQCTANGTECRSGWVGPNGGITNFDNFAFAMLTVFQCITMEGWTDVLYWVNDAIGWEWPWVYFVSLIILGSFFVLNLVLGVLSGEFSKEREKAKARGDFQKLREKQQLEEDLKGYLDWITQAEDIDPENEEEGGEEGKRNTSMPTSETESVNTENVSGEGENRGCCGSLWCWWRRRGAAKAGPSGCRRWGQAISKSKLSRRWRRWNRFNRRRCRAAVKSVTFYWLVIVLVFLNTLTISSEHYNQPDWLTQIQDIANKVLLALFTCEMLVKMYSLGLQAYFVSLFNRFDCFVVCGGITETILVELEIMSPLGISVFRCVRLLRIFKVTRHWTSLSNLVASLLNSMKSIASLLLLLFLFIIIFSLLGMQLFGGKFNFDETQTKRSTFDNFPQALLTVFQILTGEDWNAVMYDGIMAYGGPSSSGMIVCIYFIILFICGNYILLNVFLAIAVDNLADAESLNTAQKEEAEEKERKKIARKESLENKKNNKPEVNQIANSDNKVTIDDYREEDEDKDPYPPCDVPVGEEEEEEEEDEPEVPAGPRPRRISELNMKEKIAPIPEGSAFFILSKTNPIRVGCHKLINHHIFTNLILVFIMLSSAALAAEDPIRSHSFRNTILGYFDYAFTAIFTVEILLKMTTFGAFLHKGAFCRNYFNLLDMLVVGVSLVSFGIQSSAISVVKILRVLRVLRPLRAINRAKGLKHVVQCVFVAIRTIGNIMIVTTLLQFMFACIGVQLFKGKFYRCTDEAKSNPEECRGLFILYKDGDVDSPVVRERIWQNSDFNFDNVLSAMMALFTVSTFEGWPALLYKAIDSNGENIGPIYNHRVEISIFFIIYIIIVAFFMMNIFVGFVIVTFQEQGEKEYKNCELDKNQRQCVEYALKARPLRRYIPKNPYQYKFWYVVNSSPFEYMMFVLIMLNTLCLAMQHYEQSKMFNDAMDILNMVFTGVFTVEMVLKVIAFKPKGYFSDAWNTFDSLIVIGSIIDVALSEADPTESENVPVPTATPGNSEESNRISITFFRLFRVMRLVKLLSRGEGIRTLLWTFIKSFQALPYVALLIAMLFFIYAVIGMQMFGKVAMRDNNQINRNNNFQTFPQAVLLLFRCATGEAWQEIMLACLPGKLCDPESDYNPGEEYTCGSNFAIVYFISFYMLCAFLIINLFVAVIMDNFDYLTRDWSILGPHHLDEFKRIWSEYDPEAKGRIKHLDVVTLLRRIQPPLGFGKLCPHRVACKRLVAMNMPLNSDGTVMFNATLFALVRTALKIKTEGNLEQANEELRAVIKKIWKKTSMKLLDQVVPPAGDDEVTVGKFYATFLIQDYFRKFKKRKEQGLVGKYPAKNTTIALQAGLRTLHDIGPEIRRAISCDLQDDEPEETKREEEDDVFKRNGALLGNHVNHVNSDRRDSLQQTNTTHRPLHVQRPSIPPASDTEKPLFPPAGNSVCHNHHNHNSIGKQVPTSTNANLNNANMSKAAHGKRPSIGNLEHVSENGHHSSHKHDREPQRRSSVKRSDSGDEQLPTICREDPEIHGYFRDPHCLGEQEYFSSEECYEDDSSPTWSRQNYGYYSRYPGRNIDSERPRGYHHPQGFLEDDDSPVCYDSRRSPRRRLLPPTPASHRRSSFNFECLRRQSSQEEVPSSPIFPHRTALPLHLMQQQIMAVAGLDSSKAQKYSPSHSTRSWATPPATPPYRDWTPCYTPLIQVEQSEALDQVNGSLPSLHRSSWYTDEPDISYRTFTPASLTVPSSFRNKNSDKQRSADSLVEAVLISEGLGRYARDPKFVSATKHEIADACDLTIDEMESAASTLLNGNVRPRANGDVGPLSHRQDYELQDFGPGYSDEEPDPGRDEEDLADEMICITTL

SEQ ID NO: 795 - protein, 2161 aa, Homo sapiens; identical to SEQ ID NO: 791

SEQ ID NO: 796 - protein, 1716 aa, Homo sapiens
MPTSETESVNTENVSGEGENRGCCGSLWCWWRRRGAAKAGPSGCRRWGQAISKSKLSRRWRRWNRFNRRRCRAAVKSVTFYWLVIVLVFLNTLTISSEHYNQPDWLTQIQDIANKVLLALFTCEMLVKMYSLGLQAYFVSLFNRFDCFVVCGGITETILVELEIMSPLGISVFRCVRLLRIFKVTRHWTSLSNLVASLLNSMKSIASLLLLLFLFIIIFSLLGMQLFGGKFNFDETQTKRSTFDNFPQALLTVFQILTGEDWNAVMYDGIMAYGGPSSSGMIVCIYFIILFICGNYILLNVFLAIAVDNLADAESLNTAQKEEAEEKERKKIARKESLENKKNNKPEVNQIANSDNKVTIDDYREEDEDKDPYPPCDVPVGEEEEEEEEDEPEVPAGPRPRRISELNMKEKIAPIPEGSAFFILSKTNPIRVGCHKLINHHIFTNLILVFIMLSSAALAAEDPIRSHSFRNTILGYFDYAFTAIFTVEILLKMTTFGAFLHKGAFCRNYFNLLDMLVVGVSLVSFGIQSSAISVVKILRVLRVLRPLRAINRAKGLKHVVQCVFVAIRTIGNIMIVTTLLQFMFACIGVQLFKGKFYRCTDEAKSNPEECRGLFILYKDGDVDSPVVRERIWQNSDFNFDNVLSAMMALFTVSTFEGWPALLYKAIDSNGENIGPIYNHRVEISIFFIIYIIIVAFFMMNIFVGFVIVTFQEQGEKEYKNCELDKNQRQCVEYALKARPLRRYIPKNPYQYKFWYVVNSSPFEYMMFVLIMLNTLCLAMQHYEQSKMFNDAMDILNMVFTGVFTVEMVLKVIAFKPKGYFSDAWNTFDSLIVIGSIIDVALSEADPTESENVPVPTATPGNSEESNRISITFFRLFRVMRLVKLLSRGEGIRTLLWTFIKSFQALPYVALLIAMLFFIYAVIGMQMFGKVAMRDNNQINRNNNFQTFPQAVLLLFRCATGEAWQEIMLACLPGKLCDPESDYNPGEEYTCGSNFAIVYFISFYMLCAFLIINLFVAVIMDNFDYLTRDWSILGPHHLDEFKRIWSEYDPEAKGRIKHLDVVTLLRRIQPPLGFGKLCPHRVACKRLVAMNMPLNSDGTVMFNATLFALVRTALKIKTEGNLEQANEELRAVIKKIWKKTSMKLLDQVVPPAGDDEVTVGKFYATFLIQDYFRKFKKRKEQGLVGKYPAKNTTIALQAGLRTLHDIGPEIRRAISCDLQDDEPEETKREEEDDVFKRNGALLGNHVNHVNSDRRDSLQQTNTTHRPLHVQRPSIPPASDTEKPLFPPAGNSVCHNHHNHNSIGKQVPTSTNANLNNANMSKAAHGKRPSIGNLEHVSENGHHSSHKHDREPQRRSSVKRTRYYETYIRSDSGDEQLPTICREDPEIHGYFRDPHCLGEQEYFSSEECYEDDSSPTWSRQNYGYYSRYPGRNIDSERPRGYHHPQGFLEDDDSPVCYDSRRSPRRRLLPPTPASHRRSSFNFECLRRQSSQEEVPSSPIFPHRTALPLHLMQQQIMAVAGLDSSKAQKYSPSHSTRSWATPPATPPYRDWTPCYTPLIQVEQSEALDQVNGSLPSLHRSSWYTDEPDISYRTFTPASLTVPSSFRNKNSDKQRSADSLVEAVLISEGLGRYARDPKFVSATKHEIADACDLTIDEMESAASTLLNGNVRPRANGDVGPLSHRQDYELQDFGPGYSDEEPDPGRDEEDLADEMICITTL

SEQ ID NO: 797 - protein, 1951 aa, Homo sapiens
MMMMMMMKKMQHQRQQQADHANEANYARGTRLPLSGEGPTSQPNSSKQTVLSWQAAIDAARQAKAAQTMSTSAPPPVGSLSQRKRQQYAKSKKQGNSSNSRPARALFCLSLNNPIRRACISIVEWKPFDIFILLAIFANCVALAIYIPFPEDDSNSTNHNLEKVEYAFLIIFTVETFLKIIAYGLLLHPNAYVRNGWNLLDFVIVIVGLFSVILEQLTKETEGGNHSSGKSGGFDVKALRAFRVLRPLRLVSGVPSLQVVLNSIIKAMVPLLHIALLVLFVIIIYAIIGLELFIGKMHKTCFFADSDIVAEEDPAPCAFSGNGRQCTANGTECRSGWVGPNGGITNFDNFAFAMLTVFQCITMEGWTDVLYWVNDAIGWEWPWVYFVSLIILGSFFVLNLVLGVLSGEFSKEREKAKARGDFQKLREKQQLEEDLKGYLDWITQAEDIDPENEEEGGEEGKRNTSMPTSETESVNTENVSGEGENRGCCGSLWCWWRRRGAAKAGPSGCRRWGQAISKSKLSRRWRRWNRFNRRRCRAAVKSVTFYWLVIVLVFLNTLTISSEHYNQPDWLTQIQDIANKVLLALFTCEMLVKMYSLGLQAYFVSLFNRFDCFVVCGGITETILVELEIMSPLGISVFRCVRLLRIFKVTRHWTSLSNLVASLLNSMKSIASLLLLLFLFIIIFSLLGMQLFGGKFNFDETQTKRSTFDNFPQALLTVFQILTGEDWNAVMYDGIMAYGGPSSSGMIVCIYFIILFICGNYILLNVFLAIAVDNLADAESLNTAQKEEAEEKERKKIARKESLENKKNNKPEVNQIANSDNKVTIDDYREEDEDKDPYPPCDVPVGEEEEEEEEDEPEVPAGPRPRRISELNMKEKIAPIPEGSAFFILSKTNPIRVGCHKLINHHIFTNLILVFIMLSSAALAAEDPIRSHSFRNTILGYFDYAFTAIFTVEILLKMTTFGAFLHKGAFCRNYFNLLDMLVVGVSLVSFGIQSSAISVVKILRVLRVLRPLRAINRAKGLKHVVQCVFVAIRTIGNIMIVTTLLQFMFACIGVQLFKGKFYRCTDEAKSNPEECRGLFILYKDGDVDSPVVRERIWQNSDFNFDNVLSAMMALFTVSTFEGWPALLYKAIDSNGENIGPIYNHRVEISIFFIIYIIIVAFFMMNIFVGFVIVTFQEQGEKEYKNCELDKNQRQCVEYALKARPLRRYIPKNPYQYKFWYVVNSSPFEYMMFVLIMLNTLCLAMQHYEQSKMFNDAMDILNMVFTGVFTVEMVLKVIAFKPKGYFSDAWNTFDSLIVIGSIIDVALSEADPTESENVPVPTATPGNSEESNRISITFFRLFRVMRLVKLLSRGEGIRTLLWTFIKSFQALPYVALLIAMLFFIYAVIGMQMFGKVAMRDNNQINRNNNFQTFPQAVLLLFRCATGEAWQEIMLACLPGKLCDPESDYNPGEEYTCGSNFAIVYFISFYMLCAFLIINLFVAVIMDNFDYLTRDWSILGPHHLDEFKRIWSEYDPEAKGRIKHLDVVTLLRRIQPPLGFGKLCPHRVACKRLVAMNMPLNSDGTVMFNATLFALVRTALKIKTEGNLEQANEELRAVIKKIWKKTSMKLLDQVVPPAGDDEVTVGKFYATFLIQDYFRKFKKRKEQGLVGKYPAKNTTIALQAGLRTLHDIGPEIRRAISCDLQDDEPEETKREEEDDVFKRNGALLGNHVNHVNSDRRDSLQQTNTTHRPLHVQRPSIPPASDTEKPLFPPAGNSVCHNHHNHNSIGKQVPTSTNANLNNANMSKAAHGKRPSIGNLEHVSENGHHSSHKHDREPQRRSSVKRSDSGDEQLPTICREDPEIHGYFRDPHCLGEQEYFSSEECYEDDSSPTWSRQNYGYYSRYPGRNIDSERPRGYHHPQGFLEDDDSPVCYDSRRSPRRRLLPPTPACEARFFVLGGTSRGTVYLSPNPRS

SEQ ID NO: 798 - protein, 1625 aa, Homo sapiens
MMMMMMMKKMQHQRQQQADHANEANYARGTRLPLSGEGPTSQPNSSKQTVLSWQAAIDAARQAKAAQTMSTSAPPPVGSLSQRKRQQYAKSKKQGNSSNSRPARALFCLSLNNPIRRACISIVEWKPFDIFILLAIFANCVALAIYIPFPEDDSNSTNHNLEKVEYAFLIIFTVETFLKIIAYGLLLHPNAYVRNGWNLLDFVIVIVGLFSVILEQLTKETEGGNHSSGKSGGFDVKALRAFRVLRPLRLVSGVPSLQVVLNSIIKAMVPLLHIALLVLFVIIIYAIIGLELFIGKMHKTCFFADSDIVAEEDPAPCAFSGNGRQCTANGTECRSGWVGPNGGITNFDNFAFAMLTVFQCITMEGWTDVLYWVNDAIGWEWPWVYFVSLIILGSFFVLNLVLGVLSGEFSKEREKAKARGDFQKLREKQQLEEDLKGYLDWITQAEDIDPENEEEGGEEGKRNTSMPTSETESVNTENVSGEGENRGCCGSLWCWWRRRGAAKAGPSGCRRWGQAISKSKLSRRWRRWNRFNRRRCRAAVKSVTFYWLVIVLVFLNTLTISSEHYNQPDWLTQIQDIANKVLLALFTCEMLVKMYSLGLQAYFVSLFNRFDCFVVCGGITETILVELEIMSPLGISVFRCVRLLRIFKVTRHWTSLSNLVASLLNSMKSIASLLLLLFLFIIIFSLLGMQLFGGKFNFDETQTKRSTFDNFPQALLTVFQILTGEDWNAVMYDGIMAYGGPSSSGMIVCIYFIILFICGNYILLNVFLAIAVDNLADAESLNTAQKEEAEEKERKKIARKESLENKKNNKPEVNQIANSDNKVTIDDYREEDEDKDPYPPCDVPVGEEEEEEEEDEPEVPAGPRPRRISELNMKEKIAPIPEGSAFFILSKTNPIRVGCHKLINHHIFTNLILVFIMLSSAALAAEDPIRSHSFRNTILGYFDYAFTAIFTVEILLKMTTFGAFLHKGAFCRNYFNLLDMLVVGVSLVSFGIQSSAISVVKILRVLRVLRPLRAINRAKGLKHVVQCVFVAIRTIGNIMIVTTLLQFMFACIGVQLFKGKFYRCTDEAKSNPEECRGLFILYKDGDVDSPVVRERIWQNSDFNFDNVLSAMMALFTVSTFEGWPALLYKAIDSNGENIGPIYNHRVEISIFFIIYIIIVAFFMMNIFVGFVIVTFQEQGEKEYKNCELDKNQRQCVEYALKARPLRRYIPKNPYQYKFWYVVNSSPFEYMMFVLIMLNTLCLAMQHYEQSKMFNDAMDILNMVFTGVFTVEMVLKVIAFKPKGYFSDAWNTFDSLIVIGSIIDVALSEADPTESENVPVPTATPGNSEESNRISITFFRLFRVMRLVKLLSRGEGIRTLLWTFIKSFQALPYVALLIAMLFFIYAVIGMQMFGKVAMRDNNQINRNNNFQTFPQAVLLLFRCATGEAWQEIMLACLPGKLCDPESDYNPGEEYTCGSNFAIVYFISFYMLCAFLIINLFVAVIMDNFDYLTRDWSILGPHHLDEFKRIWSEYDPEAKGRIKHLDVVTLLRRIQPPLGFGKLCPHRVACKRLVAMNMPLNSDGTVMFNATLFALVRTALKIKTEGNLEQANEELRAVIKKIWKKTSMKLLDQVVPPAGGQCSLFPK

SEQ ID NO: 799 - protein, 1296 aa, Homo sapiens
MMMMMMMKKMQHQRQQQADHANEANYARGTRLPLSGEGPTSQPNSSKQTVLSWQAAIDAARQAKAAQTMSTSAPPPVGSLSQRKRQQYAKSKKQGNSSNSRPARALFCLSLNNPIRRACISIVEWKPFDIFILLAIFANCVALAIYIPFPEDDSNSTNHNLEKVEYAFLIIFTVETFLKIIAYGLLLHPNAYVRNGWNLLDFVIVIVGLFSVILEQLTKETEGGNHSSGKSGGFDVKALRAFRVLRPLRLVSGVPSLQVVLNSIIKAMVPLLHIALLVLFVIIIYAIIGLELFIGKMHKTCFFADSDIVAEEDPAPCAFSGNGRQCTANGTECRSGWVGPNGGITNFDNFAFAMLTVFQCITMEGWTDVLYWVNDAIGWEWPWVYFVSLIILGSFFVLNLVLGVLSGEFSKEREKAKARGDFQKLREKQQLEEDLKGYLDWITQAEDIDPENEEEGGEEGKRNTSMPTSETESVNTENVSGEGENRGCCGSLWCWWRRRGAAKAGPSGCRRWGQAISKSKLSRRWRRWNRFNRRRCRAAVKSVTFYWLVIVLVFLNTLTISSEHYNQPDWLTQIQDIANKVLLALFTCEMLVKMYSLGLQAYFVSLFNRFDCFVVCGGITETILVELEIMSPLGISVFRCVRLLRIFKVTRHWTSLSNLVASLLNSMKSIASLLLLLFLFIIIFSLLGMQLFGGKFNFDETQTKRSTFDNFPQALLTVFQILTGEDWNAVMYDGIMAYGGPSSSGMIVCIYFIILFICGNYILLNVFLAIAVDNLADAESLNTAQKEEAEEKERKKIARKESLENKKNNKPEVNQIANSDNKVTIDDYREEDEDKDPYPPCDVPVGEEEEEEEEDEPEVPAGPRPRRISELNMKEKIAPIPEGSAFFILSKTNPIRVGCHKLINHHIFTNLILVFIMLSSAALAAEDPIRSHSFRNTILGYFDYAFTAIFTVEILLKMTTFGAFLHKGAFCRNYFNLLDMLVVGVSLVSFGIQSSAISVVKILRVLRVLRPLRAINRAKGLKHVVQCVFVAIRTIGNIMIVTTLLQFMFACIGVQLFKGKFYRCTDEAKSNPEECRGLFILYKDGDVDSPVVRERIWQNSDFNFDNVLSAMMALFTVSTFEGWPALLYKAIDSNGENIGPIYNHRVEISIFFIIYIIIVAFFMMNIFVGFVIVTFQEQGEKEYKNCELDKNQRQCVEYALKARPLRRYIPKNPYQYKFWYVVNSSPFEYMMFVLIMLNTLCLAMQHYEQSKMFNDAMDILNMVFTGVFTVEMVLKVIAFKPKVSCRTHFSKVVAES

SEQ ID NO: 800 - protein, 950 aa, Homo sapiens
MMMMMMMKKMQHQRQQQADHANEANYARGTRLPLSGEGPTSQPNSSKQTVLSWQAAIDAARQAKAAQTMSTSAPPPVGSLSQRKRQQYAKSKKQGNSSNSRPARALFCLSLNNPIRRACISIVEWKPFDIFILLAIFANCVALAIYIPFPEDDSNSTNHNLEKVEYAFLIIFTVETFLKIIAYGLLLHPNAYVRNGWNLLDFVIVIVGLFSVILEQLTKETEGGNHSSGKSGGFDVKALRAFRVLRPLRLVSGVPSLQVVLNSIIKAMVPLLHIALLVLFVIIIYAIIGLELFIGKMHKTCFFADSDIVAEEDPAPCAFSGNGRQCTANGTECRSGWVGPNGGITNFDNFAFAMLTVFQCITMEGWTDVLYWVNDAIGWEWPWVYFVSLIILGSFFVLNLVLGVLSGEFSKEREKAKARGDFQKLREKQQLEEDLKGYLDWITQAEDIDPENEEEGGEEGKRNTSMPTSETESVNTENVSGEGENRGCCGSLWCWWRRRGAAKAGPSGCRRWGQAISKSKLSRRWRRWNRFNRRRCRAAVKSVTFYWLVIVLVFLNTLTISSEHYNQPDWLTQIQDIANKVLLALFTCEMLVKMYSLGLQAYFVSLFNRFDCFVVCGGITETILVELEIMSPLGISVFRCVRLLRIFKVTRHWTSLSNLVASLLNSMKSIASLLLLLFLFIIIFSLLGMQLFGGKFNFDETQTKRSTFDNFPQALLTVFQILTGEDWNAVMYDGIMAYGGPSSSGMIVCIYFIILFICGNYILLNVFLAIAVDNLADAESLNTAQKEEAEEKERKKIARKESLENKKNNKPEVNQIANSDNKVTIDDYREEDEDKDPYPPCDVPVGEEEEEEEEDEPEVPAGPRPRRISELNMKEKIAPIPEGSAFFILSKTNPIRVGCHKLINHHIFTNLILVFIMLSSAALAAEDPIRSHSFRNTVSPQGGARSGIAL

SEQ ID NO: 801 - protein, 881 aa, Homo sapiens
VVDIAITEVNPTESENVPVPTATPGNSEESNRISITFFRLFRVMRLVKLLSRGEGIRTLLWTFIKSFQALPYVALLIAMLFFIYAVIGMQMFGKVAMRDNNQINRNNNFQTFPQAVLLLFRCATGEAWQEIMLACLPGKLCDPESDYNPGEEYTCGSNFAIVYFISFYMLCAFLIINLFVAVIMDNFDYLTRDWSILGPHHLDEFKRIWSEYDPEAKGRIKHLDVVTLLRRIQPPLGFGKLCPHRVACKRLVAMNMPLNSDGTVMFNATLFALVRTALKIKTEGNLEQANEELRAVIKKIWKKTSMKLLDQVVPPAGDDEVTVGKFYATFLIQDYFRKFKKRKEQGLVGKYPAKNTTIALQAGLRTLHDIGPEIRRAISCDLQDDEPEETKREEEDDVFKRNGALLGNHVNHVNSDRRDSLQQTNTTHRPLHVQRPSIPPASDTEKPLFPPAGNSVCHNHHNHNSIGKQVPTSTNANLNNANMSKAAHGKRPSIGNLEHVSENGHHSSHKHDREPQRRSSVKRTRYYETYIRSDSGDEQLPTICREDPEIHGYFRDPHCLGEQEYFSSEECYEDDSSPTWSRQNYGYYSRYPGRNIDSERPRGYHHPQGFLEDDDSPVCYDSRRSPRRRLLPPTPASHRRSSFNFECLRRQSSQEEVPSSPIFPHRTALPLHLMQQQIMAVAGLDSSKAQKYSPSHSTRSWATPPATPPYRDWTPCYTPLIQVEQSEALDQVNGSLPSLHRSSWYTDEPDISYRTFTPASLTVPSSFRNKNSDKQRSADSLVEAVLISEGLGRYARDPKFVSATKHEIADACDLTIDEMESAASTLLNGNVRPRANGDVGPLSHRQDYELQDFGPGYSDEEPDPGRDEEDLADEMICITTL

SEQ ID NO: 802 - protein, 611 aa, Homo sapiens
MLRPRCLLRRTAHPPHSAPAPAPARSKCLGSWSNVLIRESSVWSLRLDDEVTVGKFYATFLIQDYFRKFKKRKEQGLVGKYPAKNTTIALQAGLRTLHDIGPEIRRAISCDLQDDEPEETKREEEDDVFKRNGALLGNHVNHVNSDRRDSLQQTNTTHRPLHVQRPSIPPASDTEKPLFPPAGNSVCHNHHNHNSIGKQVPTSTNANLNNANMSKAAHGKRPSIGNLEHVSENGHHSSHKHDREPQRRSSVKRTRYYETYIRSDSGDEQLPTICREDPEIHGYFRDPHCLGEQEYFSSEECYEDDSSPTWSRQNYGYYSRYPGRNIDSERPRGYHHPQGFLEDDDSPVCYDSRRSPRRRLLPPTPASHRRSSFNFECLRRQSSQEEVPSSPIFPHRTALPLHLMQQQIMAVAGLDSSKAQKYSPSHSTRSWATPPATPPYRDWTPCYTPLIQVEQSEALDQVNGSLPSLHRSSWYTDEPDISYRTFTPASLTVPSSFRNKNSDKQRSADSLVEAVLISEGLGRYARDPKFVSATKHEIADACDLTIDEMESAASTLLNGNVRPRANGDVGPLSHRQDYELQDFGPGYSDEEPDPGRDEEDLADEMICITTL

SEQ ID NO: 803 - protein, 399 aa, Homo sapiens
MSKAAHGKRPSIGNLEHVSENGHHSSHKHDREPQRRSSVKRTRYYETYIRSDSGDEQLPTICREDPEIHGYFRDPHCLGEQEYFSSEECYEDDSSPTWSRQNYGYYSRYPGRNIDSERPRGYHHPQGFLEDDDSPVCYDSRRSPRRRLLPPTPASHRRSSFNFECLRRQSSQEEVPSSPIFPHRTALPLHLMQQQIMAVAGLDSSKAQKYSPSHSTRSWATPPATPPYRDWTPCYTPLIQVEQSEALDQVNGSLPSLHRSSWYTDEPDISYRTFTPASLTVPSSFRNKNSDKQRSADSLVEAVLISEGLGRYARDPKFVSATKHEIADACDLTIDEMESAASTLLNGNVRPRANGDVGPLSHRQDYELQDFGPGYSDEEPDPGRDEEDLADEMICITTL

SEQ ID NO: 804 - protein, 407 aa, Homo sapiens
MMMMMMMKKMQHQRQQQADHANEANYARGTRLPLSGEGPTSQPNSSKQTVLSWQAAIDAARQAKAAQTMSTSAPPPVGSLSQRKRQQYAKSKKQGNSSNSRPARALFCLSLNNPIRRACISIVEWKPFDIFILLAIFANCVALAIYIPFPEDDSNSTNHNLEKVEYAFLIIFTVETFLKIIAYGLLLHPNAYVRNGWNLLDFVIVIVGLFSVILEQLTKETEGGNHSSGKSGGFDVKALRAFRVLRPLRLVSGVPSLQVVLNSIIKAMVPLLHIALLVLFVIIIYAIIGLELFIGKMHKTCFFADSDIVAEEDPAPCAFSGNGRQCTANGTECRSGWVGPNGGITNFDNFAFAMLTVFQCITMEGWTDVLYWVNDAIGWEWPWVYFVSLIILGSFFVLNLVLGVLSG

SEQ ID NO: 805 - protein, 413 aa, Homo sapiens
MMMMMMMKKMQHQRQQQADHANEANYARGTRLPLSGEGPTSQPNSSKQTVLSWQAAIDAARQAKAAQTMSTSAPPPVGSLSQRKRQQYAKSKKQGNSSNSRPARALFCLSLNNPIRRACISIVEWKPFDIFILLAIFANCVALAIYIPFPEDDSNSTNHNLEKVEYAFLIIFTVETFLKIIAYGLLLHPNAYVRNGWNLLDFVIVIVGLFSVILEQLTKETEGGNHSSGKSGGFDVKALRAFRVLRPLRLVSGVPSLQVVLNSIIKAMVPLLHIALLVLFVIIIYAIIGLELFIGKMHKTCFFADSDIVAEEDPAPCAFSGNGRQCTANGTECRSGWVGPNGGITNFDNFAFAMLTVFQCITMEGWTDVLYWMNDAMGFELPWVYFVSLVIFGSFFVLNLVLGVLSGHGGSRL

SEQ ID NO: 806 - DNA, 3897 bp, Homo sapiens
ctcagggcagagggaggaaggacagcagaccagacagtcacagcagccttgacaaaacgttcctggaactcaagctcttctccacagaggaggacagagcagacagcagagaccatggagtctccctcggcccctccccacagatggtgcatcccctggcagaggctcctgctcacagcctcacttctaaccttctggaacccgcccaccactgccaagctcactattgaatccacgccgttcaatgtcgcagaggggaaggaggtgcttctacttgtccacaatctgccccagcatctttttggctacagctggtacaaaggtgaaagagtggatggcaaccgtcaaattataggatatgtaataggaactcaacaagctaccccagggcccgcatacagtggtcgagagataatataccccaatgcatccctgctgatccagaacatcatccagaatgacacaggattctacaccctacacgtcataaagtcagatcttgtgaatgaagaagcaactggccagttccgggtatacccggagctgcccaagccctccatctccagcaacaactccaaacccgtggaggacaaggatgctgtggccttcacctgtgaacctgagactcaggacgcaacctacctgtggtgggtaaacaatcagagcctcccggtcagtcccaggctgcagctgtccaatggcaacaggaccctcactctattcaatgtcacaagaaatgacacagcaagctacaaatgtgaaacccagaacccagtgagtgccaggcgcagtgattcagtcatcctgaatgtcctctgtgagtatatctgctcctctctggcccaggctgccagcccaaatccacagggccagaggcaggatttctcagtccctctcaggttcaagtacacagaccctcaaccctggacatccagactgtctgtgactttctgccccagaaaaacctgggcagaccaagtcttgaccaagaataggaggggaggggctgcttctgtcctgggaggctcagggtccacaccctatgatgggagaaacaggtgaatatctcagactcaggctcagtagatacaagaggggtttggctgagactttaggattgtgattcagcttagagggacactgtggtccttccatagaccaggaacttccacttccctctgacaatatcacctgtggctttattttgtttgctccagatggcccggatgcccccaccatttcccctctaaacacatcttacagatcaggggaaaatctgaacctctcctgccacgcagcctctaacccacctgcacagtactcttggtttgtcaatgggactttccagcaatccacccaagagctctttatccccaacatcactgtgaataatagtggatcctatacgtgccaagcccataactcagacactggcctcaataggaccacagtcacgacgatcacagtctatgcagagccacccaaacccttcatcaccagcaacaactccaaccccgtggaggatgaggatgctgtagccttaacctgtgaacctgagattcagaacacaacctacctgtggtgggtaaataatcagagcctcccggtcagtcccaggctgcagctgtccaatgacaacaggaccctcactctactcagtgtcacaaggaatgatgtaggaccctatgagtgtggaatccagaacgaattaagtgttgaccacagcgacccagtcatcctgaatgtcctctatggcccagacgaccccaccatttccccctcatacacctattaccgtccaggggtgaacctcagcctctcctgccatgcagcctctaacccacctgcacagtattcttggctgattgatgggaacatccagcaacacacacaagagctctttatctccaacatcactgagaagaacagcggactctatacctgccaggccaataactcagccagtggccacagcaggactacagtcaagacaatcacagtctctgcggagctgcccaagccctccatctccagcaacaactccaaacccgtggaggacaaggatgctgtggccttcacctgtgaacctgaggctcagaacacaacctacctgtggtgggtaaatggtcagagcctcccagtcagtcccaggctgcagctgtccaatggcaacaggaccctcactctattcaatgtcacaagaaatgacgcaagagcctatgtatgtggaatccagaactcagtgagtgcaaaccgcagtgacccagtcaccctggatgtcctctatgggccggacacccccatcatttcccccccagactcgtcttacctttcgggagcgaacctcaacctctcctgccactcggcctctaacccatccccgcagtattcttggcgtatcaatgggataccgcagcaacacacacaagttctctttatcgccaaaatcacgccaaataataacgggacctatgcctgttttgtctctaacttggctactggccgcaataattccatagtcaagagcatcacagtctctgcatctggaacttctcctggtctctcagctggggccactgtcggcatcatgattggagtgctggttggggttgctctgatatagcagccctggtgtagtttcttcatttcaggaagactgacagttgttttgcttcttccttaaagcatttgcaacagctacagtctaaaattgcttctttaccaaggatatttacagaaaagactctgaccagagatcgagaccatcctagccaacatcgtgaaaccccatctctactaaaaatacaaaaatgagctgggcttggtggcgcgcacctgtagtcccagttactcgggaggctgaggcaggagaatcgcttgaacccgggaggtggagattgcagtgagcccagatcgcaccactgcactccagtctggcaacagagcaagactccatctcaaaaagaaaagaaaagaagactctgacctgtactcttgaatacaagtttctgataccactgcactgtctgagaatttccaaaactttaatgaactaactgacagcttcatgaaactgtccaccaagatcaagcagagaaaataattaatttcatgggactaaatgaactaatgaggataatattttcataattttttatttgaaattttgctgattctttaaatgtcttgtttcccagatttcaggaaactttttttcttttaagctatccacagcttacagcaatttgataaaatatacttttgtgaacaaaaattgagacatttacattttctccctatgtggtcgctccagacttgggaaactattcatgaatatttatattgtatggtaatatagttattgcacaagttcaataaaaatctgctctttgtataacagaatacatttgaaaacattggttatattaccaagactttgactagaatgtcgtatttgaggatataaacccataggtaataaacccacaggtactacaaacaaagtctgaagtcagccttggtttggcttcctagtgtcaattaaacttctaaaagtttaatctgagattccttataaaaacttccagcaaagcaactttaaaaaagtctgtgtgggccgggcgcggtggctcacgcctgtaatcccagcactttgatccgccgaggcgggcggatcacgaggtcaggagatccagaccatcctggctaacacagtgaaaccccgtctctactaaaaatacaaaaaaagttagccgggcgtggtggtgggggcctgtagtcccagctactcaggaggctgaggcaggagaacggcatgaacccgggaggcagggcttgcagtgagccaagatcatgccgctgcactccagcctgggagacaaagtgagactccgtcaa

SEQ ID NO: 807 - DNA, 3347 bp, Homo sapiens
ctcagggcagagggaggaaggacagcagaccagacagtcacagcagccttgacaaaacgttcctggaactcaagctcttctccacagaggaggacagagcagacagcagagaccatggagtctccctcggcccctccccacagatggtgcatcccctggcagaggctcctgctcacagcctcacttctaaccttctggaacccgcccaccactgccaagctcactattgaatccacgccgttcaatgtcgcagaggggaaggaggtgcttctacttgtccacaatctgccccagcatctttttggctacagctggtacaaaggtgaaagagtggatggcaaccgtcaaattataggatatgtaataggaactcaacaagctaccccagggcccgcatacagtggtcgagagataatataccccaatgcatccctgctgatccagaacatcatccagaatgacacaggattctacaccctacacgtcataaagtcagatcttgtgaatgaagaagcaactggccagttccgggtatacccggagctgcccaagccctccatctccagcaacaactccaaacccgtggaggacaaggatgctgtggccttcacctgtgaacctgagactcaggacgcaacctacctgtggtgggtaaacaatcagagcctcccggtcagtcccaggctgcagctgtccaatggcaacaggaccctcactctattcaatgtcacaagaaatgacacagcaagctacaaatgtgaaacccagaacccagtgagtgccaggcgcagtgattcagtcatcctgaatgtcctctatggcccggatgcccccaccatttcccctctaaacacatcttacagatcaggggaaaatctgaacctctcctgccacgcagcctctaacccacctgcacagtactcttggtttgtcaatgggactttccagcaatccacccaagagctctttatccccaacatcactgtgaataatagtggatcctatacgtgccaagcccataactcagacactggcctcaataggaccacagtcacgacgatcacagtctatgcagagccacccaaacccttcatcaccagcaacaactccaaccccgtggaggatgaggatgctgtagccttaacctgtgaacctgagattcagaacacaacctacctgtggtgggtaaataatcagagcctcccggtcagtcccaggctgcagctgtccaatgacaacaggaccctcactctactcagtgtcacaaggaatgatgtaggaccctatgagtgtggaatccagaacgaattaagtgttgaccacagcgacccagtcatcctgaatgtcctctatggcccagacgaccccaccatttccccctcatacacctattaccgtccaggggtgaacctcagcctctcctgccatgcagcctctaacccacctgcacagtattcttggctgattgatgggaacatccagcaacacacacaagagctctttatctccaacatcactgagaagaacagcggactctatacctgccaggccaataactcagccagtggccacagcaggactacagtcaagacaatcacagtctctgcggagctgcccaagccctccatctccagcaacaactccaaacccgtggaggacaaggatgctgtggccttcacctgtgaacctgaggctcagaacacaacctacctgtggtgggtaaatggtcagagcctcccagtcagtcccaggctgcagctgtccaatggcaacaggaccctcactctattcaatgtcacaagaaatgacgcaagagcctatgtatgtggaatccagaactcagtgagtgcaaaccgcagtgacccagtcaccctggatgtcctctatgggccggacacccccatcatttcccccccagactcgtcttacctttcgggagcgaacctcaacctctcctgccactcggcctctaacccatccccgcagtattcttggcgtatcaatgggataccgcagcaacacacacaagttctctttatcgccaaaatcacgccaaataataacgggacctatgcctgttttgtctctaacttggctactggccgcaataattccatagtcaagagcatcacagtctctggtaagtggctccctggagcatcagcatcatattctggggtggagtctatctggttctcaccaaagagccaagaagacattttctttcccagtctgtgttccatgggcacaaggaaatcccaaattctatcctgagccccctcactccatctcggccaactctctcctccccggcttctctgatatctcacggctgacctcgggtccagcctggaatgtggggaggggcctcccttagccccagaaggcccccaatagtgaaagggacttcatagtccagaagaaagaagggtccttaaggtcgagttgctcctctctatcaccaatatgtccctttctgtcacctctttgtgttttttcacctactctgtgagctacaaggaacaaggaggctttgaaaccagcccacactttttccccaaatgagaggaggaagccccttggatgaggcaggagcagctcagactctgctccctgctctgcgcccggctcacccggtgactggctctgccctggctccacttggggtgggaccggggcatgtggagaaggtgtccaggtggcctgttttgaatctgggtaaatcaagctgccaatccacagcagagcctcccttgggtcaggttgcagggaaatgggaaaagagggagcctcgggacagactcctgagctgtgtcctggctctgaagtcactggctgtatgaggctgtggacacagcacataggacacagcagaggaaagtgagtgacacacacttggagaaatagggagattcagccataggggctctgcatgggagggaacaggcagtgccaaaaagtgtgtgtttatagagagggtaagactatcagccactatatatatctaacataaaacttaccattaaccatttctaagtgtacaattaagtgaaacagcataaatatcaatcaagtatattgcccggtgtggtggctcatccctgtaatcccagcactttgggaggccaaggcgagtggatcacctgaggtcaggagttcaagatacagaaaaaaaaaaatagctaggcatggtggtgggtgcctgtaatcccagctactcgggaggctgaggcaggagaatcgctcgaacctgggcggtgtagtttgcagtgagccgagattgagccactgcactccagcctgggtgacagagtgagactacatcacaaaaaaaaaaaaaaaaaagg

SEQ ID NO: 808 - DNA, 3470 bp, Homo sapiens
ctcagggcagagggaggaaggacagcagaccagacagtcacagcagccttgacaaaacgttcctggaactcaagctcttctccacagaggaggacagagcagacagcagagaccatggagtctccctcggcccctccccacagatggtgcatcccctggcagaggctcctgctcacagcctcacttctaaccttctggaacccgcccaccactgccaagctcactattgaatccacgccgttcaatgtcgcagaggggaaggaggtgcttctacttgtccacaatctgccccagcatctttttggctacagctggtacaaaggtgaaagagtggatggcaaccgtcaaattataggatatgtaataggaactcaacaagctaccccagggcccgcatacagtggtcgagagataatataccccaatgcatccctgctgatccagaacatcatccagaatgacacaggattctacaccctacacgtcataaagtcagatcttgtgaatgaagaagcaactggccagttccgggtatacccggagctgcccaagccctccatctccagcaacaactccaaacccgtggaggacaaggatgctgtggccttcacctgtgaacctgagactcaggacgcaacctacctgtggtgggtaaacaatcagagcctcccggtcagtcccaggctgcagctgtccaatggcaacaggaccctcactctattcaatgtcacaagaaatgacacagcaagctacaaatgtgaaacccagaacccagtgagtgccaggcgcagtgattcagtcatcctgaatgtcctctatggcccggatgcccccaccatttcccctctaaacacatcttacagatcaggggaaaatctgaacctctcctgccacgcagcctctaacccacctgcacagtactcttggtttgtcaatgggactttccagcaatccacccaagagctctttatccccaacatcactgtgaataatagtggatcctatacgtgccaagcccataactcagacactggcctcaataggaccacagtcacgacgatcacagtctatgcagagccacccaaacccttcatcaccagcaacaactccaaccccgtggaggatgaggatgctgtagccttaacctgtgaacctgagattcagaacacaacctacctgtggtgggtaaataatcagagcctcccggtcagtcccaggctgcagctgtccaatgacaacaggaccctcactctactcagtgtcacaaggaatgatgtaggaccctatgagtgtggaatccagaacgaattaagtgttgaccacagcgacccagtcatcctgaatgtcctctatggcccagacgaccccaccatttccccctcatacacctattaccgtccaggggtgaacctcagcctctcctgccatgcagcctctaacccacctgcacagtattcttggctgattgatgggaacatccagcaacacacacaagagctctttatctccaacatcactgagaagaacagcggactctatacctgccaggccaataactcagccagtggccacagcaggactacagtcaagacaatcacagtctctgcggagctgcccaagccctccatctccagcaacaactccaaacccgtggaggacaaggatgctgtggccttcacctgtgaacctgaggctcagaacacaacctacctgtggtgggtaaatggtcagagcctcccagtcagtcccaggctgcagctgtccaatggcaacaggaccctcactctattcaatgtcacaagaaatgacgcaagagcctatgtatgtggaatccagaactcagtgagtgcaaaccgcagtgacccagtcaccctggatgtcctctatgggccggacacccccatcatttcccccccagactcgtcttacctttcgggagcgaacctcaacctctcctgccactcggcctctaacccatccccgcagtattcttggcgtatcaatgggataccgcagcaacacacacaagttctctttatcgccaaaatcacgccaaataataacgggacctatgcctgttttgtctctaacttggctactggccgcaataattccatagtcaagagcatcacagtctctgctggggccactgtcggcatcatgattggagtgctggttggggttgctctgatatagcagccctggtgtagtttcttcatttcaggaagactgacagttgttttgcttcttccttaaagcatttgcaacagctacagtctaaaattgcttctttaccaaggatatttacagaaaagactctgaccagagatcgagaccatcctagccaacatcgtgaaaccccatctctactaaaaatacaaaaatgagctgggcttggtggcgcgcacctgtagtcccagttactcgggaggctgaggcaggagaatcgcttgaacccgggaggtggagattgcagtgagcccagatcgcaccactgcactccagtctggcaacagagcaagactccatctcaaaaagaaaagaaaagaagactctgacctgtactcttgaatacaagtttctgataccactgcactgtctgagaatttccaaaactttaatgaactaactgacagcttcatgaaactgtccaccaagatcaagcagagaaaataattaatttcatgggactaaatgaactaatgaggataatattttcataattttttatttgaaattttgctgattctttaaatgtcttgtttcccagatttcaggaaactttttttcttttaagctatccacagcttacagcaatttgataaaatatacttttgtgaacaaaaattgagacatttacattttctccctatgtggtcgctccagacttgggaaactattcatgaatatttatattgtatggtaatatagttattgcacaagttcaataaaaatctgctctttgtataacagaatacatttgaaaacattggttatattaccaagactttgactagaatgtcgtatttgaggatataaacccataggtaataaacccacaggtactacaaacaaagtctgaagtcagccttggtttggcttcctagtgtcaattaaacttctaaaagtttaatctgagattccttataaaaacttccagcaaagcaactttaaaaaagtctgtgtgggccgggcgcggtggctcacgcctgtaatcccagcactttgatccgccgaggcgggcggatcacgaggtcaggagatccagaccatcctggctaacacagtgaaaccccgtctctactaaaaatacaaaaaaagttagccgggcgtggtggtgggggcctgtagtcccagctactcaggaggctgaggcaggagaacggcatgaacccgggaggcagggcttgcagtgagccaagatcatgccgctgcactccagcctgggagacaaagtgagactccgtcaa

SEQ ID NO: 809 - DNA, 4217 bp, Homo sapiens
tccaatgggagaaaataattgcaaaacttcttctcaaagttctgtctcataactgtcaaacacacatggtccttgagggccagatttccagcagttcatgctcccccttttccaccagtcagttctgcatttgcaaatgtccacatgtatttatggagagatccacagcatcctcgcctgccctctgcaaggggagaagggacattaaagaccaaagacaggccgggtgcagtggctcatgcttgtaatcccagcactttgggaggccaaggtgggcagaacacctgaggtcagaagttcaagaccagcctgaccaatatggtgaaaccccatctctactaaaaatacaaaatttagctgggtgtggtggtgggcgcctgtagtcccagctactcgggaggctgagacaggagaatcgcttgaacccgggaggcagaggttgccatgagccgagatcgtgcctggccaacacagcaagactccatctcaaaaaacaaacaaacaaacaaagaccaaagacaaagaacatacatatggttctgctgttaaatccgggcagctcctgcctgtcacctgaagttctagatcattccctggactccactctatctttaggggtctctggctcaagtcagtcatcatcaaacacctgggaaaaactgccccaccttgtgcctccactgcctaacgactgagctgacctccaggcttgcctctggtgtcccctgtgttatttctactgaaacatccagtcccaggccaggctgcacaatatgtacagggtttaaggacaatgggaagacccatcactatccatttctaggatgtccttgcaaagggaaaccacagaaaaaatatacctagggaaacaaagtaggactgaaggtggaagggacccagcacttgaatgttccaggtgaggaccctacagtgggccaagtagtcaactggtcagggagggaccaggagaggcaccaggagctgtgacctcccccccagtcctgtgtctgttcacagcccaatgctgctgcttaattcacacttgagaaagtctgtgcttcccccacaccgagcaggcagcctcgcagtctctgagatctcagatcatcgtgcatctgtcttgtgacacatgcacccaccgtgggtttttaagggctcaggtgggctgagaggtggaaggtgccaactctgattgaaagatgcctgtgaggaatcaaaggtgccacacagggcaatcttctctctgttatctgcacagcggagctgcccaagccctccatctccagcaacaactccaaacccgtggaggacaaggatgctgtggccttcacctgtgaacctgagactcaggacgcaacctacctgtggtgggtaaacaatcagagcctcccggtcagtcccaggctgcagctgtccaatggcaacaggaccctcactctattcaatgtcacaagaaatgacacagcaagctacaaatgtgaaacccagaacccagtgagtgccaggcgcagtgattcagtcatcctgaatgtcctctatggcccggatgcccccaccatttcccctctaaacacatcttacagatcaggggaaaatctgaacctctcctgccacgcagcctctaacccacctgcacagtactcttggtttgtcaatgggactttccagcaatccacccaagagctctttatccccaacatcactgtgaataatagtggatcctatacgtgccaagcccataactcagacactggcctcaataggaccacagtcacgacgatcacagtctatgcagagccacccaaacccttcatcaccagcaacaactccaaccccgtggaggatgaggatgctgtagccttaacctgtgaacctgagattcagaacacaacctacctgtggtgggtaaataatcagagcctcccggtcagtcccaggctgcagctgtccaatgacaacaggaccctcactctactcagtgtcacaaggaatgatgtaggaccctatgagtgtggaatccagaacgaattaagtgttgaccacagcgacccagtcatcctgaatgtcctctatggcccagacgaccccaccatttccccctcatacacctattaccgtccaggggtgaacctcagcctctcctgccatgcagcctctaacccacctgcacagtattcttggctgattgatgggaacatccagcaacacacacaagagctctttatctccaacatcactgagaagaacagcggactctatacctgccaggccaataactcagccagtggccacagcaggactacagtcaagacaatcacagtctctgcggagctgcccaagccctccatctccagcaacaactccaaacccgtggaggacaaggatgctgtggccttcacctgtgaacctgaggctcagaacacaacctacctgtggtgggtaaatggtcagagcctcccagtcagtcccaggctgcagctgtccaatggcaacaggaccctcactctattcaatgtcacaagaaatgacgcaagagcctatgtatgtggaatccagaactcagtgagtgcaaaccgcagtgacccagtcaccctggatgtcctctatgggccggacacccccatcatttcccccccagactcgtcttacctttcgggagcgaacctcaacctctcctgccactcggcctctaacccatccccgcagtattcttggcgtatcaatgggataccgcagcaacacacacaagttctctttatcgccaaaatcacgccaaataataacgggacctatgcctgttttgtctctaacttggctactggccgcaataattccatagtcaagagcatcacagtctctgcatctggaacttctcctggtctctcagctggggccactgtcggcatcatgattggagtgctggttggggttgctctgatatagcagccctggtgtagtttcttcatttcaggaagactgacagttgttttgcttcttccttaaagcatttgcaacagctacagtctaaaattgcttctttaccaaggatatttacagaaaagactctgaccagagatcgagaccatcctagccaacatcgtgaaaccccatctctactaaaaatacaaaaatgagctgggcttggtggcgcgcacctgtagtcccagttactcgggaggctgaggcaggagaatcgcttgaacccgggaggtggagattgcagtgagcccagatcgcaccactgcactccagtctggcaacagagcaagactccatctcaaaaagaaaagaaaagaagactctgacctgtactcttgaatacaagtttctgataccactgcactgtctgagaatttccaaaactttaatgaactaactgacagcttcatgaaactgtccaccaagatcaagcagagaaaataattaatttcatgggactaaatgaactaatgaggataatattttcataattttttatttgaaattttgctgattctttaaatgtcttgtttcccagatttcaggaaactttttttcttttaagctatccacagcttacagcaatttgataaaatatacttttgtgaacaaaaattgagacatttacattttctccctatgtggtcgctccagacttgggaaactattcatgaatatttatattgtatggtaatatagttattgcacaagttcaataaaaatctgctctttgtataacagaatacatttgaaaacattggttatattaccaagactttgactagaatgtcgtatttgaggatataaacccataggtaataaacccacaggtactacaaacaaagtctgaagtcagccttggtttggcttcctagtgtcaattaaacttctaaaagtttaatctgagattccttataaaaacttccagcaaagcaactttaaaaaagtctgtgtgggccgggcgcggtggctcacgcctgtaatcccagcactttgatccgccgaggcgggcggatcacgaggtcaggagatccagaccatcctggctaacacagtgaaaccccgtctctactaaaaatacaaaaaaagttagccgggcgtggtggtgggggcctgtagtcccagctactcaggaggctgaggcaggagaacggcatgaacccgggaggcagggcttgcagtgagccaagatcatgccgctgcactccagcctgggagacaaagtgagactccgtcaa

SEQ ID NO: 810 - DNA, 2963 bp, Homo sapiens
ctcagggcagagggaggaaggacagcagaccagacagtcacagcagccttgacaaaacgttcctggaactcaagctcttctccacagaggaggacagagcagacagcagagaccatggagtctccctcggcccctccccacagatggtgcatcccctggcagaggctcctgctcacagcctcacttctaaccttctggaacccgcccaccactgccaagctcactattgaatccacgccgttcaatgtcgcagaggggaaggaggtgcttctacttgtccacaatctgccccagcatctttttggctacagctggtacaaaggtgaaagagtggatggcaaccgtcaaattataggatatgtaataggaactcaacaagctaccccagggcccgcatacagtggtcgagagataatataccccaatgcatccctgctgatccagaacatcatccagaatgacacaggattctacaccctacacgtcataaagtcagatcttgtgaatgaagaagcaactggccagttccgggtatacccggagctgcccaagccctccatctccagcaacaactccaaacccgtggaggacaaggatgctgtggccttcacctgtgaacctgagactcaggacgcaacctacctgtggtgggtaaacaatcagagcctcccggtcagtcccaggctgcagctgtccaatggcaacaggaccctcactctattcaatgtcacaagaaatgacacagcaagctacaaatgtgaaacccagaacccagtgagtgccaggcgcagtgattcagtcatcctgaatgtcctctatggcccagacgaccccaccatttccccctcatacacctattaccgtccaggggtgaacctcagcctctcctgccatgcagcctctaacccacctgcacagtattcttggctgattgatgggaacatccagcaacacacacaagagctctttatctccaacatcactgagaagaacagcggactctatacctgccaggccaataactcagccagtggccacagcaggactacagtcaagacaatcacagtctctgcggagctgcccaagccctccatctccagcaacaactccaaacccgtggaggacaaggatgctgtggccttcacctgtgaacctgaggctcagaacacaacctacctgtggtgggtaaatggtcagagcctcccagtcagtcccaggctgcagctgtccaatggcaacaggaccctcactctattcaatgtcacaagaaatgacgcaagagcctatgtatgtggaatccagaactcagtgagtgcaaaccgcagtgacccagtcaccctggatgtcctctatgggccggacacccccatcatttcccccccagactcgtcttacctttcgggagcgaacctcaacctctcctgccactcggcctctaacccatccccgcagtattcttggcgtatcaatgggataccgcagcaacacacacaagttctctttatcgccaaaatcacgccaaataataacgggacctatgcctgttttgtctctaacttggctactggccgcaataattccatagtcaagagcatcacagtctctgcatctggaacttctcctggtctctcagctggggccactgtcggcatcatgattggagtgctggttggggttgctctgatatagcagccctggtgtagtttcttcatttcaggaagactgacagttgttttgcttcttccttaaagcatttgcaacagctacagtctaaaattgcttctttaccaaggatatttacagaaaagactctgaccagagatcgagaccatcctagccaacatcgtgaaaccccatctctactaaaaatacaaaaatgagctgggcttggtggcgcgcacctgtagtcccagttactcgggaggctgaggcaggagaatcgcttgaacccgggaggtggagattgcagtgagcccagatcgcaccactgcactccagtctggcaacagagcaagactccatctcaaaaagaaaagaaaagaagactctgacctgtactcttgaatacaagtttctgataccactgcactgtctgagaatttccaaaactttaatgaactaactgacagcttcatgaaactgtccaccaagatcaagcagagaaaataattaatttcatgggactaaatgaactaatgaggataatattttcataattttttatttgaaattttgctgattctttaaatgtcttgtttcccagatttcaggaaactttttttcttttaagctatccacagcttacagcaatttgataaaatatacttttgtgaacaaaaattgagacatttacattttctccctatgtggtcgctccagacttgggaaactattcatgaatatttatattgtatggtaatatagttattgcacaagttcaataaaaatctgctctttgtataacagaatacatttgaaaacattggttatattaccaagactttgactagaatgtcgtatttgaggatataaacccataggtaataaacccacaggtactacaaacaaagtctgaagtcagccttggtttggcttcctagtgtcaattaaacttctaaaagtttaatctgagattccttataaaaacttccagcaaagcaactttaaaaaagtctgtgtgggccgggcgcggtggctcacgcctgtaatcccagcactttgatccgccgaggcgggcggatcacgaggtcaggagatccagaccatcctggctaacacagtgaaaccccgtctctactaaaaatacaaaaaaagttagccgggcgtggtggtgggggcctgtagtcccagctactcaggaggctgaggcaggagaacggcatgaacccgggaggcagggcttgcagtgagccaagatcatgccgctgcactccagcctgggagacaaagtgagactccgtcaa

SEQ ID NO: 811 - DNA, 1886 bp, Homo sapiens
ctcagggcagagggaggaaggacagcagaccagacagtcacagcagccttgacaaaacgttcctggaactcaagctcttctccacagaggaggacagagcagacagcagagaccatggagtctccctcggcccctccccacagatggtgcatcccctggcagaggctcctgctcacagcctcacttctaaccttctggaacccgcccaccactgccaagctcactattgaatccacgccgttcaatgtcgcagaggggaaggaggtgcttctacttgtccacaatctgccccagcatctttttggctacagctggtacaaaggtgaaagagtggatggcaaccgtcaaattataggatatgtaataggaactcaacaagctaccccagggcccgcatacagtggtcgagagataatataccccaatgcatccctgctgatccagaacatcatccagaatgacacaggattctacaccctacacgtcataaagtcagatcttgtgaatgaagaagcaactggccagttccgggtatacccggagctgcccaagccctccatctccagcaacaactccaaacccgtggaggacaaggatgctgtggccttcacctgtgaacctgagactcaggacgcaacctacctgtggtgggtaaacaatcagagcctcccggtcagtcccaggctgcagctgtccaatggcaacaggaccctcactctattcaatgtcacaagaaatgacacagcaagctacaaatgtgaaacccagaacccagtgagtgccaggcgcagtgattcagtcatcctgaatgtcctctatggcccggatgcccccaccatttcccctctaaacacatcttacagatcaggggaaaatctgaacctctcctgccacgcagcctctaacccacctgcacagtactcttggtttgtcaatgggactttccagcaatccacccaagagctctttatccccaacatcactgtgaataatagtggatcctatacgtgccaagcccataactcagacactggcctcaataggaccacagtcacgacgatcacagtctatgcagagccacccaaacccttcatcaccagcaacaactccaaccccgtggaggatgaggatgctgtagccttaacctgtgaacctgagattcagaacacaacctacctgtggtgggtaaataatcagagcctcccggtcagtcccaggctgcagctgtccaatgacaacaggaccctcactctactcagtgtcacaaggaatgatgtaggaccctatgagtgtggaatccagaacgaattaagtgttgaccacagcgacccagtcatcctgaatgtcctctatggcccagacgaccccaccatttccccctcatacacctattaccgtccaggggtgaacctcagcctctcctgccatgcagcctctaacccacctgcacagtattcttggctgattgatgggaacatccagcaacacacacaagagctctttatctccaacatcactgagaagaacagcggactctatacctgccaggccaataactcagccagtggccacagcaggactacagtcaagacaatcacagtctctgcggagctgcccaagccctccatctccagcaacaactccaaccccgtggaggacaaggatgctgtggccttcacctgtgaacctgaggttcagaacacaacctacctgtggtgggtaaatggtcagagcctcccggtcagtcccaggctgcagctgtccaatggcaacatgaccctcactctactcagctgtcaaaaggaacgatgcaggatcctatgaatgtgaaatacagaacccagcgagtgccaaccgcagtgacccagtcaccctgaatgtcctct

SEQ ID NO: 812 - DNA, 2429 bp, Homo sapiens
ctcagggcagagggaggaaggacagcagaccagacagtcacagcagccttgacaaaacgttcctggaactcaagctcttctccacagaggaggacagagcagacagcagagaccatggagtctccctcggcccctccccacagatggtgcatcccctggcagaggctcctgctcacagcctcacttctaaccttctggaacccgcccaccactgccaagctcactattgaatccacgccgttcaatgtcgcagaggggaaggaggtgcttctacttgtccacaatctgccccagcatctttttggctacagctggtacaaaggtgaaagagtggatggcaaccgtcaaattataggatatgtaataggaactcaacaagctaccccagggcccgcatacagtggtcgagagataatataccccaatgcatccctgctgatccagaacatcatccagaatgacacaggattctacaccctacacgtcataaagtcagatcttgtgaatgaagaagcaactggccagttccgggtatacccggagctgcccaagccctccatctccagcaacaactccaaacccgtggaggacaaggatgctgtggccttcacctgtgaacctgagactcaggacgcaacctacctgtggtgggtaaacaatcagagcctcccggtcagtcccaggctgcagctgtccaatggcaacaggaccctcactctattcaatgtcacaagaaatgacacagcaagctacaaatgtgaaacccagaacccagtgagtgccaggcgcagtgattcagtcatcctgaatgtcctctatgggccggacacccccatcatttcccccccagactcgtcttacctttcgggagcgaacctcaacctctcctgccactcggcctctaacccatccccgcagtattcttggcgtatcaatgggataccgcagcaacacacacaagttctctttatcgccaaaatcacgccaaataataacgggacctatgcctgttttgtctctaacttggctactggccgcaataattccatagtcaagagcatcacagtctctgcatctggaacttctcctggtctctcagctggggccactgtcggcatcatgattggagtgctggttggggttgctctgatatagcagccctggtgtagtttcttcatttcaggaagactgacagttgttttgcttcttccttaaagcatttgcaacagctacagtctaaaattgcttctttaccaaggatatttacagaaaagactctgaccagagatcgagaccatcctagccaacatcgtgaaaccccatctctactaaaaatacaaaaatgagctgggcttggtggcgcgcacctgtagtcccagttactcgggaggctgaggcaggagaatcgcttgaacccgggaggtggagattgcagtgagcccagatcgcaccactgcactccagtctggcaacagagcaagactccatctcaaaaagaaaagaaaagaagactctgacctgtactcttgaatacaagtttctgataccactgcactgtctgagaatttccaaaactttaatgaactaactgacagcttcatgaaactgtccaccaagatcaagcagagaaaataattaatttcatgggactaaatgaactaatgaggataatattttcataattttttatttgaaattttgctgattctttaaatgtcttgtttcccagatttcaggaaactttttttcttttaagctatccacagcttacagcaatttgataaaatatacttttgtgaacaaaaattgagacatttacattttctccctatgtggtcgctccagacttgggaaactattcatgaatatttatattgtatggtaatatagttattgcacaagttcaataaaaatctgctctttgtataacagaatacatttgaaaacattggttatattaccaagactttgactagaatgtcgtatttgaggatataaacccataggtaataaacccacaggtactacaaacaaagtctgaagtcagccttggtttggcttcctagtgtcaattaaacttctaaaagtttaatctgagattccttataaaaacttccagcaaagcaactttaaaaaagtctgtgtgggccgggcgcggtggctcacgcctgtaatcccagcactttgatccgccgaggcgggcggatcacgaggtcaggagatccagaccatcctggctaacacagtgaaaccccgtctctactaaaaatacaaaaaaagttagccgggcgtggtggtgggggcctgtagtcccagctactcaggaggctgaggcaggagaacggcatgaacccgggaggcagggcttgcagtgagccaagatcatgccgctgcactccagcctgggagacaaagtgagactccgtcaa

SEQ ID NO: 813 - DNA, 2429 bp, Homo sapiens
ctcagggcagagggaggaaggacagcagaccagacagtcacagcagccttgacaaaacgttcctggaactcaagctcttctccacagaggaggacagagcagacagcagagaccatggagtctccctcggcccctccccacagatggtgcatcccctggcagaggctcctgctcacagcctcacttctaaccttctggaacccgcccaccactgccaagctcactattgaatccacgccgttcaatgtcgcagaggggaaggaggtgcttctacttgtccacaatctgccccagcatctttttggctacagctggtacaaaggtgaaagagtggatggcaaccgtcaaattataggatatgtaataggaactcaacaagctaccccagggcccgcatacagtggtcgagagataatataccccaatgcatccctgctgatccagaacatcatccagaatgacacaggattctacaccctacacgtcataaagtcagatcttgtgaatgaagaagcaactggccagttccgggtatacccggagctgcccaagccctccatctccagcaacaactccaaacccgtggaggacaaggatgctgtggccttcacctgtgaacctgaggctcagaacacaacctacctgtggtgggtaaatggtcagagcctcccagtcagtcccaggctgcagctgtccaatggcaacaggaccctcactctattcaatgtcacaagaaatgacgcaagagcctatgtatgtggaatccagaactcagtgagtgcaaaccgcagtgacccagtcaccctggatgtcctctatgggccggacacccccatcatttcccccccagactcgtcttacctttcgggagcgaacctcaacctctcctgccactcggcctctaacccatccccgcagtattcttggcgtatcaatgggataccgcagcaacacacacaagttctctttatcgccaaaatcacgccaaataataacgggacctatgcctgttttgtctctaacttggctactggccgcaataattccatagtcaagagcatcacagtctctgcatctggaacttctcctggtctctcagctggggccactgtcggcatcatgattggagtgctggttggggttgctctgatatagcagccctggtgtagtttcttcatttcaggaagactgacagttgttttgcttcttccttaaagcatttgcaacagctacagtctaaaattgcttctttaccaaggatatttacagaaaagactctgaccagagatcgagaccatcctagccaacatcgtgaaaccccatctctactaaaaatacaaaaatgagctgggcttggtggcgcgcacctgtagtcccagttactcgggaggctgaggcaggagaatcgcttgaacccgggaggtggagattgcagtgagcccagatcgcaccactgcactccagtctggcaacagagcaagactccatctcaaaaagaaaagaaaagaagactctgacctgtactcttgaatacaagtttctgataccactgcactgtctgagaatttccaaaactttaatgaactaactgacagcttcatgaaactgtccaccaagatcaagcagagaaaataattaatttcatgggactaaatgaactaatgaggataatattttcataattttttatttgaaattttgctgattctttaaatgtcttgtttcccagatttcaggaaactttttttcttttaagctatccacagcttacagcaatttgataaaatatacttttgtgaacaaaaattgagacatttacattttctccctatgtggtcgctccagacttgggaaactattcatgaatatttatattgtatggtaatatagttattgcacaagttcaataaaaatctgctctttgtataacagaatacatttgaaaacattggttatattaccaagactttgactagaatgtcgtatttgaggatataaacccataggtaataaacccacaggtactacaaacaaagtctgaagtcagccttggtttggcttcctagtgtcaattaaacttctaaaagtttaatctgagattccttataaaaacttccagcaaagcaactttaaaaaagtctgtgtgggccgggcgcggtggctcacgcctgtaatcccagcactttgatccgccgaggcgggcggatcacgaggtcaggagatccagaccatcctggctaacacagtgaaaccccgtctctactaaaaatacaaaaaaagttagccgggcgtggtggtgggggcctgtagtcccagctactcaggaggctgaggcaggagaacggcatgaacccgggaggcagggcttgcagtgagccaagatcatgccgctgcactccagcctgggagacaaagtgagactccgtcaa

SEQ ID NO: 814 - DNA, 1872 bp, Homo sapiens
ctaatgttttgtatttttaatacagacggggtttcaccatattggtcaggctggtcttgaactcctgacctcaggtgatccacactcctcggcctcccaaagtgctgggattacaggcgtgaaccaccacacccggccgatttggactttttaacacaggattgggacaggattcagagggacactgtggcccttctacaatcaggagcttcccctttcctctgatgacatcacctgtggctttgttctctttgttccagatgggccggacacccccatcatttcccccccagactcgtcttacctttcgggagcgaacctcaacctctcctgccactcggcctctaacccatccccgcagtattcttggcgtatcaatgggataccgcagcaacacacacaagttctctttatcgccaaaatcacgccaaataataacgggacctatgcctgttttgtctctaacttggctactggccgcaataattccatagtcaagagcatcacagtctctgcatctggaacttctcctggtctctcagctggggccactgtcggcatcatgattggagtgctggttggggttgctctgatatagcagccctggtgtagtttcttcatttcaggaagactgacagttgttttgcttcttccttaaagcatttgcaacagctacagtctaaaattgcttctttaccaaggatatttacagaaaagactctgaccagagatcgagaccatcctagccaacatcgtgaaaccccatctctactaaaaatacaaaaatgagctgggcttggtggcgcgcacctgtagtcccagttactcgggaggctgaggcaggagaatcgcttgaacccgggaggtggagattgcagtgagcccagatcgcaccactgcactccagtctggcaacagagcaagactccatctcaaaaagaaaagaaaagaagactctgacctgtactcttgaatacaagtttctgataccactgcactgtctgagaatttccaaaactttaatgaactaactgacagcttcatgaaactgtccaccaagatcaagcagagaaaataattaatttcatgggactaaatgaactaatgaggataatattttcataattttttatttgaaattttgctgattctttaaatgtcttgtttcccagatttcaggaaactttttttcttttaagctatccacagcttacagcaatttgataaaatatacttttgtgaacaaaaattgagacatttacattttctccctatgtggtcgctccagacttgggaaactattcatgaatatttatattgtatggtaatatagttattgcacaagttcaataaaaatctgctctttgtataacagaatacatttgaaaacattggttatattaccaagactttgactagaatgtcgtatttgaggatataaacccataggtaataaacccacaggtactacaaacaaagtctgaagtcagccttggtttggcttcctagtgtcaattaaacttctaaaagtttaatctgagattccttataaaaacttccagcaaagcaactttaaaaaagtctgtgtgggccgggcgcggtggctcacgcctgtaatcccagcactttgatccgccgaggcgggcggatcacgaggtcaggagatccagaccatcctggctaacacagtgaaaccccgtctctactaaaaatacaaaaaaagttagccgggcgtggtggtgggggcctgtagtcccagctactcaggaggctgaggcaggagaacggcatgaacccgggaggcagggcttgcagtgagccaagatcatgccgctgcactccagcctgggagacaaagtgagactccgtcaa

SEQ ID NO: 815 - DNA, 3125 bp, Homo sapiens
ggctcaagtgatcttctgccccagcctcttgagaagctgggactacagacatgtgacaccaagcctggatagttttttaaagaaattttgtagacactgtgtctgcctatgttgcccaggctggtcttgacctcctgacctcaagtaatcctcttgcttgagtctcccaatgtgctgggattaaatgtgtgagccgctatacctccattttcatttctgattttagtaatttgaatcttctctcttttttcttagtcaatctaataaatgattgtcaattttgttgatcttttttgaagaaccaacttttggtttcattgattccttctattgtttttcaattttccattttatttatttaaactctaatccttattatttccttcatgtactatcctgtggtttgaggtggttctttttctgtatcctgaagttgtaaagttaggttgttgatttgagatctctctttatatttaatgtatttaccattaaatttctcacacaagattcttaacttctctgagccttcaattcttcaactgaaaattgtaataattctcatcaccaggaaatggaggaaaaatgaaaattgcaataagaatgactgtttaacagtattgttttaaagatttaatgtaatattcgattaagctttcagcaaaatgctacacacagagggaaacttcataaatattggctcgagatcactactgttattattagcttgaagttaggcagttctagagccaaatcctagatccacttctcactaattatatgactttggataagttttttcaccactccaagtctctgtcatttcatctgtaagatggaaatcatgcctacccaacagggttattgtatggatcaaatgagatgccagaaaagcatttacagtagctaacatagcattaatcatcagcctgagttgactagtgagagccaagccccaaatgaaaacccactaggacatggttactggctaaaaatgggggagagaaaaaaaagttaagtgcaaagaatcaagcctggtatgttagttttcatccactgagattcagccaagatggaattagaggtgcaagataatttaccggggggaaccaccatgaggaaaagtggagtagaagtgggaggagcctgagagagccctcagaccacgatgcagatctgattcctgagaaggagaaagaggagagagttttagatagtgatgcagttctcagagtttccacaaggctggtggggcgtcctcaagcccctcacccatgagagagaagcagagtcccccagaactgggcttttcattcccctggtgggagcccatgagaagcgagttctctgtgcaacggacttagtaaatacagaatgcactagcctgggccttctgccaatcaagtccctgccacagagacccaacagacttatttatgcctaccacaactgagacactgagaaaaagatgcaaccatgaaaagatagaaagttctaatgacacgcaaaaatagcaatcagactttctcaaatttcaaagccttcagaaatagctgagtgcagacaggccagggtggaattgacagaagactgatcaccaactagcaacacagtgagagagaaaaaattgcaactttcccacaaaactaatgcattccttgaagcaacaagtagagactgcttcatgctgagagctggaacctggggcaccccactgtaaaataacatcacattcattccttctcttttctttccatgacggacgattcagcatctggaacttctcctggtctctcagctggggccactgtcggcatcatgattggagtgctggttggggttgctctgatatagcagccctggtgtagtttcttcatttcaggaagactgacagttgttttgcttcttccttaaagcatttgcaacagctacagtctaaaattgcttctttaccaaggatatttacagaaaagactctgaccagagatcgagaccatcctagccaacatcgtgaaaccccatctctactaaaaatacaaaaatgagctgggcttggtggcgcgcacctgtagtcccagttactcgggaggctgaggcaggagaatcgcttgaacccgggaggtggagattgcagtgagcccagatcgcaccactgcactccagtctggcaacagagcaagactccatctcaaaaagaaaagaaaagaagactctgacctgtactcttgaatacaagtttctgataccactgcactgtctgagaatttccaaaactttaatgaactaactgacagcttcatgaaactgtccaccaagatcaagcagagaaaataattaatttcatgggactaaatgaactaatgaggataatattttcataattttttatttgaaattttgctgattctttaaatgtcttgtttcccagatttcaggaaactttttttcttttaagctatccacagcttacagcaatttgataaaatatacttttgtgaacaaaaattgagacatttacattttctccctatgtggtcgctccagacttgggaaactattcatgaatatttatattgtatggtaatatagttattgcacaagttcaataaaaatctgctctttgtataacagaatacatttgaaaacattggttatattaccaagactttgactagaatgtcgtatttgaggatataaacccataggtaataaacccacaggtactacaaacaaagtctgaagtcagccttggtttggcttcctagtgtcaattaaacttctaaaagtttaatctgagattccttataaaaacttccagcaaagcaactttaaaaaagtctgtgtgggccgggcgcggtggctcacgcctgtaatcccagcactttgatccgccgaggcgggcggatcacgaggtcaggagatccagaccatcctggctaacacagtgaaaccccgtctctactaaaaatacaaaaaaagttagccgggcgtggtggtgggggcctgtagtcccagctactcaggaggctgaggcaggagaacggcatgaacccgggaggcagggcttgcagtgagccaagatcatgccgctgcactccagcctgggagacaaagtgagactccgtcaa

SEQ ID NO: 816 - DNA, 178 bp, Artificial
  Synthetic oligonucleotide
ctcagggcagagggaggaaggacagcagaccagacagtcacagcagccttgacaaaacgttcctggaactcaagctcttctccacagaggaggacagagcagacagcagagaccatggagtctccctcggcccctccccacagatggtgcatcccctggcagaggctcctgctcacag

SEQ ID NO: 817 - DNA, 278 bp, Artificial
  Synthetic oligonucleotide
cctcacttctaaccttctggaacccgcccaccactgccaagctcactattgaatccacgccgttcaatgtcgcagaggggaaggaggtgcttctacttgtccacaatctgccccagcatctttttggctacagctggtacaaaggtgaaagagtggatggcaaccgtcaaattataggatatgtaataggaactcaacaagctaccccagggcccgcatacagtggtcgagagataatataccccaatgcatccctgctgatccagaacatcatccag

SEQ ID NO: 818 - DNA, 1258 bp, Artificial
  Synthetic oligonucleotide
tccaatgggagaaaataattgcaaaacttcttctcaaagttctgtctcataactgtcaaacacacatggtccttgagggccagatttccagcagttcatgctcccccttttccaccagtcagttctgcatttgcaaatgtccacatgtatttatggagagatccacagcatcctcgcctgccctctgcaaggggagaagggacattaaagaccaaagacaggccgggtgcagtggctcatgcttgtaatcccagcactttgggaggccaaggtgggcagaacacctgaggtcagaagttcaagaccagcctgaccaatatggtgaaaccccatctctactaaaaatacaaaatttagctgggtgtggtggtgggcgcctgtagtcccagctactcgggaggctgagacaggagaatcgcttgaacccgggaggcagaggttgccatgagccgagatcgtgcctggccaacacagcaagactccatctcaaaaaacaaacaaacaaacaaagaccaaagacaaagaacatacatatggttctgctgttaaatccgggcagctcctgcctgtcacctgaagttctagatcattccctggactccactctatctttaggggtctctggctcaagtcagtcatcatcaaacacctgggaaaaactgccccaccttgtgcctccactgcctaacgactgagctgacctccaggcttgcctctggtgtcccctgtgttatttctactgaaacatccagtcccaggccaggctgcacaatatgtacagggtttaaggacaatgggaagacccatcactatccatttctaggatgtccttgcaaagggaaaccacagaaaaaatatacctagggaaacaaagtaggactgaaggtggaagggacccagcacttgaatgttccaggtgaggaccctacagtgggccaagtagtcaactggtcagggagggaccaggagaggcaccaggagctgtgacctcccccccagtcctgtgtctgttcacagcccaatgctgctgcttaattcacacttgagaaagtctgtgcttcccccacaccgagcaggcagcctcgcagtctctgagatctcagatcatcgtgcatctgtcttgtgacacatgcacccaccgtgggtttttaagggctcaggtgggctgagaggtggaaggtgccaactctgattgaaagatgcctgtgaggaatcaaaggtgccacacagggcaatcttctctctgttatctgcacag

SEQ ID NO: 819 - DNA, 400 bp, Artificial
  Synthetic oligonucleotide
gtgagtatatctgctcctctctggcccaggctgccagcccaaatccacagggccagaggcaggatttctcagtccctctcaggttcaagtacacagaccctcaaccctggacatccagactgtctgtgactttctgccccagaaaaacctgggcagaccaagtcttgaccaagaataggaggggaggggctgcttctgtcctgggaggctcagggtccacaccctatgatgggagaaacaggtgaatatctcagactcaggctcagtagatacaagaggggtttggctgagactttaggattgtgattcagcttagagggacactgtggtccttccatagaccaggaacttccacttccctctgacaatatcacctgtggctttattttgtttgctccag

SEQ ID NO: 820 - DNA, 255 bp, Artificial
  Synthetic oligonucleotide
atggcccggatgcccccaccatttcccctctaaacacatcttacagatcaggggaaaatctgaacctctcctgccacgcagcctctaacccacctgcacagtactcttggtttgtcaatgggactttccagcaatccacccaagagctctttatccccaacatcactgtgaataatagtggatcctatacgtgccaagcccataactcagacactggcctcaataggaccacagtcacgacgatcacagtctatg

SEQ ID NO: 821 - DNA, 190 bp, Artificial
  Synthetic oligonucleotide
ctctcctgccatgcagcctctaacccacctgcacagtattcttggctgattgatgggaacatccagcaacacacacaagagctctttatctccaacatcactgagaagaacagcggactctatacctgccaggccaataactcagccagtggccacagcaggactacagtcaagacaatcacagtctctg

SEQ ID NO: 822 - DNA, 127 bp, Artificial
  Synthetic oligonucleotide
ctgtccaatggcaacaggaccctcactctattcaatgtcacaagaaatgacgcaagagcctatgtatgtggaatccagaactcagtgagtgcaaaccgcagtgacccagtcaccctggatgtcctct

SEQ ID NO: 823 - DNA, 136 bp, Artificial
  Synthetic oligonucleotide
ctaatgttttgtatttttaatacagacggggtttcaccatattggtcaggctggtcttgaactcctgacctcaggtgatccacactcctcggcctcccaaagtgctgggattacaggcgtgaaccaccacacccgg

SEQ ID NO: 824 - DNA, 124 bp, Artificial
  Synthetic oligonucleotide
ccgatttggactttttaacacaggattgggacaggattcagagggacactgtggcccttctacaatcaggagcttcccctttcctctgatgacatcacctgtggctttgttctctttgttccag

SEQ ID NO: 825 - DNA, 255 bp, Artificial
  Synthetic oligonucleotide
atgggccggacacccccatcatttcccccccagactcgtcttacctttcgggagcgaacctcaacctctcctgccactcggcctctaacccatccccgcagtattcttggcgtatcaatgggataccgcagcaacacacacaagttctctttatcgccaaaatcacgccaaataataacgggacctatgcctgttttgtctctaacttggctactggccgcaataattccatagtcaagagcatcacagtctctg

SEQ ID NO: 826 - DNA, 1174 bp, Artificial
  Synthetic oligonucleotide
ctggggtggagtctatctggttctcaccaaagagccaagaagacattttctttcccagtctgtgttccatgggcacaaggaaatcccaaattctatcctgagccccctcactccatctcggccaactctctcctccccggcttctctgatatctcacggctgacctcgggtccagcctggaatgtggggaggggcctcccttagccccagaaggcccccaatagtgaaagggacttcatagtccagaagaaagaagggtccttaaggtcgagttgctcctctctatcaccaatatgtccctttctgtcacctctttgtgttttttcacctactctgtgagctacaaggaacaaggaggctttgaaaccagcccacactttttccccaaatgagaggaggaagccccttggatgaggcaggagcagctcagactctgctccctgctctgcgcccggctcacccggtgactggctctgccctggctccacttggggtgggaccggggcatgtggagaaggtgtccaggtggcctgttttgaatctgggtaaatcaagctgccaatccacagcagagcctcccttgggtcaggttgcagggaaatgggaaaagagggagcctcgggacagactcctgagctgtgtcctggctctgaagtcactggctgtatgaggctgtggacacagcacataggacacagcagaggaaagtgagtgacacacacttggagaaatagggagattcagccataggggctctgcatgggagggaacaggcagtgccaaaaagtgtgtgtttatagagagggtaagactatcagccactatatatatctaacataaaacttaccattaaccatttctaagtgtacaattaagtgaaacagcataaatatcaatcaagtatattgcccggtgtggtggctcatccctgtaatcccagcactttgggaggccaaggcgagtggatcacctgaggtcaggagttcaagatacagaaaaaaaaaaatagctaggcatggtggtgggtgcctgtaatcccagctactcgggaggctgaggcaggagaatcgctcgaacctgggcggtgtagtttgcagtgagccgagattgagccactgcactccagcctgggtgacagagtgagactacatcacaaaaaaaaaaaaaaaaaagg

SEQ ID NO: 827 - DNA, 1762 bp, Artificial
  Synthetic oligonucleotide
ggctcaagtgatcttctgccccagcctcttgagaagctgggactacagacatgtgacaccaagcctggatagttttttaaagaaattttgtagacactgtgtctgcctatgttgcccaggctggtcttgacctcctgacctcaagtaatcctcttgcttgagtctcccaatgtgctgggattaaatgtgtgagccgctatacctccattttcatttctgattttagtaatttgaatcttctctcttttttcttagtcaatctaataaatgattgtcaattttgttgatcttttttgaagaaccaacttttggtttcattgattccttctattgtttttcaattttccattttatttatttaaactctaatccttattatttccttcatgtactatcctgtggtttgaggtggttctttttctgtatcctgaagttgtaaagttaggttgttgatttgagatctctctttatatttaatgtatttaccattaaatttctcacacaagattcttaacttctctgagccttcaattcttcaactgaaaattgtaataattctcatcaccaggaaatggaggaaaaatgaaaattgcaataagaatgactgtttaacagtattgttttaaagatttaatgtaatattcgattaagctttcagcaaaatgctacacacagagggaaacttcataaatattggctcgagatcactactgttattattagcttgaagttaggcagttctagagccaaatcctagatccacttctcactaattatatgactttggataagttttttcaccactccaagtctctgtcatttcatctgtaagatggaaatcatgcctacccaacagggttattgtatggatcaaatgagatgccagaaaagcatttacagtagctaacatagcattaatcatcagcctgagttgactagtgagagccaagccccaaatgaaaacccactaggacatggttactggctaaaaatgggggagagaaaaaaaagttaagtgcaaagaatcaagcctggtatgttagttttcatccactgagattcagccaagatggaattagaggtgcaagataatttaccggggggaaccaccatgaggaaaagtggagtagaagtgggaggagcctgagagagccctcagaccacgatgcagatctgattcctgagaaggagaaagaggagagagttttagatagtgatgcagttctcagagtttccacaaggctggtggggcgtcctcaagcccctcacccatgagagagaagcagagtcccccagaactgggcttttcattcccctggtgggagcccatgagaagcgagttctctgtgcaacggacttagtaaatacagaatgcactagcctgggccttctgccaatcaagtccctgccacagagacccaacagacttatttatgcctaccacaactgagacactgagaaaaagatgcaaccatgaaaagatagaaagttctaatgacacgcaaaaatagcaatcagactttctcaaatttcaaagccttcagaaatagctgagtgcagacaggccagggtggaattgacagaagactgatcaccaactagcaacacagtgagagagaaaaaattgcaactttcccacaaaactaatgcattccttgaagcaacaagtagagactgcttcatgctgagagctggaacctggggcaccccactgtaaaataacatcacattcattccttctcttttctttccatgacggacg

SEQ ID NO: 828 - DNA, 179 bp, Artificial
  Synthetic oligonucleotide
ctcaaaaagaaaagaaaagaagactctgacctgtactcttgaatacaagtttctgataccactgcactgtctgagaatttccaaaactttaatgaactaactgacagcttcatgaaactgtccaccaagatcaagcagagaaaataattaatttcatgggactaaatgaactaatgagg

SEQ ID NO: 829 - DNA, 732 bp, Artificial
  Synthetic oligonucleotide
tttgctgattctttaaatgtcttgtttcccagatttcaggaaactttttttcttttaagctatccacagcttacagcaatttgataaaatatacttttgtgaacaaaaattgagacatttacattttctccctatgtggtcgctccagacttgggaaactattcatgaatatttatattgtatggtaatatagttattgcacaagttcaataaaaatctgctctttgtataacagaatacatttgaaaacattggttatattaccaagactttgactagaatgtcgtatttgaggatataaacccataggtaataaacccacaggtactacaaacaaagtctgaagtcagccttggtttggcttcctagtgtcaattaaacttctaaaagtttaatctgagattccttataaaaacttccagcaaagcaactttaaaaaagtctgtgtgggccgggcgcggtggctcacgcctgtaatcccagcactttgatccgccgaggcgggcggatcacgaggtcaggagatccagaccatcctggctaacacagtgaaaccccgtctctactaaaaatacaaaaaaagttagccgggcgtggtggtgggggcctgtagtcccagctactcaggaggctgaggcaggagaacggcatgaacccgggaggcagggcttgcagtgagccaagatcatgccgctgcactccagcctgggagacaaagtgagactccgtcaa

SEQ ID NO: 830 - DNA, 280 bp, Artificial
  Synthetic oligonucleotide
cggagctgcccaagccctccatctccagcaacaactccaaccccgtggaggacaaggatgctgtggccttcacctgtgaacctgaggttcagaacacaacctacctgtggtgggtaaatggtcagagcctcccggtcagtcccaggctgcagctgtccaatggcaacatgaccctcactctactcagctgtcaaaaggaacgatgcaggatcctatgaatgtgaaatacagaacccagcgagtgccaaccgcagtgacccagtcaccctgaatgtcctct

SEQ ID NO: 831 - DNA, 82 bp, Artificial
  Synthetic oligonucleotide
aatgacacaggattctacaccctacacgtcataaagtcagatcttgtgaatgaagaagcaactggccagttccgggtatacc

SEQ ID NO: 832 - DNA, 104 bp, Artificial
  Synthetic oligonucleotide
cggagctgcccaagccctccatctccagcaacaactccaaacccgtggaggacaaggatgctgtggccttcacctgtgaacctgagactcaggacgcaacctac

SEQ ID NO: 833 - DNA, 48 bp, Artificial
  Synthetic oligonucleotide
ctgtggtgggtaaacaatcagagcctcccggtcagtcccaggctgcag

SEQ ID NO: 834 - DNA, 48 bp, Artificial
  Synthetic oligonucleotide
ctgtccaatggcaacaggaccctcactctattcaatgtcacaagaaat

SEQ ID NO: 835 - DNA, 79 bp, Artificial
  Synthetic oligonucleotide
gacacagcaagctacaaatgtgaaacccagaacccagtgagtgccaggcgcagtgattcagtcatcctgaatgtcctct

SEQ ID NO: 836 - DNA, 3 bp, Artificial
  Synthetic oligonucleotide
cag

SEQ ID NO: 837 - DNA, 6 bp, Artificial
  Synthetic oligonucleotide
agccac

SEQ ID NO: 838 - DNA, 7 bp, Artificial
  Synthetic oligonucleotide
ccaaacc

SEQ ID NO: 839 - DNA, 18 bp, Artificial
  Synthetic oligonucleotide
cttcatcaccagcaacaa

SEQ ID NO: 840 - DNA, 70 bp, Artificial
  Synthetic oligonucleotide
ctccaaccccgtggaggatgaggatgctgtagccttaacctgtgaacctgagattcagaacacaacctac

SEQ ID NO: 841 - DNA, 24 bp, Artificial
  Synthetic oligonucleotide
ctgtggtgggtaaataatcagagc

SEQ ID NO: 842 - DNA, 24 bp, Artificial
  Synthetic oligonucleotide
ctcccggtcagtcccaggctgcag

SEQ ID NO: 843 - DNA, 78 bp, Artificial
  Synthetic oligonucleotide
ctgtccaatgacaacaggaccctcactctactcagtgtcacaaggaatgatgtaggaccctatgagtgtggaatccag

SEQ ID NO: 844 - DNA, 30 bp, Artificial
  Synthetic oligonucleotide
aacgaattaagtgttgaccacagcgaccca

SEQ ID NO: 845 - DNA, 19 bp, Artificial
  Synthetic oligonucleotide
gtcatcctgaatgtcctct

SEQ ID NO: 846 - DNA, 19 bp, Artificial
  Synthetic oligonucleotide
atggcccagacgaccccac

SEQ ID NO: 847 - DNA, 18 bp, Artificial
  Synthetic oligonucleotide
catttccccctcatacac

SEQ ID NO: 848 - DNA, 28 bp, Artificial
  Synthetic oligonucleotide
ctattaccgtccaggggtgaacctcagc

SEQ ID NO: 849 - DNA, 22 bp, Artificial
  Synthetic oligonucleotide
cggagctgcccaagccctccat

SEQ ID NO: 850 - DNA, 82 bp, Artificial
  Synthetic oligonucleotide
ctccagcaacaactccaaacccgtggaggacaaggatgctgtggccttcacctgtgaacctgaggctcagaacacaacctac

SEQ ID NO: 851 - DNA, 48 bp, Artificial
  Synthetic oligonucleotide
ctgtggtgggtaaatggtcagagcctcccagtcagtcccaggctgcag

SEQ ID NO: 852 - DNA, 33 bp, Artificial
  Synthetic oligonucleotide
gtaagtggctccctggagcatcagcatcatatt

SEQ ID NO: 853 - DNA, 6 bp, Artificial
  Synthetic oligonucleotide
attcag

SEQ ID NO: 854 - DNA, 27 bp, Artificial
  Synthetic oligonucleotide
catctggaacttctcctggtctctcag

SEQ ID NO: 855 - DNA, 92 bp, Artificial
  Synthetic oligonucleotide
ctggggccactgtcggcatcatgattggagtgctggttggggttgctctgatatagcagccctggtgtagtttcttcatttcaggaagactg

SEQ ID NO: 856 - DNA, 26 bp, Artificial
  Synthetic oligonucleotide
acagttgttttgcttcttccttaaag

SEQ ID NO: 857 - DNA, 101 bp, Artificial
  Synthetic oligonucleotide
catttgcaacagctacagtctaaaattgcttctttaccaaggatatttacagaaaagactctgaccagagatcgagaccatcctagccaacatcgtgaaac

SEQ ID NO: 858 - DNA, 34 bp, Artificial
  Synthetic oligonucleotide
cccatctctactaaaaatacaaaaatgagctggg

SEQ ID NO: 859 - DNA, 44 bp, Artificial
  Synthetic oligonucleotide
cttggtggcgcgcacctgtagtcccagttactcgggaggctgag

SEQ ID NO: 860 - DNA, 4 bp, Artificial
  Synthetic oligonucleotide
gcag

SEQ ID NO: 861 - DNA, 88 bp, Artificial
  Synthetic oligonucleotide
gagaatcgcttgaacccgggaggtggagattgcagtgagcccagatcgcaccactgcactccagtctggcaacagagcaagactccat

SEQ ID NO: 862 - DNA, 30 bp, Artificial
  Synthetic oligonucleotide
ataatattttcataattttttatttgaaat

SEQ ID NO: 863 - protein, 702 aa, Homo sapiens
MESPSAPPHRWCIPWQRLLLTASLLTFWNPPTTAKLTIESTPFNVAEGKEVLLLVHNLPQHLFGYSWYKGERVDGNRQIIGYVIGTQQATPGPAYSGREIIYPNASLLIQNIIQNDTGFYTLHVIKSDLVNEEATGQFRVYPELPKPSISSNNSKPVEDKDAVAFTCEPETQDATYLWWVNNQSLPVSPRLQLSNGNRTLTLFNVTRNDTASYKCETQNPVSARRSDSVILNVLYGPDAPTISPLNTSYRSGENLNLSCHAASNPPAQYSWFVNGTFQQSTQELFIPNITVNNSGSYTCQAHNSDTGLNRTTVTTITVYAEPPKPFITSNNSNPVEDEDAVALTCEPEIQNTTYLWWVNNQSLPVSPRLQLSNDNRTLTLLSVTRNDVGPYECGIQNELSVDHSDPVILNVLYGPDDPTISPSYTYYRPGVNLSLSCHAASNPPAQYSWLIDGNIQQHTQELFISNITEKNSGLYTCQANNSASGHSRTTVKTITVSAELPKPSISSNNSKPVEDKDAVAFTCEPEAQNTTYLWWVNGQSLPVSPRLQLSNGNRTLTLFNVTRNDARAYVCGIQNSVSANRSDPVTLDVLYGPDTPIISPPDSSYLSGANLNLSCHSASNPSPQYSWRINGIPQQHTQVLFIAKITPNNNGTYACFVSNLATGRNNSIVKSITVSASGTSPGLSAGATVGIMIGVLVGVALI

SEQ ID NO: 864 - protein, 315 aa, Homo sapiens
MESPSAPPHRWCIPWQRLLLTASLLTFWNPPTTAKLTIESTPFNVAEGKEVLLLVHNLPQHLFGYSWYKGERVDGNRQIIGYVIGTQQATPGPAYSGREIIYPNASLLIQNIIQNDTGFYTLHVIKSDLVNEEATGQFRVYPELPKPSISSNNSKPVEDKDAVAFTCEPETQDATYLWWVNNQSLPVSPRLQLSNGNRTLTLFNVTRNDTASYKCETQNPVSARRSDSVILNVLCEYICSSLAQAASPNPQGQRQDFSVPLRFKYTDPQPWTSRLSVTFCPRKTWADQVLTKNRRGGAASVLGGSGSTPYDGRNR

SEQ ID NO: 865 - protein, 719 aa, Homo sapiens
MESPSAPPHRWCIPWQRLLLTASLLTFWNPPTTAKLTIESTPFNVAEGKEVLLLVHNLPQHLFGYSWYKGERVDGNRQIIGYVIGTQQATPGPAYSGREIIYPNASLLIQNIIQNDTGFYTLHVIKSDLVNEEATGQFRVYPELPKPSISSNNSKPVEDKDAVAFTCEPETQDATYLWWVNNQSLPVSPRLQLSNGNRTLTLFNVTRNDTASYKCETQNPVSARRSDSVILNVLYGPDAPTISPLNTSYRSGENLNLSCHAASNPPAQYSWFVNGTFQQSTQELFIPNITVNNSGSYTCQAHNSDTGLNRTTVTTITVYAEPPKPFITSNNSNPVEDEDAVALTCEPEIQNTTYLWWVNNQSLPVSPRLQLSNDNRTLTLLSVTRNDVGPYECGIQNELSVDHSDPVILNVLYGPDDPTISPSYTYYRPGVNLSLSCHAASNPPAQYSWLIDGNIQQHTQELFISNITEKNSGLYTCQANNSASGHSRTTVKTITVSAELPKPSISSNNSKPVEDKDAVAFTCEPEAQNTTYLWWVNGQSLPVSPRLQLSNGNRTLTLFNVTRNDARAYVCGIQNSVSANRSDPVTLDVLYGPDTPIISPPDSSYLSGANLNLSCHSASNPSPQYSWRINGIPQQHTQVLFIAKITPNNNGTYACFVSNLATGRNNSIVKSITVSGKWLPGASASYSGVESIWFSPKSQEDIFFPSLCSMGTRKSQILS

SEQ ID NO: 866 - protein, 693 aa, Homo sapiens
MESPSAPPHRWCIPWQRLLLTASLLTFWNPPTTAKLTIESTPFNVAEGKEVLLLVHNLPQHLFGYSWYKGERVDGNRQIIGYVIGTQQATPGPAYSGREIIYPNASLLIQNIIQNDTGFYTLHVIKSDLVNEEATGQFRVYPELPKPSISSNNSKPVEDKDAVAFTCEPETQDATYLWWVNNQSLPVSPRLQLSNGNRTLTLFNVTRNDTASYKCETQNPVSARRSDSVILNVLYGPDAPTISPLNTSYRSGENLNLSCHAASNPPAQYSWFVNGTFQQSTQELFIPNITVNNSGSYTCQAHNSDTGLNRTTVTTITVYAEPPKPFITSNNSNPVEDEDAVALTCEPEIQNTTYLWWVNNQSLPVSPRLQLSNDNRTLTLLSVTRNDVGPYECGIQNELSVDHSDPVILNVLYGPDDPTISPSYTYYRPGVNLSLSCHAASNPPAQYSWLIDGNIQQHTQELFISNITEKNSGLYTCQANNSASGHSRTTVKTITVSAELPKPSISSNNSKPVEDKDAVAFTCEPEAQNTTYLWWVNGQSLPVSPRLQLSNGNRTLTLFNVTRNDARAYVCGIQNSVSANRSDPVTLDVLYGPDTPIISPPDSSYLSGANLNLSCHSASNPSPQYSWRINGIPQQHTQVLFIAKITPNNNGTYACFVSNLATGRNNSIVKSITVSAGATVGIMIGVLVGVALI

SEQ ID NO: 867 - protein, 524 aa, Homo sapiens
MESPSAPPHRWCIPWQRLLLTASLLTFWNPPTTAKLTIESTPFNVAEGKEVLLLVHNLPQHLFGYSWYKGERVDGNRQIIGYVIGTQQATPGPAYSGREIIYPNASLLIQNIIQNDTGFYTLHVIKSDLVNEEATGQFRVYPELPKPSISSNNSKPVEDKDAVAFTCEPETQDATYLWWVNNQSLPVSPRLQLSNGNRTLTLFNVTRNDTASYKCETQNPVSARRSDSVILNVLYGPDDPTISPSYTYYRPGVNLSLSCHAASNPPAQYSWLIDGNIQQHTQELFISNITEKNSGLYTCQANNSASGHSRTTVKTITVSAELPKPSISSNNSKPVEDKDAVAFTCEPEAQNTTYLWWVNGQSLPVSPRLQLSNGNRTLTLFNVTRNDARAYVCGIQNSVSANRSDPVTLDVLYGPDTPIISPPDSSYLSGANLNLSCHSASNPSPQYSWRINGIPQQHTQVLFIAKITPNNNGTYACFVSNLATGRNNSIVKSITVSASGTSPGLSAGATVGIMIGVLVGVALI

SEQ ID NO: 868 - protein, 569 aa, Homo sapiens
MESPSAPPHRWCIPWQRLLLTASLLTFWNPPTTAKLTIESTPFNVAEGKEVLLLVHNLPQHLFGYSWYKGERVDGNRQIIGYVIGTQQATPGPAYSGREIIYPNASLLIQNIIQNDTGFYTLHVIKSDLVNEEATGQFRVYPELPKPSISSNNSKPVEDKDAVAFTCEPETQDATYLWWVNNQSLPVSPRLQLSNGNRTLTLFNVTRNDTASYKCETQNPVSARRSDSVILNVLYGPDAPTISPLNTSYRSGENLNLSCHAASNPPAQYSWFVNGTFQQSTQELFIPNITVNNSGSYTCQAHNSDTGLNRTTVTTITVYAEPPKPFITSNNSNPVEDEDAVALTCEPEIQNTTYLWWVNNQSLPVSPRLQLSNDNRTLTLLSVTRNDVGPYECGIQNELSVDHSDPVILNVLYGPDDPTISPSYTYYRPGVNLSLSCHAASNPPAQYSWLIDGNIQQHTQELFISNITEKNSGLYTCQANNSASGHSRTTVKTITVSAELPKPSISSNNSNPVEDKDAVAFTCEPEVQNTTYLWWVNGQSLPVSPRLQLSNGNMTLTLLSCQKERCRIL

SEQ ID NO: 869 - protein, 346 aa, Homo sapiens
MESPSAPPHRWCIPWQRLLLTASLLTFWNPPTTAKLTIESTPFNVAEGKEVLLLVHNLPQHLFGYSWYKGERVDGNRQIIGYVIGTQQATPGPAYSGREIIYPNASLLIQNIIQNDTGFYTLHVIKSDLVNEEATGQFRVYPELPKPSISSNNSKPVEDKDAVAFTCEPETQDATYLWWVNNQSLPVSPRLQLSNGNRTLTLFNVTRNDTASYKCETQNPVSARRSDSVILNVLYGPDTPIISPPDSSYLSGANLNLSCHSASNPSPQYSWRINGIPQQHTQVLFIAKITPNNNGTYACFVSNLATGRNNSIVKSITVSASGTSPGLSAGATVGIMIGVLVGVALI

SEQ ID NO: 870 - protein, 346 aa, Homo sapiens
MESPSAPPHRWCIPWQRLLLTASLLTFWNPPTTAKLTIESTPFNVAEGKEVLLLVHNLPQHLFGYSWYKGERVDGNRQIIGYVIGTQQATPGPAYSGREIIYPNASLLIQNIIQNDTGFYTLHVIKSDLVNEEATGQFRVYPELPKPSISSNNSKPVEDKDAVAFTCEPEAQNTTYLWWVNGQSLPVSPRLQLSNGNRTLTLFNVTRNDARAYVCGIQNSVSANRSDPVTLDVLYGPDTPIISPPDSSYLSGANLNLSCHSASNPSPQYSWRINGIPQQHTQVLFIAKITPNNNGTYACFVSNLATGRNNSIVKSITVSASGTSPGLSAGATVGIMIGVLVGVALI

SEQ ID NO: 871 - DNA, 2194 bp, Homo sapiens
gcaagtgcgaggaagatatttaaaggcgtcggcgccacgcgcatatccctgctcggcgctgcccgcccagttcctgttcccagactgaggcccagcccccttcgcccgtttccatcacgagtgccgccagcatgtctgacaaactgccctacaaagtcgccgacatcggcctggctgcctggggacgcaaggccctggacattgctgagaacgagatgccgggcctgatgcgtatgcgggagcggtactcggcctccaagccactgaagggcgcccgcatcgctggctgcctgcacatgaccgtggagacggccgtcctcattgagaccctcgtcaccctgggtgctgaggtgcagtggtccagctgcaacatcttctccacccaggaccatgcggcggctgccattgccaaggctggcattccggtgtatgcctggaagggcgaaacggacgaggagtacctgtggtgcattgagcagaccctgtacttcaaggacgggcccctcaacatgattctggacgacgggggcgacctcaccaacctcatccacaccaagtacccgcagcttctgccaggcatccgaggcatctctgaggagaccacgactggggtccacaacctctacaagatgatggccaatgggatcctcaaggtgcctgccatcaatgtcaatgactccgtcaccaagagcaagtttgacaacctctatggctgccgggagtccctcatagatggcatcaagcgggccacagatgtgatgattgccggcaaggtagcggtggtagcaggctatggtgatgtgggcaagggctgtgcccaggccctgcggggtttcggagcccgcgtcatcatcaccgagattgaccccatcaacgcactgcaggctgccatggagggctatgaggtgaccaccatggatgaggcctgtcaggagggcaacatctttgtcaccaccacaggctgtattgacatcatccttggccggcactttgagcagatgaaggatgatgccattgtgtgtaacattggacactttgacgtggagatcgatgtcaagtggctcaacgagaacgccgtggagaaggtgaacatcaagccgcaggtggaccggtatcggttgaagaatgggcgccgcatcatcctgctggccgagggtcggctggtcaacctgggttgtgccatgggccaccccagcttcgtgatgagtaactccttcaccaaccaggtgatggcgcagatcgagctgtggacccatccagacaagtaccccgttggggttcatttcctgcccaagaagctggatgaggcagtggctgaagcccacctgggcaagctgaatgtgaagttgaccaagctaactgagaagcaagcccagtacctgggcatgtcctgtgatggccccttcaagccggatcactaccgctactgagagccaggtctgcgtttcaccctccagctgctgtccttgcccaggccccacctctcctccctaagagctaatggcaccaactttgtgattggtttgtcagtgtcccccatcgactctctggggctgatcacttagtttttggcctctgctgcagccgtcatactgttccaaatgtggcagcgggaacagagtaccctcttcaagccccggtcatgatggaggtcccagccacagggaaccatgagctcagtggtcttggaacagctcactaagtcagtccttccttagcctggaagtcagtagtggagtcacaaagcccatgtgttttgccatctaggccttcacctggtctgtggacttatacctgtgtgcttggtttacaggtccagtggttcttcagcccatgacagatgagaaggggctatattgaagggcaaagaggaactgttgtttgaattttcctgagagcctggcttagtgctgggccttctcttaaacctcattacaatgaggttagtacttttagtccctgttttacaggggttagaatagactgttaaggggcaactgagaaagaacagagaagtgacagctaggggttgagaggggccagaaaaacatgaatgcaggcagatttcgtgaaatctgccaccactttataaccagatggttcctttcacaaccctgggtcaaaaagagaataatttggcctataatgttaaaagaaagcaggaaggtgggtaaataaaaatcttggtgcctgg

SEQ ID NO: 872 - DNA, 2279 bp, Homo sapiens
aaaaaaagacactattaagtctggagaatgccatccacatttatggaaacacttgctgtatatctggtgatttacgtgtgtttacacaataatcttcatagagatggacgtaatcccgttatatagagcatgaaactgaggcccttgggaggtgacttgcaaagattctgttgaagtagttcatcaagttgctaccagagtagactgtctccattgtgtggatgctgaaactgaacccagaaagccgacatcggcctggctgcctggggacgcaaggccctggacattgctgagaacgagatgccgggcctgatgcgtatgcgggagcggtactcggcctccaagccactgaagggcgcccgcatcgctggctgcctgcacatgaccgtggagacggccgtcctcattgagaccctcgtcaccctgggtgctgaggtgcagtggtccagctgcaacatcttctccacccaggaccatgcggcggctgccattgccaaggctggcattccggtgtatgcctggaagggcgaaacggacgaggagtacctgtggtgcattgagcagaccctgtacttcaaggacgggcccctcaacatgattctggacgacgggggcgacctcaccaacctcatccacaccaagtacccgcagcttctgccaggcatccgaggcatctctgaggagaccacgactggggtccacaacctctacaagatgatggccaatgggatcctcaaggtgcctgccatcaatgtcaatgactccgtcaccaagagcaagtttgacaacctctatggctgccgggagtccctcatagatggcatcaagcgggccacagatgtgatgattgccggcaaggtagcggtggtagcaggctatggtgatgtgggcaagggctgtgcccaggccctgcggggtttcggagcccgcgtcatcatcaccgagattgaccccatcaacgcactgcaggctgccatggagggctatgaggtgaccaccatggatgaggcctgtcaggagggcaacatctttgtcaccaccacaggctgtattgacatcatccttggccggcactttgagcagatgaaggatgatgccattgtgtgtaacattggacactttgacgtggagatcgatgtcaagtggctcaacgagaacgccgtggagaaggtgaacatcaagccgcaggtggaccggtatcggttgaagaatgggcgccgcatcatcctgctggccgagggtcggctggtcaacctgggttgtgccatgggccaccccagcttcgtgatgagtaactccttcaccaaccaggtgatggcgcagatcgagctgtggacccatccagacaagtaccccgttggggttcatttcctgcccaagaagctggatgaggcagtggctgaagcccacctgggcaagctgaatgtgaagttgaccaagctaactgagaagcaagcccagtacctgggcatgtcctgtgatggccccttcaagccggatcactaccgctactgagagccaggtctgcgtttcaccctccagctgctgtccttgcccaggccccacctctcctccctaagagctaatggcaccaactttgtgattggtttgtcagtgtcccccatcgactctctggggctgatcacttagtttttggcctctgctgcagccgtcatactgttccaaatgtggcagcgggaacagagtaccctcttcaagccccggtcatgatggaggtcccagccacagggaaccatgagctcagtggtcttggaacagctcactaagtcagtccttccttagcctggaagtcagtagtggagtcacaaagcccatgtgttttgccatctaggccttcacctggtctgtggacttatacctgtgtgcttggtttacaggtccagtggttcttcagcccatgacagatgagaaggggctatattgaagggcaaagaggaactgttgtttgaattttcctgagagcctggcttagtgctgggccttctcttaaacctcattacaatgaggttagtacttttagtccctgttttacaggggttagaatagactgttaaggggcaactgagaaagaacagagaagtgacagctaggggttgagaggggccagaaaaacatgaatgcaggcagatttcgtgaaatctgccaccactttataaccagatggttcctttcacaaccctgggtcaaaaagagaataatttggcctataatgttaaaagaaagcaggaaggtgggtaaataaaaatcttggtgcctgg

SEQ ID NO: 873 - DNA, 2875 bp, Homo sapiens
gtggcgggggctgcagggccgactcggggctctctggaccccctggaatcgcagcctcggcgcgtttctggccgcgcgaagccagctggaagttggagttctcgcgcggccatgagcgggccgttccgggtggccgtggactacaagtcccagcatgccccgcgacgccggggccgccgcgcggtctgcgagccgcaaactggcggcgtgctccgcgggagagcacacctggccacggcctgggacggctggcacctgccggaccctgctcggggggcctgcgcccggcctcctaggcctggaccggaccctgtccagctgggcggccccgacgagcgtccacccctctctgggcctcctacagggacggcgagggcaccccggagggtgtatgaggagaggcctggaaagcgagccccaggccggctccgatcctcctctcccctgggactttgggccagttacccaacctgtggggtcccccacccctccagcaggggcagccttgcagaaatctcgaagaaaatttggagtggtttgaaaaatcctgctgtcccaccgattgaagtgtaatacagggatagttaacgtttacttagtgtttcctgtgggatcggcactgccttctagctttattctagtctcatggctctgtagggaaactgttctcattttatgatgagaatcctgaggcagaggtaacttgccctcagtcttacagctggtggtgatggagcaagattggaacgcaggccatctagatctctgagcgcaccctttcaccactgtgtgcaagcgaatacacgcggaacaatcctagtgaattttcagcaaaaaccaccgacatcggcctggctgcctggggacgcaaggccctggacattgctgagaacgagatgccgggcctgatgcgtatgcgggagcggtactcggcctccaagccactgaagggcgcccgcatcgctggctgcctgcacatgaccgtggagacggccgtcctcattgagaccctcgtcaccctgggtgctgaggtgcagtggtccagctgcaacatcttctccacccaggaccatgcggcggctgccattgccaaggctggcattccggtgtatgcctggaagggcgaaacggacgaggagtacctgtggtgcattgagcagaccctgtacttcaaggacgggcccctcaacatgattctggacgacgggggcgacctcaccaacctcatccacaccaagtacccgcagcttctgccaggcatccgaggcatctctgaggagaccacgactggggtccacaacctctacaagatgatggccaatgggatcctcaaggtgcctgccatcaatgtcaatgactccgtcaccaagagcaagtttgacaacctctatggctgccgggagtccctcatagatggcatcaagcgggccacagatgtgatgattgccggcaaggtagcggtggtagcaggctatggtgatgtgggcaagggctgtgcccaggccctgcggggtttcggagcccgcgtcatcatcaccgagattgaccccatcaacgcactgcaggctgccatggagggctatgaggtgaccaccatggatgaggcctgtcaggagggcaacatctttgtcaccaccacaggctgtattgacatcatccttggccggcactttgagcagatgaaggatgatgccattgtgtgtaacattggacactttgacgtggagatcgatgtcaagtggctcaacgagaacgccgtggagaaggtgaacatcaagccgcaggtggaccggtatcggttgaagaatgggcgccgcatcatcctgctggccgagggtcggctggtcaacctgggttgtgccatgggccaccccagcttcgtgatgagtaactccttcaccaaccaggtgatggcgcagatcgagctgtggacccatccagacaagtaccccgttggggttcatttcctgcccaagaagctggatgaggcagtggctgaagcccacctgggcaagctgaatgtgaagttgaccaagctaactgagaagcaagcccagtacctgggcatgtcctgtgatggccccttcaagccggatcactaccgctactgagagccaggtctgcgtttcaccctccagctgctgtccttgcccaggccccacctctcctccctaagagctaatggcaccaactttgtgattggtttgtcagtgtcccccatcgactctctggggctgatcacttagtttttggcctctgctgcagccgtcatactgttccaaatgtggcagcgggaacagagtaccctcttcaagccccggtcatgatggaggtcccagccacagggaaccatgagctcagtggtcttggaacagctcactaagtcagtccttccttagcctggaagtcagtagtggagtcacaaagcccatgtgttttgccatctaggccttcacctggtctgtggacttatacctgtgtgcttggtttacaggtccagtggttcttcagcccatgacagatgagaaggggctatattgaagggcaaagaggaactgttgtttgaattttcctgagagcctggcttagtgctgggccttctcttaaacctcattacaatgaggttagtacttttagtccctgttttacaggggttagaatagactgttaaggggcaactgagaaagaacagagaagtgacagctaggggttgagaggggccagaaaaacatgaatgcaggcagatttcgtgaaatctgccaccactttataaccagatggttcctttcacaaccctgggtcaaaaagagaataatttggcctataatgttaaaagaaagcaggaaggtgggtaaataaaaatcttggtgcctgg

SEQ ID NO: 874 - DNA, 2240 bp, Homo sapiens
gcaagtgcgaggaagatatttaaaggcgtcggcgccacgcgcatatccctgctcggcgctgcccgcccagttcctgttcccagactgaggcccagcccccttcgcccgtttccatcacgagtgccgccagcatgtctgacaaactgccctacaaagtcgccgacatcggcctggctgcctggggacgcaaggccctggacattgctgagaacgagatgccgggcctgatgcgtatgcgggagcggtactcggcctccaagccactgaagggcgcccgcatcgctggctgcctgcacatgaccgtggagacggccgtcctcattgagaccctcgtcaccctgggtgctgaggtgcagtggtccagctgcaacatcttctccacccaggaccatgcggcggctgccattgccaaggctggcattccgggtaccagttgggaagtccaggccctgatgtgccactcaccctccagtgtatgcctggaagggcgaaacggacgaggagtacctgtggtgcattgagcagaccctgtacttcaaggacgggcccctcaacatgattctggacgacgggggcgacctcaccaacctcatccacaccaagtacccgcagcttctgccaggcatccgaggcatctctgaggagaccacgactggggtccacaacctctacaagatgatggccaatgggatcctcaaggtgcctgccatcaatgtcaatgactccgtcaccaagagcaagtttgacaacctctatggctgccgggagtccctcatagatggcatcaagcgggccacagatgtgatgattgccggcaaggtagcggtggtagcaggctatggtgatgtgggcaagggctgtgcccaggccctgcggggtttcggagcccgcgtcatcatcaccgagattgaccccatcaacgcactgcaggctgccatggagggctatgaggtgaccaccatggatgaggcctgtcaggagggcaacatctttgtcaccaccacaggctgtattgacatcatccttggccggcactttgagcagatgaaggatgatgccattgtgtgtaacattggacactttgacgtggagatcgatgtcaagtggctcaacgagaacgccgtggagaaggtgaacatcaagccgcaggtggaccggtatcggttgaagaatgggcgccgcatcatcctgctggccgagggtcggctggtcaacctgggttgtgccatgggccaccccagcttcgtgatgagtaactccttcaccaaccaggtgatggcgcagatcgagctgtggacccatccagacaagtaccccgttggggttcatttcctgcccaagaagctggatgaggcagtggctgaagcccacctgggcaagctgaatgtgaagttgaccaagctaactgagaagcaagcccagtacctgggcatgtcctgtgatggccccttcaagccggatcactaccgctactgagagccaggtctgcgtttcaccctccagctgctgtccttgcccaggccccacctctcctccctaagagctaatggcaccaactttgtgattggtttgtcagtgtcccccatcgactctctggggctgatcacttagtttttggcctctgctgcagccgtcatactgttccaaatgtggcagcgggaacagagtaccctcttcaagccccggtcatgatggaggtcccagccacagggaaccatgagctcagtggtcttggaacagctcactaagtcagtccttccttagcctggaagtcagtagtggagtcacaaagcccatgtgttttgccatctaggccttcacctggtctgtggacttatacctgtgtgcttggtttacaggtccagtggttcttcagcccatgacagatgagaaggggctatattgaagggcaaagaggaactgttgtttgaattttcctgagagcctggcttagtgctgggccttctcttaaacctcattacaatgaggttagtacttttagtccctgttttacaggggttagaatagactgttaaggggcaactgagaaagaacagagaagtgacagctaggggttgagaggggccagaaaaacatgaatgcaggcagatttcgtgaaatctgccaccactttataaccagatggttcctttcacaaccctgggtcaaaaagagaataatttggcctataatgttaaaagaaagcaggaaggtgggtaaataaaaatcttggtgcctgg

SEQ ID NO: 875 - DNA, 2452 bp, Homo sapiens
aaaaaaagacactattaagtctggagaatgccatccacatttatggaaacacttgctgtatatctggtgatttacgtgtgtttacacaataatcttcatagagatggacgtaatcccgttatatagagcatgaaactgaggcccttgggaggtgacttgcaaagattctgttgaagtagttcatcaagttgctaccagagtagactgtctccattgtgtggatgctgaaactgaacccagaaagccgacatcggcctggctgcctggggacgcaaggccctggacattgctgagaacgagatgccgggcctgatgcgtatgcgggagcggtactcggcctccaagccactgaagggcgcccgcatcgctggctgcctgcacatgaccgtggagacggccgtcctcattgagaccctcgtcaccctgggtgctgaggtgaggcccacagctgtatcaccccagagtccttgccctccctgggttcagccagggaagaagacgactgtgccagggtggggaccttccaggtgtggagctgaccgcgggcctggaggggttcctccctctcactcggtttcctccgtttcccagtgctgccaccccttgtggtgcagtggtccagctgcaacatcttctccacccaggaccatgcggcggctgccattgccaaggctggcattccggtgtatgcctggaagggcgaaacggacgaggagtacctgtggtgcattgagcagaccctgtacttcaaggacgggcccctcaacatgattctggacgacgggggcgacctcaccaacctcatccacaccaagtacccgcagcttctgccaggcatccgaggcatctctgaggagaccacgactggggtccacaacctctacaagatgatggccaatgggatcctcaaggtgcctgccatcaatgtcaatgactccgtcaccaagagcaagtttgacaacctctatggctgccgggagtccctcatagatggcatcaagcgggccacagatgtgatgattgccggcaaggtagcggtggtagcaggctatggtgatgtgggcaagggctgtgcccaggccctgcggggtttcggagcccgcgtcatcatcaccgagattgaccccatcaacgcactgcaggctgccatggagggctatgaggtgaccaccatggatgaggcctgtcaggagggcaacatctttgtcaccaccacaggctgtattgacatcatccttggccggcactttgagcagatgaaggatgatgccattgtgtgtaacattggacactttgacgtggagatcgatgtcaagtggctcaacgagaacgccgtggagaaggtgaacatcaagccgcaggtggaccggtatcggttgaagaatgggcgccgcatcatcctgctggccgagggtcggctggtcaacctgggttgtgccatgggccaccccagcttcgtgatgagtaactccttcaccaaccaggtgatggcgcagatcgagctgtggacccatccagacaagtaccccgttggggttcatttcctgcccaagaagctggatgaggcagtggctgaagcccacctgggcaagctgaatgtgaagttgaccaagctaactgagaagcaagcccagtacctgggcatgtcctgtgatggccccttcaagccggatcactaccgctactgagagccaggtctgcgtttcaccctccagctgctgtccttgcccaggccccacctctcctccctaagagctaatggcaccaactttgtgattggtttgtcagtgtcccccatcgactctctggggctgatcacttagtttttggcctctgctgcagccgtcatactgttccaaatgtggcagcgggaacagagtaccctcttcaagccccggtcatgatggaggtcccagccacagggaaccatgagctcagtggtcttggaacagctcactaagtcagtccttccttagcctggaagtcagtagtggagtcacaaagcccatgtgttttgccatctaggccttcacctggtctgtggacttatacctgtgtgcttggtttacaggtccagtggttcttcagcccatgacagatgagaaggggctatattgaagggcaaagaggaactgttgtttgaattttcctgagagcctggcttagtgctgggccttctcttaaacctcattacaatgaggttagtacttttagtccctgttttacaggggttagaatagactgttaaggggcaactgagaaagaacagagaagtgacagctaggggttgagaggggccagaaaaacatgaatgcaggcagatttcgtgaaatctgccaccactttataaccagatggttcctttcacaaccctgggtcaaaaagagaataatttggcctataatgttaaaagaaagcaggaaggtgggtaaataaaaatcttggtgcctgg

SEQ ID NO: 876 - DNA, 1927 bp, Homo sapiens
gcaagtgcgaggaagatatttaaaggcgtcggcgccacgcgcatatccctgctcggcgctgcccgcccagttcctgttcccagactgaggcccagcccccttcgcccgtttccatcacgagtgccgccagcatgtctgacaaactgccctacaaagtcgtgtatgcctggaagggcgaaacggacgaggagtacctgtggtgcattgagcagaccctgtacttcaaggacgggcccctcaacatgattctggacgacgggggcgacctcaccaacctcatccacaccaagtacccgcagcttctgccaggcatccgaggcatctctgaggagaccacgactggggtccacaacctctacaagatgatggccaatgggatcctcaaggtgcctgccatcaatgtcaatgactccgtcaccaagagcaagtttgacaacctctatggctgccgggagtccctcatagatggcatcaagcgggccacagatgtgatgattgccggcaaggtagcggtggtagcaggctatggtgatgtgggcaagggctgtgcccaggccctgcggggtttcggagcccgcgtcatcatcaccgagattgaccccatcaacgcactgcaggctgccatggagggctatgaggtgaccaccatggatgaggcctgtcaggagggcaacatctttgtcaccaccacaggctgtattgacatcatccttggccggcactttgagcagatgaaggatgatgccattgtgtgtaacattggacactttgacgtggagatcgatgtcaagtggctcaacgagaacgccgtggagaaggtgaacatcaagccgcaggtggaccggtatcggttgaagaatgggcgccgcatcatcctgctggccgagggtcggctggtcaacctgggttgtgccatgggccaccccagcttcgtgatgagtaactccttcaccaaccaggtgatggcgcagatcgagctgtggacccatccagacaagtaccccgttggggttcatttcctgcccaagaagctggatgaggcagtggctgaagcccacctgggcaagctgaatgtgaagttgaccaagctaactgagaagcaagcccagtacctgggcatgtcctgtgatggccccttcaagccggatcactaccgctactgagagccaggtctgcgtttcaccctccagctgctgtccttgcccaggccccacctctcctccctaagagctaatggcaccaactttgtgattggtttgtcagtgtcccccatcgactctctggggctgatcacttagtttttggcctctgctgcagccgtcatactgttccaaatgtggcagcgggaacagagtaccctcttcaagccccggtcatgatggaggtcccagccacagggaaccatgagctcagtggtcttggaacagctcactaagtcagtccttccttagcctggaagtcagtagtggagtcacaaagcccatgtgttttgccatctaggccttcacctggtctgtggacttatacctgtgtgcttggtttacaggtccagtggttcttcagcccatgacagatgagaaggggctatattgaagggcaaagaggaactgttgtttgaattttcctgagagcctggcttagtgctgggccttctcttaaacctcattacaatgaggttagtacttttagtccctgttttacaggggttagaatagactgttaaggggcaactgagaaagaacagagaagtgacagctaggggttgagaggggccagaaaaacatgaatgcaggcagatttcgtgaaatctgccaccactttataaccagatggttcctttcacaaccctgggtcaaaaagagaataatttggcctataatgttaaaagaaagcaggaaggtgggtaaataaaaatcttggtgcctgg

SEQ ID NO: 877 - DNA, 3302 bp, Homo sapiens
gcaagtgcgaggaagatatttaaaggcgtcggcgccacgcgcatatccctgctcggcgctgcccgcccagttcctgttcccagactgaggcccagcccccttcgcccgtttccatcacgagtgccgccagcatgtctgacaaactgccctacaaagtcgccgacatcggcctggctgcctggggacgcaaggccctggacattgctgagaacgagatgccgggcctgatgcgtatgcgggagcggtactcggcctccaagccactgaagggcgcccgcatcgctggctgcctgcacatgaccgtggagacggccgtcctcattgagaccctcgtcaccctgggtgctgaggtgcagtggtccagctgcaacatcttctccacccaggaccatgcggcggctgccattgccaaggctggcattccggtgtatgcctggaagggcgaaacggacgaggagtacctgtggtgcattgagcagaccctgtacttcaaggacgggcccctcaacatgattctggacgacgggggcgacctcaccaacctcatccacaccaagtacccgcagcttctgccaggcatccgaggcatctctgaggagaccacgactggggtccacaacctctacaagatgatggccaatgggatcctcaaggtgcctgccatcaatgtcaatgactccgtcaccaagagcaagtttgacaacctctatggctgccgggagtccctcatagatggcatcaagcgggccacagatgtgatgattgccggcaaggtagcggtggtagcaggctatggtgatgtgggcaagggctgtgcccaggccctgcggggtttcggagcccgcgtcatcatcaccgagattgaccccatcaacgcactgcaggctgccatggagggctatgaggtgaccaccatggatgaggcctgtcaggagggcaacatctttgtcaccaccacaggctgtattgacatcatccttggccggcactttgagcagatgaaggatgatgccattgtgtgtaacattggacactttgacgtggagatcgatgtcaagtggctcaacgagaacgccgtggagaaggtgaacatcaagccgcaggtggaccggtatcggttgaagaatgggcgccgcatcatcctgctggccgagggtcggctggtcaacctgggttgtgccatgggccaccccagcttcgtgatgagtaactccttcaccaaccaggtgatggcgcagatcgagctgtggacccatccagacaagtaccccgttggggttcatttcctgcccaagaagctggatgaggcagtggctgaagcccacctgggcaagctgaatgtgaagttgaccaagctaactgagaagcaagcccagtacctgggcatgtcctgtgatggccccttcaagccggatcactaccgctactgagagccaggtcaatcacttgatgtggcctcttactggcaacattagccatggattttgtacccttaggagctatgatgaaaaaaacaacacaagattaaatcaaatgcgagagaaaataatgtgcaaacaagagatgcggtaaacatgaaatatatgaggatactgtgggtataacatgacatactgttttacagtaaactgtttgttgttgtttttgttgttgtttttctgagtctcgctctgtcacccaggctggagtacagtggcgcaatctcggctcactgcaacctctgcctcctgggttcaaatgattctcctggctcagcctcagcctcagcctcccgagtagctgggattataggcgcctgccaccacgcccggcgaatttttgtatttttagtagagatggggtttcgccatgttggtcaggctggtttataggaccactgtcatatatgcagtccgtcatatacacttgggcaacagagtgaggaagaaagaaaggaaagaaaggaaggaaggaaggaaggaaggagaaaagaaaagaaaagagaaaaggaaaaagaaagaaagaaagctgatagcgcccactggatgcctggcctcaaccacaactctggaagacctactgcattaagggtcaattagcacaatggtctaaaacaaaagctatcacctttcccttaggactgactagttatgctatatttttactgattcttaggcactagtggtcttgtctgctacttagaagattacagactggcagattaaaggcacttcactttgggtcatgagccctggaaacaaattgtagccaccaaacagtctggatcactgttgtggtgtgcatggtaagggctcattctctgatgagaccaactagaatcaagcttttgatcaagcttgtgccactcagatggccacagttgccacttagatccatcataacattggacatggtgacaccatcatcaactgggcacaaagtaagggactctgtgtttctgaatcagaagctaccactacatgccagatttgtgacctctgccaaaagttagcctatttgtctcatggtgaaagaggccatattgcactgagtgttgactggctgcagagtgttgactggctcctggtaaattggtgacatcagacctttgacctcttccaagctattccactggtatctcattcctgttgactttttctcaggtaatggttttgctgttctagtctgatcagccaattgtggccacatcattgtggcccttgaaactaatctgtgtcatgattttggctttctggatggtgataatactgcattttttagtgcaaaaactcatcaacaatgggcttatagtcaaagtatttggtagccaattcattatcttcagactggtggtaccattgagagatggaataaacttttaattaaaaaacagcttaattgagatgtaattcacatatcataaaattcaccctttggaaggtttttagtttattcacagagttgtgcaaccatcctacagtatgtagtctttgtggctggcttccttcacttagcaaaatgttttcaaagtttatccatgtgggccgggcgcggtggctcacacctgtagtcccagcactgtgggaggccgaggtgggcagatcatgaggtcaggagatcaagaccatcctggctagcgtggtgaaaccccatctctactaaaaatacaaaaaattagccgggcatggtggtgggtgcctgtagtcccagctacttgggaggctgaggcaggagaatggggtgaacccaggaggcagagctttcagtgagctgagatcgcgccattgtactccagcctgggcaacagagcgagactctgtatc

SEQ ID NO: 878 - DNA, 3442 bp, Homo sapiens
gcaagtgcgaggaagatatttaaaggcgtcggcgccacgcgcatatccctgctcggcgctgcccgcccagttcctgttcccagactgaggcccagcccccttcgcccgtttccatcacgagtgccgccagcatgtctgacaaactgccctacaaagtcgccgacatcggcctggctgcctggggacgcaaggccctggacattgctgagaacgagatgccgggcctgatgcgtatgcgggagcggtactcggcctccaagccactgaagggcgcccgcatcgctggctgcctgcacatgaccgtggagacggccgtcctcattgagaccctcgtcaccctgggtgctgaggtgcagtggtccagctgcaacatcttctccacccaggaccatgcggcggctgccattgccaaggctggcattccggtgtatgcctggaagggcgaaacggacgaggagtacctgtggtgcattgagcagaccctgtacttcaaggacgggcccctcaacatgattctggacgacgggggcgacctcaccaacctcatccacaccaagtacccgcagcttctgccaggcatccgaggcatctctgaggagaccacgactggggtccacaacctctacaagatgatggccaatgggatcctcaaggtgcctgccatcaatgtcaatgactccgtcaccaagagcaagtttgacaacctctatggctgccgggagtccctcatagatggcatcaagcgggccacagatgtgatgattgccggcaaggtagcggtggtagcaggctatggtgatgtgggcaagggctgtgcccaggccctgcggggtttcggagcccgcgtcatcatcaccgagattgaccccatcaacgcactgcaggctgccatggagggctatgaggtgaccaccatggatgaggcctgtcaggagggcaacatctttgtcaccaccacaggctgtattgacatcatccttggccggcactttgagcagatgaaggatgatgccattgtgtgtaacattggacactttgacgtggagatcgatgtcaagtggctcaacgagaacgccgtggagaaggtgaacatcaagccgcaggtggaccggtatcggttgaagaatgggcgccgcatcatcctgctggccgagggtcggctggtcaacctgggttgtgccatgggccaccccagcttcgtgatgagtaactccttcaccaaccaggtgatggcgcagatcgagctgtggacccatccagacaagtaccccgttggggttcatttcctgcccaagaagctggatgaggcagtggctgaagcccacctgggcaagctgaatgtgaagttgaccaagctaactgagaagcaagcccagtacctgggcatgtcctgtgatggccccttcaagccggatcactaccgctactgagagccagccctgccaagcaccaatggccagagacctgggggttcttggtaaagctcatccctgtgaaggacagtgaacacagatcaagaagtatcagctggaccccagcatggaggagcaactgcagacttcagcagactcattcaggtcaatcacttgatgtggcctcttactggcaacattagccatggattttgtacccttaggagctatgatgaaaaaaacaacacaagattaaatcaaatgcgagagaaaataatgtgcaaacaagagatgcggtaaacatgaaatatatgaggatactgtgggtataacatgacatactgttttacagtaaactgtttgttgttgtttttgttgttgtttttctgagtctcgctctgtcacccaggctggagtacagtggcgcaatctcggctcactgcaacctctgcctcctgggttcaaatgattctcctggctcagcctcagcctcagcctcccgagtagctgggattataggcgcctgccaccacgcccggcgaatttttgtatttttagtagagatggggtttcgccatgttggtcaggctggtttataggaccactgtcatatatgcagtccgtcatatacacttgggcaacagagtgaggaagaaagaaaggaaagaaaggaaggaaggaaggaaggaaggagaaaagaaaagaaaagagaaaaggaaaaagaaagaaagaaagctgatagcgcccactggatgcctggcctcaaccacaactctggaagacctactgcattaagggtcaattagcacaatggtctaaaacaaaagctatcacctttcccttaggactgactagttatgctatatttttactgattcttaggcactagtggtcttgtctgctacttagaagattacagactggcagattaaaggcacttcactttgggtcatgagccctggaaacaaattgtagccaccaaacagtctggatcactgttgtggtgtgcatggtaagggctcattctctgatgagaccaactagaatcaagcttttgatcaagcttgtgccactcagatggccacagttgccacttagatccatcataacattggacatggtgacaccatcatcaactgggcacaaagtaagggactctgtgtttctgaatcagaagctaccactacatgccagatttgtgacctctgccaaaagttagcctatttgtctcatggtgaaagaggccatattgcactgagtgttgactggctgcagagtgttgactggctcctggtaaattggtgacatcagacctttgacctcttccaagctattccactggtatctcattcctgttgactttttctcaggtaatggttttgctgttctagtctgatcagccaattgtggccacatcattgtggcccttgaaactaatctgtgtcatgattttggctttctggatggtgataatactgcattttttagtgcaaaaactcatcaacaatgggcttatagtcaaagtatttggtagccaattcattatcttcagactggtggtaccattgagagatggaataaacttttaattaaaaaacagcttaattgagatgtaattcacatatcataaaattcaccctttggaaggtttttagtttattcacagagttgtgcaaccatcctacagtatgtagtctttgtggctggcttccttcacttagcaaaatgttttcaaagtttatccatgtgggccgggcgcggtggctcacacctgtagtcccagcactgtgggaggccgaggtgggcagatcatgaggtcaggagatcaagaccatcctggctagcgtggtgaaaccccatctctactaaaaatacaaaaaattagccgggcatggtggtgggtgcctgtagtcccagctacttgggaggctgaggcaggagaatggggtgaacccaggaggcagagctttcagtgagctgagatcgcgccattgtactccagcctgggcaacagagcgagactctgtatc

SEQ ID NO: 879 - DNA, 3919 bp, Homo sapiens
gcaagtgcgaggaagatatttaaaggcgtcggcgccacgcgcatatccctgctcggcgctgcccgcccagttcctgttcccagactgaggcccagcccccttcgcccgtttccatcacgagtgccgccagcatgtctgacaaactgccctacaaagtcgccgacatcggcctggctgcctggggacgcaaggccctggacattgctgagaacgagatgccgggcctgatgcgtatgcgggagcggtactcggcctccaagccactgaagggcgcccgcatcgctggctgcctgcacatgaccgtggagacggccgtcctcattgagaccctcgtcaccctgggtgctgaggtgcagtggtccagctgcaacatcttctccacccaggaccatgcggcggctgccattgccaaggctggcattccggtgtatgcctggaagggcgaaacggacgaggagtacctgtggtgcattgagcagaccctgtacttcaaggacgggcccctcaacatgattctggacgacgggggcgacctcaccaacctcatccacaccaagtacccgcagcttctgccaggcatccgaggcatctctgaggagaccacgactggggtccacaacctctacaagatgatggccaatgggatcctcaaggtgcctgccatcaatgtcaatgactccgtcaccaagagcaagtttgacaacctctatggctgccgggagtccctcatagatggcatcaagcgggccacagatgtgatgattgccggcaaggtagcggtggtagcaggctatggtgatgtgggcaagggctgtgcccaggccctgcggggtttcggagcccgcgtcatcatcaccgagattgaccccatcaacgcactgcaggctgccatggagggctatgaggtgaccaccatggatgaggcctgtcaggagggcaacatctttgtcaccaccacaggctgtattgacatcatccttggccggcactttgagcagatgaaggatgatgccattgtgtgtaacattggacactttgacgtggagatcgatgtcaagtggctcaacgagaacgccgtggagaaggtgaacatcaagccgcaggtggaccggtatcggttgaagaatgggcgccgcatcatcctgctggccgagggtcggctggtcaacctgggttgtgccatgggccaccccagcttcgtgatgagtaactccttcaccaaccaggtgatggcgcagatcgagctgtggacccatccagacaagtaccccgttggggttcatttcctgcccaagaagctggatgaggcagtggctgaagcccacctgggcaagctgaatgtgaagttgaccaagctaactgagaagcaagcccagtacctgggcatgtcctgtgatggccccttcaagccggatcactaccgctactgagagccaggtctgctaatctgtcacatgtgtgacactgaccgggtacccacaatgaaagatgatgtgtctcctgctccacccccaataccccaatactccactcctgatatctgggctgcccccatcaaagcttcatggagaaagaaggaattggccaagggtcctgcagtatccaggcctagccctggttggattttttccaggaaagagatgggaagatgaggcctgtggttggtggaaagtggctgtttatggagcagtggactgaactttggaaagaggagccctgggtctgctgctgactcactgtgttccccgcagggacagaaatacctacttcagatggctgtcttgacgctcgaatgatagaacattagtgaggagtttttatgctgagtttttttttttttttttttttttttgagatggagtcttgctctgtcgcccaggctggagtgcagtggcgcgatctcggctcactgcaagctccgcctcccaggttcacgccattctcctgcctcagcctcccgagtagctgggactacaggcgcccgccaccgtgtccggctaattttttatatttttagtagagatggggtttcaccgtggtttcgatctcctgacctcgtgatctgcctgctttggcctcccaaagtgctgggattacaggcatgagccactgtgcccggcctttatgctgagttttaagggctgtatgagacaccaggtggtgggagggagctgttttgagagcagggaatttaggatacttaggaaattagaaaattagagaagtcataggatcttggaactaagggagaaccttagagtcctgtggagcagaacccagcatttgtatgtggagaaacggaggcccagagaagttgtgacttatccgggtcactctgcaggtctgggtgtcccacccgagtccatgtcagggctctttctgcacaccaagccccatgcccacctctgtgtgactggctgtggtgggaggggcctcctaggctagaggtgctgggatcccttttcagtccagaaataatgagcttagagggtctggaagtagcatggactaaaacccaggaaggatccacagggactgttgatgccagtgaggactccaggaagccggatcacggggactgttgatgccagtgaggactccaggaagctgctgttgggacagccctgctttgggagtctgaggttccaggaaaccccaggaatccggattctcatccctgagacctactcaggactagcccaggggaccgagctaggaaacctgcttgaggtggtagaggcagccaggggtgtgcagtggtccgggcgggcttcgatcagttccaggttggttgcttctccaaactggctccaagacaggcatgtggctcaagttggtctggactcaatcccgggactttaggacttttgctagaaatctggtgtggtgcaggagcgactccaggattcactctgtgggctgcttggactcagactcccccaggactagaggctgcttctccctggtgggaggagttacaaccttgcaagggttctaaagacccccgggtgctgggtggtgggcttttcctgacaacttccataagttattggaacctaaattcacactgcttagcatcgtaatagtctgatcaaccctgctcagtgttgtcatacttgccctattaccagggagagaaatagagaggtgggtgcctccctagagtatccacccacactgtgtactgaatgcccctcctcaacctgtctctcgtggggacctgcacctgcttttcctactaactgctggcttgtatttattcccctaaagcctgttccataacccagtgtggttcttagacttgagcaaacctcagaaacacctggagggcttatccccagtcctgattctgtaggtctggggtgaggccttatagtgtgcattttaacaacgtccccagtgtttcccaatgctgctggtgcacaccaagtgtagaatttgcctctgtgcctgttgcacagtaggtggaggtggcaactgtaaaagagacccagctatcctaaaaacagaaaaggtactgtcttcagtggggctgccaggattggaaggaatgtgagcctgtagctgctcctttgcccccacgaaggccagcttgccttaggatgaagccaacacagaccgggtgcagcggctcacacctgtgatcccagcactttgggaggccaaggtgggcagatcacctgaggtcaggagtttgagaccagcctggccaacataatgaaaccctagctctactaaaaaaaaaatagaataaaaaaaaagattagccgggcatggtgatgcacgcctgtagtcccagctactcgggaggctgagacaggaaaatcacttgaactgggaggtggcacgttagagtgagttgagatcacacactgccactccaggtctgggggggacaagagacaaggggctcaatctc

SEQ ID NO: 880 - DNA, 3458 bp, Homo sapiens
gcaagtgcgaggaagatatttaaaggcgtcggcgccacgcgcatatccctgctcggcgctgcccgcccagttcctgttcccagactgaggcccagcccccttcgcccgtttccatcacgagtgccgccagcatgtctgacaaactgccctacaaagtcgccgacatcggcctggctgcctggggacgcaaggccctggacattgctgagaacgagatgccgggcctgatgcgtatgcgggagcggtactcggcctccaagccactgaagggcgcccgcatcgctggctgcctgcacatgaccgtggagacggccgtcctcattgagaccctcgtcaccctgggtgctgaggtgcagtggtccagctgcaacatcttctccacccaggaccatgcggcggctgccattgccaaggctggcattccggtgtatgcctggaagggcgaaacggacgaggagtacctgtggtgcattgagcagaccctgtacttcaaggacgggcccctcaacatgattctggacgacgggggcgacctcaccaacctcatccacaccaagtacccgcagcttctgccaggcatccgaggcatctctgaggagaccacgactggggtccacaacctctacaagatgatggccaatgggatcctcaaggtgcctgccatcaatgtcaatgactccgtcaccaagagcaagtttgacaacctctatggctgccgggagtccctcatagatggcatcaagcgggccacagatgtgatgattgccggcaaggtagcggtggtagcaggctatggtgatgtgggcaagggctgtgcccaggccctgcggggtttcggagcccgcgtcatcatcaccgagattgaccccatcaacgcactgcaggctgccatggagggctatgaggtgaccaccatggatgaggcctgtcaggagggcaacatctttgtcaccaccacaggctgtattgacatcatccttggccggcactttgagcagatgaaggatgatgccattgtgtgtaacattggacactttgacgtggagatcgatgtcaagtggctcaacgagaacgccgtggagaaggtgaacatcaagccgcaggtggaccggtatcggttgaagaatgggcgccgcatcatcctgctggccgagggtcggctggtcaacctgggttgtgccatgggccaccccagcttcgtgatgagtaactccttcaccaaccaggtgatggcgcagatcgagctgtggacccatccagacaagtaccccgttggggttcatttcctgcccaagaagctggatgaggcagtggctgaagcccacctgggcaagctgaatgtgaagttgaccaagctaactgagaagcaagcccagtacctgggcatgtcctgtgatggccccttcaagccggatcactaccgctactgagagccaggtctgctaatctgtcacatgtgtgacactgaccgggtacccacaatgaaagatgatgtgtctcctgctccacccccaataccccaatactccactcctgatatctgggctgcccccatcaaagcttcatggagaaagaaggaattggccaagggtcctgcagtatccaggcctagccctggttggattttttccaggaaagagatgggaagatgaggcctgtggttggtggaaagtggctgtttatggagcagtggactgaactttggaaagaggagccctgggtctgctgctgactcactgtgttccccgcagggacagaaatacctacttcagatggctgtcttgacgctcgaatgatagaacattagtgaggagtttttatgctgagtttttttttttttttttttttttttgagatggagtcttgctctgtcgcccaggctggagtgcagtggcgcgatctcggctcactgcaagctccgcctcccaggttcacgccattctcctgcctcagcctcccgagtagctgggactacaggcgcccgccaccgtgtccggctaattttttatatttttagtagagatggggtttcaccgtggtttcgatctcctgacctcgtgatctgcctgctttggcctcccaaagtgctgggattacaggcatgagccactgtgcccggcctttatgctgagttttaagggctgtatgagacaccaggtggtgggagggagctgttttgagagcagggaatttaggatacttaggaaattagaaaattagagaagtcataggatcttggaactaagggagaaccttagagtcctgtggagcagaacccagcatttgtatgtggagaaacggaggcccagagaagttgtgacttatccgggtcactctgcaggtctgggtgtcccacccgagtccatgtcagggctctttctgcacaccaagccccatgcccacctctgtgtgactggctgtggtgggaggggcctcctaggctagaggtgctgggatcccttttcagtccagaaataatgagcttagagggctgcttctccctggtgggaggagttacaaccttgcaagggttctaaagacccccgggtgctgggtggtgggcttttcctgacaacttccataagttattggaacctaaattcacactgcttagcatcgtaatagtctgatcaaccctgctcagtgttgtcatacttgccctattaccagggagagaaatagagaggtgggtgcctccctagagtatccacccacactgtgtactgaatgcccctcctcaacctgtctctcgtggggacctgcacctgcttttcctactaactgctggcttgtatttattcccctaaagcctgttccataacccagtgtggttcttagacttgagcaaacctcagaaacacctggagggcttatccccagtcctgattctgtaggtctggggtgaggccttatagtgtgcattttaacaacgtccccagtgtttcccaatgctgctggtgcacaccaagtgtagaatttgcctctgtgcctgttgcacagtaggtggaggtggcaactgtaaaagagacccagctatcctaaaaacagaaaaggtactgtcttcagtggggctgccaggattggaaggaatgtgagcctgtagctgctcctttgcccccacgaaggccagcttgccttaggatgaagccaacacagaccgggtgcagcggctcacacctgtgatcccagcactttgggaggccaaggtgggcagatcacctgaggtcaggagtttgagaccagcctggccaacataatgaaaccctagctctactaaaaaaaaaatagaataaaaaaaaagattagccgggcatggtgatgcacgcctgtagtcccagctactcgggaggctgagacaggaaaatcacttgaactgggaggtggcacgttagagtgagttgagatcacacactgccactccaggtctgggggggacaagagacaaggggctcaatctc

SEQ ID NO: 881 - DNA, 998 bp, Homo sapiens
gcaagtgcgaggaagatatttaaaggcgtcggcgccacgcgcatatccctgctcggcgctgcccgcccagttcctgttcccagactgaggcccagcccccttcgcccgtttccatcacgagtgccgccagcatgtctgacaaactgccctacaaagtcgccgacatcggcctggctgcctggggacgcaaggccctggacattgctgagaacgagatgccgggcctgatgcgtatgcgggagcggtactcggcctccaagccactgaagggcgcccgcatcgctggctgcctgcacatgaccgtggagacggccgtcctcattgagaccctcgtcaccctgggtgctgaggtgaggcccacagctgtatcaccccagagtccttgccctccctgggttcagccagggaagaagacgactgtgccagggtggggaccttccaggtgtggagctgaccgcgggcctggaggggttcctccctctcactcggtttcctccgtttcccagtgctgccaccccttgtggtgcagtggtccagctgcaacatcttctccacccaggaccatgcggcggctgccattgccaaggctggcattccgggtaagtcctgcttgcttctgagacgtggaatttgtgaagggattctgccctctttgcttcactgactgctagagcaacagacttccttacatatcagaaagggagaggagtcaccgccacaaaatcctagcccagcgaccccacaggaaagagctgctttgtcccatcatcatctaaaatcctgtggaagttgtttattgacccaggtcaagccgtgtaaccaggaagagcaagatcttatgattgggaactacatgatgaagcggaggggaagttcattaaaggaaggatgtggatctctttccaaagaactggggagggctacggggcagaaaaagaggttcactgcctagggtatggcggtctaaaggactgaggaaggaccaagtctaacgagaa

SEQ ID NO: 882 - DNA, 1962 bp, Homo sapiens
attacaggcacccaccaccacacccggctaatttttgtatttttagtagagacggggtttcaccatgttggtcaggctggtcttgaactcctgacctcaagtgatctgcccaccttggcctcccaaagtgttgggattacaggcatgagccactgtgcccggcctttatgctgagttttaagggctgtatgagacaccaggtggtgggagggagctgttttgagagcagggaatttaggatacttaggaaattagaaaattagagaagtcataggatcttggaactaagggagaaccttagagtcctgtggagcagaacccagcatttgtatgtggagaaacggaggcccagagaagttgtgacttatccgggtcactctgcaggtctgggtgtcccacccgagtccatgtcagggctctttctgcacaccaagccccatgcccacctctgtgtgactggctgtggtgggaggggcctcctaggctagaggtgctgggatcccttttcagtccagaaataatgagcttagagggtctggaagtagcatggactaaaacccaggaaggatccacagggactgttgatgccagtgaggactccaggaagccggatcacggggactgttgatgccagtgaggactccaggaagctgctgttgggacagccctgctttgggagtctgaggttccaggaaaccccaggaatccggattctcatccctgagacctactcaggactagcccaggggaccgagctaggaaacctgcttgaggtggtagaggcagccaggggtgtgcagtggtccgggcgggcttcgatcagttccaggttggttgcttctccaaactggctccaagacaggcatgtggctcaagttggtctggactcaatcccgggactttaggacttttgctagaaatctggtgtggtgcaggagcgactccaggattcactctgtgggctgcttggactcagactcccccaggactagaggctgcttctccctggtgggaggagttacaaccttgcaagggttctaaagacccccgggtgctgggtggtgggcttttcctgacaacttccataagttattggaacctaaattcacactgcttagcatcgtaatagtctgatcaaccctgctcagtgttgtcatacttgccctattaccagggagagaaatagagaggtgggtgcctccctagagtatccacccacactgtgtactgaatgcccctcctcaacctgtctctcgtggggacctgcacctgcttttcctactaactgctggcttgtatttattcccctaaagcctgttccataacccagtgtggttcttagacttgagcaaacctcagaaacacctggagggcttatccccagtcctgattctgtaggtctggggtgaggccttatagtgtgcattttaacaacgtccccagtgtttcccaatgctgctggtgcacaccaagtgtagaatttgcctctgtgcctgttgcacagtaggtggaggtggcaactgtaaaagagacccagctatcctaaaaacagaaaaggtactgtcttcagtggggctgccaggattggaaggaatgtgagcctgtagctgctcctttgcccccacgaaggccagcttgccttaggatgaagccaacacagaccgggtgcagcggctcacacctgtgatcccagcactttgggaggccaaggtgggcagatcacctgaggtcaggagtttgagaccagcctggccaacataatgaaaccctagctctactaaaaaaaaaatagaataaaaaaaaagattagccgggcatggtgatgcacgcctgtagtcccagctactcgggaggctgagacaggaaaatcacttgaactgggaggtggcacgttagagtgagttgagatcacacactgccactccaggtctgggggggacaagagacaaggggctcaatctc

SEQ ID NO: 883 - DNA, 159 bp, Artificial
  Synthetic oligonucleotide
gcaagtgcgaggaagatatttaaaggcgtcggcgccacgcgcatatccctgctcggcgctgcccgcccagttcctgttcccagactgaggcccagcccccttcgcccgtttccatcacgagtgccgccagcatgtctgacaaactgccctacaaagtcg

SEQ ID NO: 884 - DNA, 840 bp, Artificial
  Synthetic oligonucleotide
gtggcgggggctgcagggccgactcggggctctctggaccccctggaatcgcagcctcggcgcgtttctggccgcgcgaagccagctggaagttggagttctcgcgcggccatgagcgggccgttccgggtggccgtggactacaagtcccagcatgccccgcgacgccggggccgccgcgcggtctgcgagccgcaaactggcggcgtgctccgcgggagagcacacctggccacggcctgggacggctggcacctgccggaccctgctcggggggcctgcgcccggcctcctaggcctggaccggaccctgtccagctgggcggccccgacgagcgtccacccctctctgggcctcctacagggacggcgagggcaccccggagggtgtatgaggagaggcctggaaagcgagccccaggccggctccgatcctcctctcccctgggactttgggccagttacccaacctgtggggtcccccacccctccagcaggggcagccttgcagaaatctcgaagaaaatttggagtggtttgaaaaatcctgctgtcccaccgattgaagtgtaatacagggatagttaacgtttacttagtgtttcctgtgggatcggcactgccttctagctttattctagtctcatggctctgtagggaaactgttctcattttatgatgagaatcctgaggcagaggtaacttgccctcagtcttacagctggtggtgatggagcaagattggaacgcaggccatctagatctctgagcgcaccctttcaccactgtgtgcaagcgaatacacgcggaacaatcctagtgaattttcagcaaaaacca

SEQ ID NO: 885 - DNA, 244 bp, Artificial
  Synthetic oligonucleotide
aaaaaaagacactattaagtctggagaatgccatccacatttatggaaacacttgctgtatatctggtgatttacgtgtgtttacacaataatcttcatagagatggacgtaatcccgttatatagagcatgaaactgaggcccttgggaggtgacttgcaaagattctgttgaagtagttcatcaagttgctaccagagtagactgtctccattgtgtggatgctgaaactgaacccagaaag

SEQ ID NO: 886 - DNA, 191 bp, Artificial
  Synthetic oligonucleotide
ccgacatcggcctggctgcctggggacgcaaggccctggacattgctgagaacgagatgccgggcctgatgcgtatgcgggagcggtactcggcctccaagccactgaagggcgcccgcatcgctggctgcctgcacatgaccgtggagacggccgtcctcattgagaccctcgtcaccctgggtgctgag

SEQ ID NO: 887 - DNA, 173 bp, Artificial
  Synthetic oligonucleotide
gtgaggcccacagctgtatcaccccagagtccttgccctccctgggttcagccagggaagaagacgactgtgccagggtggggaccttccaggtgtggagctgaccgcgggcctggaggggttcctccctctcactcggtttcctccgtttcccagtgctgccaccccttgtg

SEQ ID NO: 888 - DNA, 399 bp, Artificial
  Synthetic oligonucleotide
gtaagtcctgcttgcttctgagacgtggaatttgtgaagggattctgccctctttgcttcactgactgctagagcaacagacttccttacatatcagaaagggagaggagtcaccgccacaaaatcctagcccagcgaccccacaggaaagagctgctttgtcccatcatcatctaaaatcctgtggaagttgtttattgacccaggtcaagccgtgtaaccaggaagagcaagatcttatgattgggaactacatgatgaagcggaggggaagttcattaaaggaaggatgtggatctctttccaaagaactggggagggctacggggcagaaaaagaggttcactgcctagggtatggcggtctaaaggactgaggaaggaccaagtctaacgagaa

SEQ ID NO: 889 - DNA, 143 bp, Artificial
  Synthetic oligonucleotide
tgtatgcctggaagggcgaaacggacgaggagtacctgtggtgcattgagcagaccctgtacttcaaggacgggcccctcaacatgattctggacgacgggggcgacctcaccaacctcatccacaccaagtacccgcagctt

SEQ ID NO: 890 - DNA, 171 bp, Artificial
  Synthetic oligonucleotide
agcaagtttgacaacctctatggctgccgggagtccctcatagatggcatcaagcgggccacagatgtgatgattgccggcaaggtagcggtggtagcaggctatggtgatgtgggcaagggctgtgcccaggccctgcggggtttcggagcccgcgtcatcatcaccgag

SEQ ID NO: 891 - DNA, 141 bp, Artificial
  Synthetic oligonucleotide
gtctgcgtttcaccctccagctgctgtccttgcccaggccccacctctcctccctaagagctaatggcaccaactttgtgattggtttgtcagtgtcccccatcgactctctggggctgatcacttagtttttggcctctg

SEQ ID NO: 892 - DNA, 151 bp, Artificial
  Synthetic oligonucleotide
agggaaccatgagctcagtggtcttggaacagctcactaagtcagtccttccttagcctggaagtcagtagtggagtcacaaagcccatgtgttttgccatctaggccttcacctggtctgtggacttatacctgtgtgcttggtttacag

SEQ ID NO: 893 - DNA, 296 bp, Artificial
  Synthetic oligonucleotide
cctggcttagtgctgggccttctcttaaacctcattacaatgaggttagtacttttagtccctgttttacaggggttagaatagactgttaaggggcaactgagaaagaacagagaagtgacagctaggggttgagaggggccagaaaaacatgaatgcaggcagatttcgtgaaatctgccaccactttataaccagatggttcctttcacaaccctgggtcaaaaagagaataatttggcctataatgttaaaagaaagcaggaaggtgggtaaataaaaatcttggtgcctgg

SEQ ID NO: 894 - DNA, 662 bp, Artificial
  Synthetic oligonucleotide
gtctgctaatctgtcacatgtgtgacactgaccgggtacccacaatgaaagatgatgtgtctcctgctccacccccaataccccaatactccactcctgatatctgggctgcccccatcaaagcttcatggagaaagaaggaattggccaagggtcctgcagtatccaggcctagccctggttggattttttccaggaaagagatgggaagatgaggcctgtggttggtggaaagtggctgtttatggagcagtggactgaactttggaaagaggagccctgggtctgctgctgactcactgtgttccccgcagggacagaaatacctacttcagatggctgtcttgacgctcgaatgatagaacattagtgaggagtttttatgctgagtttttttttttttttttttttttttgagatggagtcttgctctgtcgcccaggctggagtgcagtggcgcgatctcggctcactgcaagctccgcctcccaggttcacgccattctcctgcctcagcctcccgagtagctgggactacaggcgcccgccaccgtgtccggctaattttttatatttttagtagagatggggtttcaccgtggtttcgatctcctgacctcgtgatctgcctgctttggcctcccaaagtgctgggattacag

SEQ ID NO: 895 - DNA, 391 bp, Artificial
  Synthetic oligonucleotide
gcatgagccactgtgcccggcctttatgctgagttttaagggctgtatgagacaccaggtggtgggagggagctgttttgagagcagggaatttaggatacttaggaaattagaaaattagagaagtcataggatcttggaactaagggagaaccttagagtcctgtggagcagaacccagcatttgtatgtggagaaacggaggcccagagaagttgtgacttatccgggtcactctgcaggtctgggtgtcccacccgagtccatgtcagggctctttctgcacaccaagccccatgcccacctctgtgtgactggctgtggtgggaggggcctcctaggctagaggtgctgggatcccttttcagtccagaaataatgagcttagagg

SEQ ID NO: 896 - DNA, 461 bp, Artificial
  Synthetic oligonucleotide
gtctggaagtagcatggactaaaacccaggaaggatccacagggactgttgatgccagtgaggactccaggaagccggatcacggggactgttgatgccagtgaggactccaggaagctgctgttgggacagccctgctttgggagtctgaggttccaggaaaccccaggaatccggattctcatccctgagacctactcaggactagcccaggggaccgagctaggaaacctgcttgaggtggtagaggcagccaggggtgtgcagtggtccgggcgggcttcgatcagttccaggttggttgcttctccaaactggctccaagacaggcatgtggctcaagttggtctggactcaatcccgggactttaggacttttgctagaaatctggtgtggtgcaggagcgactccaggattcactctgtgggctgcttggactcagactcccccaggactagag

SEQ ID NO: 897 - DNA, 968 bp, Artificial
  Synthetic oligonucleotide
gctgcttctccctggtgggaggagttacaaccttgcaagggttctaaagacccccgggtgctgggtggtgggcttttcctgacaacttccataagttattggaacctaaattcacactgcttagcatcgtaatagtctgatcaaccctgctcagtgttgtcatacttgccctattaccagggagagaaatagagaggtgggtgcctccctagagtatccacccacactgtgtactgaatgcccctcctcaacctgtctctcgtggggacctgcacctgcttttcctactaactgctggcttgtatttattcccctaaagcctgttccataacccagtgtggttcttagacttgagcaaacctcagaaacacctggagggcttatccccagtcctgattctgtaggtctggggtgaggccttatagtgtgcattttaacaacgtccccagtgtttcccaatgctgctggtgcacaccaagtgtagaatttgcctctgtgcctgttgcacagtaggtggaggtggcaactgtaaaagagacccagctatcctaaaaacagaaaaggtactgtcttcagtggggctgccaggattggaaggaatgtgagcctgtagctgctcctttgcccccacgaaggccagcttgccttaggatgaagccaacacagaccgggtgcagcggctcacacctgtgatcccagcactttgggaggccaaggtgggcagatcacctgaggtcaggagtttgagaccagcctggccaacataatgaaaccctagctctactaaaaaaaaaatagaataaaaaaaaagattagccgggcatggtgatgcacgcctgtagtcccagctactcgggaggctgagacaggaaaatcacttgaactgggaggtggcacgttagagtgagttgagatcacacactgccactccaggtctgggggggacaagagacaaggggctcaatctc

SEQ ID NO: 898 - DNA, 140 bp, Artificial
  Synthetic oligonucleotide
ccctgccaagcaccaatggccagagacctgggggttcttggtaaagctcatccctgtgaaggacagtgaacacagatcaagaagtatcagctggaccccagcatggaggagcaactgcagacttcagcagactcattcag

SEQ ID NO: 899 - DNA, 1865 bp, Artificial
  Synthetic oligonucleotide
gtcaatcacttgatgtggcctcttactggcaacattagccatggattttgtacccttaggagctatgatgaaaaaaacaacacaagattaaatcaaatgcgagagaaaataatgtgcaaacaagagatgcggtaaacatgaaatatatgaggatactgtgggtataacatgacatactgttttacagtaaactgtttgttgttgtttttgttgttgtttttctgagtctcgctctgtcacccaggctggagtacagtggcgcaatctcggctcactgcaacctctgcctcctgggttcaaatgattctcctggctcagcctcagcctcagcctcccgagtagctgggattataggcgcctgccaccacgcccggcgaatttttgtatttttagtagagatggggtttcgccatgttggtcaggctggtttataggaccactgtcatatatgcagtccgtcatatacacttgggcaacagagtgaggaagaaagaaaggaaagaaaggaaggaaggaaggaaggaaggagaaaagaaaagaaaagagaaaaggaaaaagaaagaaagaaagctgatagcgcccactggatgcctggcctcaaccacaactctggaagacctactgcattaagggtcaattagcacaatggtctaaaacaaaagctatcacctttcccttaggactgactagttatgctatatttttactgattcttaggcactagtggtcttgtctgctacttagaagattacagactggcagattaaaggcacttcactttgggtcatgagccctggaaacaaattgtagccaccaaacagtctggatcactgttgtggtgtgcatggtaagggctcattctctgatgagaccaactagaatcaagcttttgatcaagcttgtgccactcagatggccacagttgccacttagatccatcataacattggacatggtgacaccatcatcaactgggcacaaagtaagggactctgtgtttctgaatcagaagctaccactacatgccagatttgtgacctctgccaaaagttagcctatttgtctcatggtgaaagaggccatattgcactgagtgttgactggctgcagagtgttgactggctcctggtaaattggtgacatcagacctttgacctcttccaagctattccactggtatctcattcctgttgactttttctcaggtaatggttttgctgttctagtctgatcagccaattgtggccacatcattgtggcccttgaaactaatctgtgtcatgattttggctttctggatggtgataatactgcattttttagtgcaaaaactcatcaacaatgggcttatagtcaaagtatttggtagccaattcattatcttcagactggtggtaccattgagagatggaataaacttttaattaaaaaacagcttaattgagatgtaattcacatatcataaaattcaccctttggaaggtttttagtttattcacagagttgtgcaaccatcctacagtatgtagtctttgtggctggcttccttcacttagcaaaatgttttcaaagtttatccatgtgggccgggcgcggtggctcacacctgtagtcccagcactgtgggaggccgaggtgggcagatcatgaggtcaggagatcaagaccatcctggctagcgtggtgaaaccccatctctactaaaaatacaaaaaattagccgggcatggtggtgggtgcctgtagtcccagctacttgggaggctgaggcaggagaatggggtgaacccaggaggcagagctttcagtgagctgagatcgcgccattgtactccagcctgggcaacagagcgagactctgtatc

SEQ ID NO: 900 - DNA, 95 bp, Artificial
  Synthetic oligonucleotide
attacaggcacccaccaccacacccggctaatttttgtatttttagtagagacggggtttcaccatgttggtcaggctggtcttgaactcctgac

SEQ ID NO: 901 - DNA, 47 bp, Artificial
  Synthetic oligonucleotide
ctcaagtgatctgcccaccttggcctcccaaagtgttgggattacag

SEQ ID NO: 902 - DNA, 76 bp, Artificial
  Synthetic oligonucleotide
gtgcagtggtccagctgcaacatcttctccacccaggaccatgcggcggctgccattgccaaggctggcattccgg

SEQ ID NO: 903 - DNA, 46 bp, Artificial
  Synthetic oligonucleotide
gtaccagttgggaagtccaggccctgatgtgccactcaccctccag

SEQ ID NO: 904 - DNA, 7 bp, Artificial
  Synthetic oligonucleotide
ctgccag

SEQ ID NO: 905 - DNA, 46 bp, Artificial
  Synthetic oligonucleotide
gcatccgaggcatctctgaggagaccacgactggggtccacaacct

SEQ ID NO: 906 - DNA, 35 bp, Artificial
  Synthetic oligonucleotide
ctacaagatgatggccaatgggatcctcaaggtgc

SEQ ID NO: 907 - DNA, 7 bp, Artificial
  Synthetic oligonucleotide
ctgccat

SEQ ID NO: 908 - DNA, 25 bp, Artificial
  Synthetic oligonucleotide
caatgtcaatgactccgtcaccaag

SEQ ID NO: 909 - DNA, 18 bp, Artificial
  Synthetic oligonucleotide
attgaccccatcaacgca

SEQ ID NO: 910 - DNA, 19 bp, Artificial
  Synthetic oligonucleotide
ctgcaggctgccatggagg

SEQ ID NO: 911 - DNA, 88 bp, Artificial
  Synthetic oligonucleotide
gctatgaggtgaccaccatggatgaggcctgtcaggagggcaacatctttgtcaccaccacaggctgtattgacatcatccttggccg

SEQ ID NO: 912 - DNA, 118 bp, Artificial
  Synthetic oligonucleotide
gcactttgagcagatgaaggatgatgccattgtgtgtaacattggacactttgacgtggagatcgatgtcaagtggctcaacgagaacgccgtggagaaggtgaacatcaagccgcag

SEQ ID NO: 913 - DNA, 42 bp, Artificial
  Synthetic oligonucleotide
gtggaccggtatcggttgaagaatgggcgccgcatcatcctg

SEQ ID NO: 914 - DNA, 81 bp, Artificial
  Synthetic oligonucleotide
ctggccgagggtcggctggtcaacctgggttgtgccatgggccaccccagcttcgtgatgagtaactccttcaccaaccag

SEQ ID NO: 915 - DNA, 72 bp, Artificial
  Synthetic oligonucleotide
gtgatggcgcagatcgagctgtggacccatccagacaagtaccccgttggggttcatttcctgcccaagaag

SEQ ID NO: 916 - DNA, 16 bp, Artificial
  Synthetic oligonucleotide
ctggatgaggcagtgg

SEQ ID NO: 917 - DNA, 20 bp, Artificial
  Synthetic oligonucleotide
ctgaagcccacctgggcaag

SEQ ID NO: 918 - DNA, 103 bp, Artificial
  Synthetic oligonucleotide
ctgaatgtgaagttgaccaagctaactgagaagcaagcccagtacctgggcatgtcctgtgatggccccttcaagccggatcactaccgctactgagagccag

SEQ ID NO: 919 - DNA, 14 bp, Artificial
  Synthetic oligonucleotide
ctgcagccgtcata

SEQ ID NO: 920 - DNA, 70 bp, Artificial
  Synthetic oligonucleotide
ctgttccaaatgtggcagcgggaacagagtaccctcttcaagccccggtcatgatggaggtcccagccac

SEQ ID NO: 921 - DNA, 85 bp, Artificial
  Synthetic oligonucleotide
gtccagtggttcttcagcccatgacagatgagaaggggctatattgaagggcaaagaggaactgttgtttgaattttcctgagag

SEQ ID NO: 922 - protein, 432 aa, Homo sapiens
MSDKLPYKVADIGLAAWGRKALDIAENEMPGLMRMRERYSASKPLKGARIAGCLHMTVETAVLIETLVTLGAEVQWSSCNIFSTQDHAAAAIAKAGIPVYAWKGETDEEYLWCIEQTLYFKDGPLNMILDDGGDLTNLIHTKYPQLLPGIRGISEETTTGVHNLYKMMANGILKVPAINVNDSVTKSKFDNLYGCRESLIDGIKRATDVMIAGKVAVVAGYGDVGKGCAQALRGFGARVIITEIDPINALQAAMEGYEVTTMDEACQEGNIFVTTTGCIDIILGRHFEQMKDDAIVCNIGHFDVEIDVKWLNENAVEKVNIKPQVDRYRLKNGRRIILLAEGRLVNLGCAMGHPSFVMSNSFTNQVMAQIELWTHPDKYPVGVHFLPKKLDEAVAEAHLGKLNVKLTKLTEKQAQYLGMSCDGPFKPDHYRY

SEQ ID NO: 923 - protein, 432 aa, Homo sapiens; identical to SEQ ID NO: 922

SEQ ID NO: 924 - protein, 404 aa, Homo sapiens
MPGLMRMRERYSASKPLKGARIAGCLHMTVETAVLIETLVTLGAEVQWSSCNIFSTQDHAAAAIAKAGIPVYAWKGETDEEYLWCIEQTLYFKDGPLNMILDDGGDLTNLIHTKYPQLLPGIRGISEETTTGVHNLYKMMANGILKVPAINVNDSVTKSKFDNLYGCRESLIDGIKRATDVMIAGKVAVVAGYGDVGKGCAQALRGFGARVIITEIDPINALQAAMEGYEVTTMDEACQEGNIFVTTTGCIDIILGRHFEQMKDDAIVCNIGHFDVEIDVKWLNENAVEKVNIKPQVDRYRLKNGRRIILLAEGRLVNLGCAMGHPSFVMSNSFTNQVMAQIELWTHPDKYPVGVHFLPKKLDEAVAEAHLGKLNVKLTKLTEKQAQYLGMSCDGPFKPDHYRY

SEQ ID NO: 925 - protein, 306 aa, Homo sapiens
MILDDGGDLTNLIHTKYPQLLPGIRGISEETTTGVHNLYKMMANGILKVPAINVNDSVTKSKFDNLYGCRESLIDGIKRATDVMIAGKVAVVAGYGDVGKGCAQALRGFGARVIITEIDPINALQAAMEGYEVTTMDEACQEGNIFVTTTGCIDIILGRHFEQMKDDAIVCNIGHFDVEIDVKWLNENAVEKVNIKPQVDRYRLKNGRRIILLAEGRLVNLGCAMGHPSFVMSNSFTNQVMAQIELWTHPDKYPVGVHFLPKKLDEAVAEAHLGKLNVKLTKLTEKQAQYLGMSCDGPFKPDHYRY

SEQ ID NO: 926 - protein, 343 aa, Homo sapiens
MSDKLPYKVVYAWKGETDEEYLWCIEQTLYFKDGPLNMILDDGGDLTNLIHTKYPQLLPGIRGISEETTTGVHNLYKMMANGILKVPAINVNDSVTKSKFDNLYGCRESLIDGIKRATDVMIAGKVAVVAGYGDVGKGCAQALRGFGARVIITEIDPINALQAAMEGYEVTTMDEACQEGNIFVTTTGCIDIILGRHFEQMKDDAIVCNIGHFDVEIDVKWLNENAVEKVNIKPQVDRYRLKNGRRIILLAEGRLVNLGCAMGHPSFVMSNSFTNQVMAQIELWTHPDKYPVGVHFLPKKLDEAVAEAHLGKLNVKLTKLTEKQAQYLGMSCDGPFKPDHYRY

SEQ ID NO: 927 - protein, 162 aa, Homo sapiens
MSDKLPYKVADIGLAAWGRKALDIAENEMPGLMRMRERYSASKPLKGARIAGCLHMTVETAVLIETLVTLGAEVRPTAVSPQSPCPPWVQPGKKTTVPGWGPSRCGADRGPGGVPPSHSVSSVSQCCHPLWCSGPAATSSPPRTMRRLPLPRLAFRVSPACF

SEQ ID NO: 928 - protein, 106 aa, Homo sapiens [sequence omitted]

SEQ ID NO: 929 - DNA, 6772 bp, Homo sapiens
ctcaaatggaagagaaagtatccataagccaggtcagcaacctcagtgaagagcccaacgaatttagagcccgcctaagatctctttattccataaaagagtgtgggattgttgtggaggcagaatttgcggctataaatcaaaggcagttctaaagtttgaactcttgtcaccctgcaccgttcttgagatgcattttctgcacagagtggggaggaagggactgcatttggcaagagattgagtggagtgatgggagggagagaatggagagaaaacagaggggttaggtgcagaccacaggttcaggggctctgattacagcaggagaaagactggcaattactaggaggggtagcagaactggaaaaggtcttttgtttgttagttttttaaggatgggaaggtctagagaagtttgaagacggaatataaggagcccaaatgaaggaagaaatgaaattactagtggagggagtccagggccttaaggatatggaaaggggtaagactgggggtcagtgcacaagtcgggagagcatcctctccaccgacaccagaggaagggtgggggatggtgaggagctcagtacagagttgggtggaggccgttcttcactgctccacgtggtaccatggaggcatccagagccaggccacagtggtggatgcagaagctccaatctggctctttctggagccccaggctgtagatacacactctacatgaggctgaggtaagcagaatagggatttgcctgctttaacagattatgaatttgcactgctgtaaagcaggggctttaaagacagaggggttctgttttatcttcctaagatcggcaatctacggtatcatccagagaccaggtttcttctctcccgttgctctgccatctctggggcatggtgctcacctgcatgggcgaggctggcctgccagcccccagaaaagagcaagaggagggcagtctggaggtggcacttatcacttctcaaaccttacagccacacctaactacagggaggctgagaaatgtcattcccttgggtggccctgtgtccagctaaaatgcaggagtctaggactgaaaaacagaagaggagacaaatattaggggacaattagccatttctgccaaaggcttcagacctaagcctgtgtaactgtgagatctgggtctgcatgcaggcgtgtgacttcacctccctgaccttcatccttctgtaacatgagaccactgtgcacaccaggcatggcgatgagtaagcagcagccatggaggcacctggcaggggcccagaactcagtgggcatgcagtacctgctgttgtttaccgtcctccctttctgccctagggaaaccaatgtacctgcacatcggggaggagatagacggcgtggacatgcgggcggaggttgggcttctgagccggaacatcatagtgatgggggagatggaggacaaatgctacccctacagaaaccacatctgcaatttctttgacttcgatacctttgggggccacatcaagtttgctctgggatttaaggcagcacacttggagggcacggagctgaagcatatgggacagcagctggtgggtcagtacccgattcacttccacctggccggtgatgtagacgaaaggggaggttatgacccacccacatacatcagggacctctccatccatcatacattctctcgctgcgtcacagtccatggctccaatggcttgttgatcaaggacgttgtgggctataactctttgggccactgcttcttcacggaagatgggccggaggaacgcaacacttttgaccactgtcttggcctccttgtcaagtctggaaccctcctcccctcggaccgtgacagcaagatgtgcaagatgatcacagaggactcctacccagggtacatccccaagcccaggcaagactgcaatgctgtgtccaccttctggatggccaatcccaacaacaacctcatcaactgtgccgctgcaggatctgaggaaactggattttggtttatttttcaccacgtaccaacgggcccctccgtgggaatgtactccccaggttattcagagcacattccactgggaaaattctataacaaccgagcacattccaactaccgggctggcatgatcatagacaacggagtcaaaaccaccgaggcctctgccaaggacaagcggccgttcctctcaatcatctctgccagatacagccctcaccaggacgccgacccgctgaagccccgggagccggccatcatcagacacttcattgcctacaagaaccaggaccacggggcctggctgcgcggcggggatgtgtggctggacagctgccggtttgctgacaatggcattggcctgaccctggccagtggtggaaccttcccgtatgacgacggctccaagcaagagataaagaacagcttgtttgttggcgagagtggcaacgtggggacggaaatgatggacaataggatctggggccctggcggcttggaccatagcggaaggaccctccctataggccagaattttccaattagaggaattcagttatatgatggccccatcaacatccaaaactgcactttccgaaagtttgtggccctggagggccggcacaccagcgccctggccttccgcctgaataatgcctggcagagctgcccccataacaacgtgaccggcattgcctttgaggacgttccgattacttccagagtgttcttcggagagcctgggccctggttcaaccagctggacatggatggggataagacatctgtgttccatgacgtcgacggctccgtgtccgagtaccctggctcctacctcacgaagaatgacaactggctggtccggcacccagactgcatcaatgttcccgactggagaggggccatttgcagtgggtgctatgcacagatgtacattcaagcctacaagaccagtaacctgcgaatgaagatcatcaagaatgacttccccagccaccctctttacctggagggggcgctcaccaggagcacccattaccagcaataccaaccggttgtcaccctgcagaagggctacaccatccactgggaccagacggcccccgccgaactcgccatctggctcatcaacttcaacaagggcgactggatccgagtggggctctgctacccgcgaggcaccacattctccatcctctcggatgttcacaatcgcctgctgaagcaaacgtccaagacgggcgtcttcgtgaggaccttgcagatggacaaagtggagcagagctaccctggcaggagccactactactgggacgaggactcagggctgttgttcctgaagctgaaagctcagaacgagagagagaagtttgctttctgctccatgaaaggctgtgagaggataaagattaaagctctgattccaaagaacgcaggcgtcagtgactgcacagccacagcttaccccaagttcaccgagagggctgtcgtagacgtgccgatgcccaagaagctctttggttctcagctgaaaacaaaggaccatttcttggaggtgaagatggagagttccaagcagcacttcttccacctctggaacgacttcgcttacattgaagtggatgggaagaagtaccccagttcggaggatggcatccaggtggtggtgattgacgggaaccaagggcgcgtggtgagccacacgagcttcaggaactccattctgcaaggcataccatggcagcttttcaactatgtggcgaccatccctgacaattccatagtgcttatggcatcaaagggaagatacgtctccagaggcccatggaccagagtgctggaaaagcttggggcagacaggggtctcaagttgaaagagcaaatggcattcgttggcttcaaaggcagcttccggcccatctgggtgacactggacactgaggatcacaaagccaaaatcttccaagttgtgcccatccctgtggtgaagaagaagaagttgtgaggacagctgccgcccggtgccacctcgtggtagactatgacggtgactcttggcagcagaccagtgggggatggctgggtcccccagcccctgccagcagctgcctgggaaggccgtgtttcagccctgatgggccaagggaaggctatcagagaccctggtgctgccacctgcccctactcaagtgtctacctggagcccctggggcggtgctggccaatgctggaaacattcactttcctgcagcctcttgggtgcttctctcctatctgtgcctcttcagtgggggtttggggaccatatcaggagacctgggttgtgctgacagcaaagatccactttggcaggagccctgacccagctaggaggtagtctggagggctggtcattcacagatccccatggtcttcagcagacaagtgagggtggtaaatgtaggagaaagagccttggccttaaggaaatctttactcctgtaagcaagagccaacctcacaggattaggagctggggtagaactggctatccttggggaagaggcaagccctgcctctggccgtgtccacctttcaggagactttgagtggcaggtttggacttggactagatgactctcaaaggcccttttagttctgagattccagaaatctgctgcatttcacatggtacctggaacccaacagttcatggatatccactgatatccatgatgctgggtgccccagcgcacacgggatggagaggtgagaactaatgcctagcttgaggggtctgcagtccagtagggcaggcagtcaggtccatgtgcactgcaatgccaggtggagaaatcacagagaggtaaaatggaggccagtgccatttcagaggggaggctcaggaaggcttcttgcttacaggaatgaaggctgggggcattttgctggggggagatgaggcagcctctggaatggctcagggattcagccctccctgccgctgcctgctgaagctggtgactacggggtcgccctttgctcacgtctctctggcccactcatgatggagaagtgtggtcagaggggagcaatgggctttgctgcttatgagcacagaggaattcagtccccaggcagccctgcctctgactccaagagggtgaagtccacagaagtgagctcctgccttagggcctcatttgctcttcatccagggaactgagcacagggggcctccaggagaccctagatgtgctcgtactccctcggcctgggatttcagagctggaaatatagaaaatatctagcccaaagccttcattttaacagatggggaaagtgagcccccaagatgggaaagaaccacacagctaagggagggcctggggagccccaccctagcccttgctgccacaccacattgcctcaacaaccggccccagagtgcccaggcactcctgaggtagcttctggaaatggggacaagtcccctcgaaggaaaggaaatgactagagtagaatgacagctagcagatctcttccctcctgctcccagcgcacacaaacccgccctccccttggtgttggcggtccctgtggccttcactttgttcactacctgtcagcccagcctgggtgcacagtagctgcaactccccattggtgctacctggctctcctgtctctgcagctctacaggtgaggcccagcagagggagtagggctcgccatgtttctggtgagccaatttggctgatcttgggtgtctgaacagctattgggtccaccccagtccctttcagctgctgcttaatgccctgctctctccctggcccaccttatagagagcccaaagagctcctgtaagagggagaactctatctgtggtttataatcttgcacgaggcaccagagtctccctgggtcttgtgatgaactacatttatcccctttcctgccccaaccacaaactctttccttcaaagagggcctgcctggctccctccacccaactgcacccatgagactcggtccaagagtccattccccaggtgggagccaactgtcagggaggtctttcccaccaaacatctttcagctgctgggaggtgaccatagggctctgcttttaaagatatggctgcttcaaaggccagagtcacaggaaggacttcttccagggagattagtggtgatggagaggagagttaaaatgacctcatgtccttcttgtccacggttttgttgagttttcactcttctaatgcaagggtctcacactgtgaaccacttaggatgtgatcactttcaggtggccaggaatgttgaatgtctttggctcagttcatttaaaaaagatatctatttgaaagttctcagagttgtacatatgtttcacagtacaggatctgtacataaaagtttctttcctaaaccattcaccaagagccaatatctaggcattttcttggtagcacaaattttcttattgcttagaaaattgtcctccttgttatttctgtttgtaagacttaagtgagttaggtctttaaggaaagcaacgctcctctgaaatgcttgtcttttttctgttgccgaaatagctggtcctttttcgggagttagatgtatagagtgtttgtatgtaaacatttcttgtaggcatcaccatgaacaaagatatattttctatttatttattatatgtgcacttcaagaagtcactgtcagagaaataaagaattgtcttaaatgtcatg

SEQ ID NO: 930 - DNA, 6259 bp, Homo sapiens
ttagaatcacctggacaacttttcaaagtccagatgtccatgctgcaccccagacacaatcaaatctgaggctccgaggatggggactgggcatgagtattttttaaagactcctccccatgggatgcagaaccatgtttggactgttggccgctgttcatggtgctggtagtggtggtgcaaattgtaaaaagtggccagcccagatcctagaagagtggctacttattgtaaatgctccgtaaaatgttcacccagccataagcagtagatcactggtttcgatactgagtactgtaggacctcaggccaggcatttatctattccaagactttaggctgtctttctcataacaaaactgatgggggcaatcattgggataatcatctcgggccgttgtaaatagtgttgcagcagggacaattttagacttctgagtatatgtttagaacattaatcagcaccttccttctctataaaaaaaaaacgactttgctctgtaatttctgtgtcattcccaggccactacaatggatggagttaacctcagcaccgaggttgtctacaaaaaaggccaggattataggtttgcttgctacgaccggggcagagcctgccggagctaccgtgtacggttcctctgtgggaagcctgtgaggcccaaactcacagtcaccattgacaccaatgtgaacagcaccattctgaacttggaggataatgtacagtcatggaaacctggagataccctggtcattgccagtactgattactccatgtaccaggcagaagagttccaggtgcttccctgcagatcctgcgcccccaaccaggtcaaagtggcagggaaaccaatgtacctgcacatcggggaggagatagacggcgtggacatgcgggcggaggttgggcttctgagccggaacatcatagtgatgggggagatggaggacaaatgctacccctacagaaaccacatctgcaatttctttgacttcgatacctttgggggccacatcaagtttgctctgggatttaaggcagcacacttggagggcacggagctgaagcatatgggacagcagctggtgggtcagtacccgattcacttccacctggccggtgatgtagacgaaaggggaggttatgacccacccacatacatcagggacctctccatccatcatacattctctcgctgcgtcacagtccatggctccaatggcttgttgatcaaggacgttgtgggctataactctttgggccactgcttcttcacggaagatgggccggaggaacgcaacacttttgaccactgtcttggcctccttgtcaagtctggaaccctcctcccctcggaccgtgacagcaagatgtgcaagatgatcacagaggactcctacccagggtacatccccaagcccaggcaagactgcaatgctgtgtccaccttctggatggccaatcccaacaacaacctcatcaactgtgccgctgcaggatctgaggaaactggattttggtttatttttcaccacgtaccaacgggcccctccgtgggaatgtactccccaggttattcagagcacattccactgggaaaattctataacaaccgagcacattccaactaccgggctggcatgatcatagacaacggagtcaaaaccaccgaggcctctgccaaggacaagcggccgttcctctcaatcatctctgccagatacagccctcaccaggacgccgacccgctgaagccccgggagccggccatcatcagacacttcattgcctacaagaaccaggaccacggggcctggctgcgcggcggggatgtgtggctggacagctgccggtttgctgacaatggcattggcctgaccctggccagtggtggaaccttcccgtatgacgacggctccaagcaagagataaagaacagcttgtttgttggcgagagtggcaacgtggggacggaaatgatggacaataggatctggggccctggcggcttggaccatagcggaaggaccctccctataggccagaattttccaattagaggaattcagttatatgatggccccatcaacatccaaaactgcactttccgaaagtttgtggccctggagggccggcacaccagcgccctggccttccgcctgaataatgcctggcagagctgcccccataacaacgtgaccggcattgcctttgaggacgttccgattacttccagagtgttcttcggagagcctgggccctggttcaaccagctggacatggatggggataagacatctgtgttccatgacgtcgacggctccgtgtccgagtaccctggctcctacctcacgaagaatgacaactggctggtccggcacccagactgcatcaatgttcccgactggagaggggccatttgcagtgggtgctatgcacagatgtacattcaagcctacaagaccagtaacctgcgaatgaagatcatcaagaatgacttccccagccaccctctttacctggagggggcgctcaccaggagcacccattaccagcaataccaaccggttgtcaccctgcagaagggctacaccatccactgggaccagacggcccccgccgaactcgccatctggctcatcaacttcaacaagggcgactggatccgagtggggctctgctacccgcgaggcaccacattctccatcctctcggatgttcacaatcgcctgctgaagcaaacgtccaagacgggcgtcttcgtgaggaccttgcagatggacaaagtggagcagagctaccctggcaggagccactactactgggacgaggactcagggctgttgttcctgaagctgaaagctcagaacgagagagagaagtttgctttctgctccatgaaaggctgtgagaggataaagattaaagctctgattccaaagaacgcaggcgtcagtgactgcacagccacagcttaccccaagttcaccgagagggctgtcgtagacgtgccgatgcccaagaagctctttggttctcagctgaaaacaaaggaccatttcttggaggtgaagatggagagttccaagcagcacttcttccacctctggaacgacttcgcttacattgaagtggatgggaagaagtaccccagttcggaggatggcatccaggtggtggtgattgacgggaaccaagggcgcgtggtgagccacacgagcttcaggaactccattctgcaaggcataccatggcagcttttcaactatgtggcgaccatccctgacaattccatagtgcttatggcatcaaagggaagatacgtctccagaggcccatggaccagagtgctggaaaagcttggggcagacaggggtctcaagttgaaagagcaaatggcattcgttggcttcaaaggcagcttccggcccatctgggtgacactggacactgaggatcacaaagccaaaatcttccaagttgtgcccatccctgtggtgaagaagaagaagttgtgaggacagctgccgcccggtgccacctcgtggtagactatgacggtgactcttggcagcagaccagtgggggatggctgggtcccccagcccctgccagcagctgcctgggaaggccgtgtttcagccctgatgggccaagggaaggctatcagagaccctggtgctgccacctgcccctactcaagtgtctacctggagcccctggggcggtgctggccaatgctggaaacattcactttcctgcagcctcttgggtgcttctctcctatctgtgcctcttcagtgggggtttggggaccatatcaggagacctgggttgtgctgacagcaaagatccactttggcaggagccctgacccagctaggaggtagtctggagggctggtcattcacagatccccatggtcttcagcagacaagtgagggtggtaaatgtaggagaaagagccttggccttaaggaaatctttactcctgtaagcaagagccaacctcacaggattaggagctggggtagaactggctatccttggggaagaggcaagccctgcctctggccgtgtccacctttcaggagactttgagtggcaggtttggacttggactagatgactctcaaaggcccttttagttctgagattccagaaatctgctgcatttcacatggtacctggaacccaacagttcatggatatccactgatatccatgatgctgggtgccccagcgcacacgggatggagaggtgagaactaatgcctagcttgaggggtctgcagtccagtagggcaggcagtcaggtccatgtgcactgcaatgccaggtggagaaatcacagagaggtaaaatggaggccagtgccatttcagaggggaggctcaggaaggcttcttgcttacaggaatgaaggctgggggcattttgctggggggagatgaggcagcctctggaatggctcagggattcagccctccctgccgctgcctgctgaagctggtgactacggggtcgccctttgctcacgtctctctggcccactcatgatggagaagtgtggtcagaggggagcaatgggctttgctgcttatgagcacagaggaattcagtccccaggcagccctgcctctgactccaagagggtgaagtccacagaagtgagctcctgccttagggcctcatttgctcttcatccagggaactgagcacagggggcctccaggagaccctagatgtgctcgtactccctcggcctgggatttcagagctggaaatatagaaaatatctagcccaaagccttcattttaacagatggggaaagtgagcccccaagatgggaaagaaccacacagctaagggagggcctggggagccccaccctagcccttgctgccacaccacattgcctcaacaaccggccccagagtgcccaggcactcctgaggtagcttctggaaatggggacaagtcccctcgaaggaaaggaaatgactagagtagaatgacagctagcagatctcttccctcctgctcccagcgcacacaaacccgccctccccttggtgttggcggtccctgtggccttcactttgttcactacctgtcagcccagcctgggtgcacagtagctgcaactccccattggtgctacctggctctcctgtctctgcagctctacaggtgaggcccagcagagggagtagggctcgccatgtttctggtgagccaatttggctgatcttgggtgtctgaacagctattgggtccaccccagtccctttcagctgctgcttaatgccctgctctctccctggcccaccttatagagagcccaaagagctcctgtaagagggagaactctatctgtggtttataatcttgcacgaggcaccagagtctccctgggtcttgtgatgaactacatttatcccctttcctgccccaaccacaaactctttccttcaaagagggcctgcctggctccctccacccaactgcacccatgagactcggtccaagagtccattccccaggtgggagccaactgtcagggaggtctttcccaccaaacatctttcagctgctgggaggtgaccatagggctctgcttttaaagatatggctgcttcaaaggccagagtcacaggaaggacttcttccagggagattagtggtgatggagaggagagttaaaatgacctcatgtccttcttgtccacggttttgttgagttttcactcttctaatgcaagggtctcacactgtgaaccacttaggatgtgatcactttcaggtggccaggaatgttgaatgtctttggctcagttcatttaaaaaagatatctatttgaaagttctcagagttgtacatatgtttcacagtacaggatctgtacataaaagtttctttcctaaaccattcaccaagagccaatatctaggcattttcttggtagcacaaattttcttattgcttagaaaattgtcctccttgttatttctgtttgtaagacttaagtgagttaggtctttaaggaaagcaacgctcctctgaaatgcttgtcttttttctgttgccgaaatagctggtcctttttcgggagttagatgtatagagtgtttgtatgtaaacatttcttgtaggcatcaccatgaacaaagatatattttctatttatttattatatgtgcacttcaagaagtcactgtcagagaaataaagaattgtcttaaatgtcatg

SEQ ID NO: 931 - DNA, 6882 bp, Homo sapiens
gggggagctagcgctcaagcagagcccagcgcggtgctatcggacagagcctggcgagcgcaagcggcgcggggagccagcggggctgagcgcggccagggtctgaacccagatttcccagactagctaccactccgcttgcccacgccccgggagctcgcggcgcctggcggtcagcgaccagacgtccggggccgctgcgctcctggcccgcgaggcgtgacactgtctcggctacagacccagagggagcacactgccaggatgggagctgctgggaggcaggacttcctcttcaaggccatgctgaccatcagctggctcactctgacctgcttccctggggccacatccacagtggctgctgggtgccctgaccagagccctgagttgcaaccctggaaccctggccatgaccaagaccaccatgtgcatatcggccagggcaagacactgctgctcacctcttctgccacggtctattccatccacatctcagagggaggcaagctggtcattaaagaccacgacgagccgattgttttgcgaacccggcacatcctgattgacaacggaggagagctgcatgctgggagtgccctctgccctttccagggcaatttcaccatcattttgtatggaagggctgatgaaggtattcagccggatccttactatggtctgaagtacattggggttggtaaaggaggcgctcttgagttgcatggacagaaaaagctctcctggacatttctgaacaagacccttcacccaggtggcatggcagaaggaggctatttttttgaaaggagctggggccaccgtggagttattgttcatgtcatcgaccccaaatcaggcacagtcatccattctgaccggtttgacacctatagatccaagaaagagagtgaacgtctggtccagtatttgaacgcggtgcccgatggcaggatcctttctgttgcagtgaatgatgaaggttctcgaaatctggatgacatggccaggaaggcgatgaccaaattgggaagcaaacacttcctgcaccttggatttagacacccttggagttttctaactgtgaaaggaaatccatcatcttcagtggaagaccatattgaatatcatggacatcgaggctctgctgctgcccgggtattcaaattgttccagacagagcatggcgaatatttcaatgtttctttgtccagtgagtgggttcaagacgtggagtggacggagtggttcgatcatgataaagtatctcagactaaaggtggggagaaaatttcagacctctggaaagctcacccaggaaaaatatgcaatcgtcccattgatatacaggccactacaatggatggagttaacctcagcaccgaggttgtctacaaaaaaggccaggattataggtttgcttgctacgaccggggcagagcctgccggagctaccgtgtacggttcctctgtgggaagcctgtgaggcccaaactcacagtcaccattgacaccaatgtgaacagcaccattctgaacttggaggataatgtacagtcatggaaacctggagataccctggtcattgccagtactgattactccatgtaccaggcagaagagttccaggtgcttccctgcagatcctgcgcccccaaccaggtcaaagtggcagggaaaccaatgtacctgcacatcggggaggagatagacggcgtggacatgcgggcggaggttgggcttctgagccggaacatcatagtgatgggggagatggaggacaaatgctacccctacagaaaccacatctgcaatttctttgacttcgatacctttgggggccacatcaagtttgctctgggatttaaggcagcacacttggagggcacggagctgaagcatatgggacagcagctggtgggtcagtacccgattcacttccacctggccggtgatgtagacgaaaggggaggttatgacccacccacatacatcagggacctctccatccatcatacattctctcgctgcgtcacagtccatggctccaatggcttgttgatcaaggacgttgtgggctataactctttgggccactgcttcttcacggaagatgggccggaggaacgcaacacttttgaccactgtcttggcctccttgtcaagtctggaaccctcctcccctcggaccgtgacagcaagatgtgcaagatgatcacagaggactcctacccagggtacatccccaagcccaggcaagactgcaatgctgtgtccaccttctggatggccaatcccaacaacaacctcatcaactgtgccgctgcaggatctgaggaaactggattttggtttatttttcaccacgtaccaacgggcccctccgtgggaatgtactccccaggttattcagagcacattccactgggaaaattctataacaaccgagcacattccaactaccgggctggcatgatcatagacaacggagtcaaaaccaccgaggcctctgccaaggacaagcggccgttcctctcaatcatctctgccagatacagccctcaccaggacgccgacccgctgaagccccgggagccggccatcatcagacacttcattgcctacaagaaccaggaccacggggcctggctgcgcggcggggatgtgtggctggacagctgccggtttgctgacaatggcattggcctgaccctggccagtggtggaaccttcccgtatgacgacggctccaagcaagagataaagaacagcttgtttgttggcgagagtggcaacgtggggacggaaatgatggacaataggatctggggccctggcggcttggaccatagcggaaggaccctccctataggccagaattttccaattagaggaattcagttatatgatggccccatcaacatccaaaactgcactttccgaaagtttgtggccctggagggccggcacaccagcgccctggccttccgcctgaataatgcctggcagagctgcccccataacaacgtgaccggcattgcctttgaggacgttccgattacttccagagtgttcttcggagagcctgggccctggttcaaccagctggacatggatggggataagacatctgtgttccatgacgtcgacggctccgtgtccgagtaccctggctcctacctcacgaagaatgacaactggctggtccggcacccagactgcatcaatgttcccgactggagaggggccatttgcagtgggtgctatgcacagatgtacattcaagcctacaagaccagtaacctgcgaatgaagatcatcaagaatgacttccccagccaccctctttacctggagggggcgctcaccaggagcacccattaccagcaataccaaccggttgtcaccctgcagaagggctacaccatccactgggaccagacggcccccgccgaactcgccatctggctcatcaacttcaacaagggcgactggatccgagtggggctctgctacccgcgaggcaccacattctccatcctctcggatgttcacaatcgcctgctgaagcaaacgtccaagacgggcgtcttcgtgaggaccttgcagatggacaaagtggagcagagctaccctggcaggagccactactactgggacgaggactcaggaaaacaaaggaccatttcttggaggtgaagatggagagttccaagcagcacttcttccacctctggaacgacttcgcttacattgaagtggatgggaagaagtaccccagttcggaggatggcatccaggtggtggtgattgacgggaaccaagggcgcgtggtgagccacacgagcttcaggaactccattctgcaaggcataccatggcagcttttcaactatgtggcgaccatccctgacaattccatagtgcttatggcatcaaagggaagatacgtctccagaggcccatggaccagagtgctggaaaagcttggggcagacaggggtctcaagttgaaagagcaaatggcattcgttggcttcaaaggcagcttccggcccatctgggtgacactggacactgaggatcacaaagccaaaatcttccaagttgtgcccatccctgtggtgaagaagaagaagttgtgaggacagctgccgcccggtgccacctcgtggtagactatgacggtgactcttggcagcagaccagtgggggatggctgggtcccccagcccctgccagcagctgcctgggaaggccgtgtttcagccctgatgggccaagggaaggctatcagagaccctggtgctgccacctgcccctactcaagtgtctacctggagcccctggggcggtgctggccaatgctggaaacattcactttcctgcagcctcttgggtgcttctctcctatctgtgcctcttcagtgggggtttggggaccatatcaggagacctgggttgtgctgacagcaaagatccactttggcaggagccctgacccagctaggaggtagtctggagggctggtcattcacagatccccatggtcttcagcagacaagtgagggtggtaaatgtaggagaaagagccttggccttaaggaaatctttactcctgtaagcaagagccaacctcacaggattaggagctggggtagaactggctatccttggggaagaggcaagccctgcctctggccgtgtccacctttcaggagactttgagtggcaggtttggacttggactagatgactctcaaaggcccttttagttctgagattccagaaatctgctgcatttcacatggtacctggaacccaacagttcatggatatccactgatatccatgatgctgggtgccccagcgcacacgggatggagaggtgagaactaatgcctagcttgaggggtctgcagtccagtagggcaggcagtcaggtccatgtgcactgcaatgccaggtggagaaatcacagagaggtaaaatggaggccagtgccatttcagaggggaggctcaggaaggcttcttgcttacaggaatgaaggctgggggcattttgctggggggagatgaggcagcctctggaatggctcagggattcagccctccctgccgctgcctgctgaagctggtgactacggggtcgccctttgctcacgtctctctggcccactcatgatggagaagtgtggtcagaggggagcaatgggctttgctgcttatgagcacagaggaattcagtccccaggcagccctgcctctgactccaagagggtgaagtccacagaagtgagctcctgccttagggcctcatttgctcttcatccagggaactgagcacagggggcctccaggagaccctagatgtgctcgtactccctcggcctgggatttcagagctggaaatatagaaaatatctagcccaaagccttcattttaacagatggggaaagtgagcccccaagatgggaaagaaccacacagctaagggagggcctggggagccccaccctagcccttgctgccacaccacattgcctcaacaaccggccccagagtgcccaggcactcctgaggtagcttctggaaatggggacaagtcccctcgaaggaaaggaaatgactagagtagaatgacagctagcagatctcttccctcctgctcccagcgcacacaaacccgccctccccttggtgttggcggtccctgtggccttcactttgttcactacctgtcagcccagcctgggtgcacagtagctgcaactccccattggtgctacctggctctcctgtctctgcagctctacaggtgaggcccagcagagggagtagggctcgccatgtttctggtgagccaatttggctgatcttgggtgtctgaacagctattgggtccaccccagtccctttcagctgctgcttaatgccctgctctctccctggcccaccttatagagagcccaaagagctcctgtaagagggagaactctatctgtggtttataatcttgcacgaggcaccagagtctccctgggtcttgtgatgaactacatttatcccctttcctgccccaaccacaaactctttccttcaaagagggcctgcctggctccctccacccaactgcacccatgagactcggtccaagagtccattccccaggtgggagccaactgtcagggaggtctttcccaccaaacatctttcagctgctgggaggtgaccatagggctctgcttttaaagatatggctgcttcaaaggccagagtcacaggaaggacttcttccagggagattagtggtgatggagaggagagttaaaatgacctcatgtccttcttgtccacggttttgttgagttttcactcttctaatgcaagggtctcacactgtgaaccacttaggatgtgatcactttcaggtggccaggaatgttgaatgtctttggctcagttcatttaaaaaagatatctatttgaaagttctcagagttgtacatatgtttcacagtacaggatctgtacataaaagtttctttcctaaaccattcaccaagagccaatatctaggcattttcttggtagcacaaattttcttattgcttagaaaattgtcctccttgttatttctgtttgtaagacttaagtgagttaggtctttaaggaaagcaacgctcctctgaaatgcttgtcttttttctgttgccgaaatagctggtcctttttcgggagttagatgtatagagtgtttgtatgtaaacatttcttgtaggcatcaccatgaacaaagatatattttctatttatttattatatgtgcacttcaagaagtcactgtcagagaaataaagaattgtcttaaatgtcatg

SEQ ID NO: 932 - DNA, 2818 bp, Homo sapiens
gggggagctagcgctcaagcagagcccagcgcggtgctatcggacagagcctggcgagcgcaagcggcgcggggagccagcggggctgagcgcggccagggtctgaacccagatttcccagactagctaccactccgcttgcccacgccccgggagctcgcggcgcctggcggtcagcgaccagacgtccggggccgctgcgctcctggcccgcgaggcgtgacactgtctcggctacagacccagaggtaagagggcctggctgggggcgtcagggatgagctgacggcccatgccacggaagagaggtaagaagtgggggcccgcgcctccacccggcacagggtaaacgttacccgcctcagtttctgtttgtctgtccaccctgtgctgtgcagtctacctctatctgtctgtttgtccatgcgtctgttgatgggcacacgctcttggcactgtcctctgtgggatttctctgagatcttgtgatgctttacaagctgcaggtgccggggggcgctggagtccccagagggcatccagagggggcagactcctgctttccgtagattttcccccttctgaatggcaccgggggcttgcgcccgggagagtgtctcgccgaggagggagtaccacaagggtcaggtctcggtgtcctgccgactgggagccagctcacgccgagctctagcgggcgtgcgcctagcaacaggtctgcgccctgctgctcctgcctcagcacgctcttcctcccagtttccctcgcctcccagtgcctccgggacagcgctaggcacccagcgacgcgctggcgcggggccgagctgaggcaattgcaatgttagatgaacccggggggctctgctgatgtttagactgagactccaaacgtggcatcgctggaagaaggtctggtggtccctggcaaaggacgtcggctccaagaaaggtcgcgttaggttgtgaggaaaggcagagagtcctggcagaacgctggccaggtctccagctcgccgctctgggaacgaaggccagtgacattctggaatggaccccaagggatgcgtgtgctcatgagagaggagcgctgtgcgccctgggtcctcagccgcagacactctctgcgacagccgctgttccccaagggtcggacgctacggcagtcccaggagttccgccagctgccgggtttgaggtcctgagtccttctccaagcagccaacgctacccacagggactccatcttcactttatttttgcatccgagaacttgttgatggaattgatgaaaatgctggagttgatcacaatgaaaaaaaaattcttatttaaagacaaatggaagaacttttatgtgataaaaatcggtcaactgttttcccctacctacactacttggaggaaagataaaactcagaaggaatcttagcttcttccgtctaaaaggattggagctgaagaatacatgctacagatgctcagaatctttctatgagactgctggtgacatgaacagagcaggaggacatggggccttggatgaccttgaattcctggctgtcttctgtggactcccatgcagattccagtttccagcatacccatggctttctgatggagaaggtcagtgaagccgcatcacttatgcagctccaggtgggggtcactcggctcaaggtggtggagttggaactcagacctatgtcaccaggctgctaggctctggggatgcagcagtgaccaaaatgagctgagacctgcctgcatggagattacagtctagagcagtgctgtccaggagacatacaatgggtgccacatttggaattctgagttttctagtagccccactaagacaaagtttaaaaagaaacaggtgacaagccctggactccggtgcggctgggcctggggctacctgaagggagagcagagactcaggtgcccggtgagcaatggcagtgaggagaagcagagagcaacgccagcaagcaacgcctcctgcccctgcttttgctcttgtgtctcttgaccctgtgaggtccagcaaccatggggactgagcagcagttggacttgggggcagccgagcttctggaaaattttagcttgttattgtgaagacttgtggaatatcccaaagtgctggctttcggaaaagggtgcctacattttcttctgcacaggctctgctgaaggagtttgctgcactcttgaaaggacaggcaagctcaggtcctcatggctcgatctctgagcaggcctctaacccagtgaggacagcggtcaaccagtctccagctaacagcttcctgcagagacttccagcattgttagctaacatgcactcttctgaggccttcaacagctggaaactgtttcaggactatcttgccagctaagaagcggaatcccagttcttgttgccaggaagcttttaatggccaatggagaatgctgtcctcccttggtgaaagaattcccaaggaaatttgggaatcttttaggattcacttcaatggaatgtttcttgggacatgtgtcttcaggcactggaagccactcacggacaagaaggcacggatgaccccttgctcagcaatgtgggattagcctctttgggcagggcaatctctctgcccccagtggcttagacagctggctctgagacatagcagaaggtctcacaaatgttaggaaaagggggttgagcattattcctccatgtggaattatttttgtatttatccagaaagtgactcttttttggtctttgaaatcatctgtgatataattagaagatgtcagagcttca

SEQ ID NO: 933 - DNA, 2651 bp, Homo sapiens
gggggagctagcgctcaagcagagcccagcgcggtgctatcggacagagcctggcgagcgcaagcggcgcggggagccagcggggctgagcgcggccagggtctgaacccagatttcccagactagctaccactccgcttgcccacgccccgggagctcgcggcgcctggcggtcagcgaccagacgtccggggccgctgcgctcctggcccgcgaggcgtgacactgtctcggctacagacccagaggtaagagggcctggctgggggcgtcagggatgagctgacggcccatgccacggaagagaggtaagaagtgggggcccgcgcctccacccggcacagggtaaacgttacccgcctcagtttctgtttgtctgtccaccctgtgctgtgcagtctacctctatctgtctgtttgtccatgcgtctgttgatgggcacacgctcttggcactgtcctctgtgggatttctctgagatcttgtgatgctttacaagctgcaggtgccggggggcgctggagtccccagagggcatccagagggggcagactcctgctttccgtagattttcccccttctgaatggcaccgggggcttgcgcccgggagagtgtctcgccgaggagggagtaccacaagggtcaggtctcggtgtcctgccgactgggagccagctcacgccgagctctagcgggcgtgcgcctagcaacaggtctgcgccctgctgctcctgcctcagcacgctcttcctcccagtttccctcgcctcccagtgcctccgggacagcgctaggcacccagcgacgcgctggcgcggggccgagctgaggcaattgcaatgttagatgaacccggggggctctgctgatgtttagactgagactccaaacgtggcatcgctggaagaaggtctggtggtccctggcaaaggacgtcggctccaagaaaggtcgcgttaggttgtgaggaaaggcagagagtcctggcagaacgctggccaggtctccagctcgccgctctgggaacgaaggccagtgacattctggaatggaccccaagggatgcgtgtgctcatgagagaggagcgctgtgcgccctgggtcctcagccgcagacactctctgcgacagccgctgttccccaagggtcggacgctacggcagtcccaggagttccgccagctgccgggtttgaggtcctgagtccttctccaagcagccaacgctacccacagggactccatcttcactttatttttgcatccgagaacttgttgatggaattgatgaaaatgctggagttgatcacaatgaaaaaaaaattcttatttaaagacaaatggaagaacttttatgtgataaaaatcggtcaactgttttcccctacctacactacttggaggaaagataaaactcagaaggaatcttagcttcttccgtctaaaaggattggagctgaagaatacatgctacagatgctcagaatctttctatgagactgctggtgacatgaacagagcaggaggacatggggccttggatgaccttgaattcctggctgtcttctgtggactcccatgcagattccagtttccagcatacccatggctttctgatggagaaggtcagtgaagccgcatcacttatgcagctccaggtgggggtcactcggctcaaggtggtggagttggaactcagacctatgtcaccgtgacaagccctggactccggtgcggctgggcctggggctacctgaagggagagcagagactcaggtgcccggtgagcaatggcagtgaggagaagcagagagcaacgccagcaagcaacgcctcctgcccctgcttttgctcttgtgtctcttgaccctgtgaggtccagcaaccatggggactgagcagcagttggacttgggggcagccgagcttctggaaaattttagcttgttattgtgaagacttgtggaatatcccaaagtgctggctttcggaaaagggtgcctacattttcttctgcacaggctctgctgaaggagtttgctgcactcttgaaaggacaggcaagctcaggtcctcatggctcgatctctgagcaggcctctaacccagtgaggacagcggtcaaccagtctccagctaacagcttcctgcagagacttccagcattgttagctaacatgcactcttctgaggccttcaacagctggaaactgtttcaggactatcttgccagctaagaagcggaatcccagttcttgttgccaggaagcttttaatggccaatggagaatgctgtcctcccttggtgaaagaattcccaaggaaatttgggaatcttttaggattcacttcaatggaatgtttcttgggacatgtgtcttcaggcactggaagccactcacggacaagaaggcacggatgaccccttgctcagcaatgtgggattagcctctttgggcagggcaatctctctgcccccagtggcttagacagctggctctgagacatagcagaaggtctcacaaatgttaggaaaagggggttgagcattattcctccatgtggaattatttttgtatttatccagaaagtgactcttttttggtctttgaaatcatctgtgatataattagaagatgtcagagcttca

SEQ ID NO: 934 - DNA, 3886 bp, Homo sapiens
gggggagctagcgctcaagcagagcccagcgcggtgctatcggacagagcctggcgagcgcaagcggcgcggggagccagcggggctgagcgcggccagggtctgaacccagatttcccagactagctaccactccgcttgcccacgccccgggagctcgcggcgcctggcggtcagcgaccagacgtccggggccgctgcgctcctggcccgcgaggcgtgacactgtctcggctacagacccagagggagcacactgccaggatgggagctgctgggaggcaggacttcctcttcaaggccatgctgaccatcagctggctcactctgacctgcttccctggggccacatccacagtggctgctgggtgccctgaccagagccctgagttgcaaccctggaaccctggccatgaccaagaccaccatgtgcatatcggccagggcaagacactgctgctcacctcttctgccacggtctattccatccacatctcagagggaggcaagctggtcattaaagaccacgacgagccgattgttttgcgaacccggcacatcctgattgacaacggaggagagctgcatgctgggagtgccctctgccctttccagggcaatttcaccatcattttgtatggaagggctgatgaaggtattcagccggatccttactatggtctgaagtacattggggttggtaaaggaggcgctcttgagttgcatggacagaaaaagctctcctggacatttctgaacaagacccttcacccaggtggcatggcagaaggaggctatttttttgaaaggagctggggccaccgtggagttattgttcatgtcatcgaccccaaatcaggcacagtcatccattctgaccggtttgacacctatagatccaagaaagagagtgaacgtctggtccagtatttgaacgcggtgcccgatggcaggatcctttctgttgcagtgaatgatgaaggttctcgaaatctggatgacatggccaggaaggcgatgaccaaattgggaagcaaacacttcctgcaccttggatttagacacccttggagttttctaactgtgaaaggaaatccatcatcttcagtggaagaccatattgaatatcatggacatcgaggctctgctgctgcccgggtattcaaattgttccagacagagcatggcgaatatttcaatgtttctttgtccagtgagtgggttcaagacgtggagtggacggagtggttcgatcatgataaagtatctcagactaaaggtggggagaaaatttcagacctctggaaagctcacccaggaaaaatatgcaatcgtcccattgatatacaggccactacaatggatggagttaacctcagcaccgaggttgtctacaaaaaaggccaggattataggtttgcttgctacgaccggggcagagcctgccggagctaccgtgtacggttcctctgtgggaagcctgtgaggcccaaactcacagtcaccattgacaccaatgtgaacagcaccattctgaacttggaggataatgtacagtcatggaaacctggagataccctggtcattgccagtactgattactccatgtaccaggcagaagagttccaggtgcttccctgcagatcctgcgcccccaaccaggtcaaagtggcagggaaaccaatgtacctgcacatcggggaggagatagacggcgtggacatgcgggcggaggttgggcttctgagccggaacatcatagtgatgggggagatggaggacaaatgctacccctacagaaaccacatctgcaatttctttgacttcgatacctttgggggccacatcaagtttgctctgggatttaaggcagcacacttggagggcacggagctgaagcatatgggacagcagctggtgggtcagtacccgattcacttccacctggccggtgatgtagacgaaaggggaggttatgacccacccacatacatcagggacctctccatccatcatacattctctcgctgcgtcacagtccatggctccaatggcttgttgatcaaggacgttgtgggctataactctttgggccactgcttcttcacggaagatgggccggaggaacgcaacacttttgaccactgtcttggcctccttgtcaagtctggaaccctcctcccctcggaccgtgacagcaagatgtgcaagatgatcacagaggactcctacccagggtacatccccaagcccaggcaagactgcaatgctgtgtccaccttctggatggccaatcccaacaacaacctcatcaactgtgccgctgcaggatctgaggaaactggattttggtttatttttcaccacgtaccaacgggcccctccgtgggaatgtactccccaggttattcagagcacattccactgggaaaattctataacaaccgagcacattccaactaccgggctggcatgatcatagacaacggagtcaaaaccaccgaggcctctgccaaggacaagcggccgttcctctcaatcatctctgccagatacagccctcaccaggacgccgacccgctgaagccccgggagccggccatcatcagacacttcattgcctacaagaaccaggaccacggggcctggctgcgcggcggggatgtgtggctggacagctgccggtttgctgacaatggcattggcctgaccctggccagtggtggaaccttcccgtatgacgacggctccaagcaagagataaagaacagcttgtttgttggcgagagtggcaacgtggggacggaaatgatggacaataggatctggggccctggcggcttggaccatagcggaaggaccctccctataggccagaattttccaattagaggaattcagttatatgatggccccatcaacatccaaaactgcactttccgaaagtttgtggccctggagggccggcacaccagcgccctggccttccgcctgaataatgcctggcagagctgcccccataacaacgtgaccggcattgcctttgaggacgttccgattacttccagagtgttcttcggagagcctgggccctggttcaaccagctggacatggatggggataagacatctgtgttccatgacgtcgacggctccgtgtccgagtaccctggctcctacctcacgaagaatgacaactggctggtccggcacccagactgcatcaatgttcccgactggagaggggccatttgcagtgggtgctatgcacagatgtacattcaagcctacaagaccagtaacctgcgaatgaagatcatcaagaatgacttccccagccaccctctttacctggagggggcgctcaccaggagcacccattaccagcaataccaaccggttgtcaccctgcagaagggctacaccatccactgggaccagacggcccccgccgaactcgccatctggctcatcaacttcaacaagggcgactggatccgagtggggctctgctacccgcgaggcaccacattctccatcctctcggatgttcacaatcgcctgctgaagcaaacgtccaagacgggcgtcttcgtgaggaccttgcagatggacaaagtggagcagagctaccctggcaggagccactactactgggacgaggactcagggtgagcaggcgcccacttggctgcaggaaagtggctcaacctcatcttgtccccttggcctttccaataagtctaagaacagccatgtagttaatgccaattaatgtaagacacctttctaggcattttgactctaaggctgactgtcccatacattaacgacatttttaaagctattaagctttaaaagtaaaataaacaccctattaaatata

SEQ ID NO: 935 - DNA, 2152 bp, Homo sapiens
gggggagctagcgctcaagcagagcccagcgcggtgctatcggacagagcctggcgagcgcaagcggcgcggggagccagcggggctgagcgcggccagggtctgaacccagatttcccagactagctaccactccgcttgcccacgccccgggagctcgcggcgcctggcggtcagcgaccagacgtccggggccgctgcgctcctggcccgcgaggcgtgacactgtctcggctacagacccagaggtaagagggcctggctgggggcgtcagggatgagctgacggcccatgccacggaagagaggtaagaagtgggggcccgcgcctccacccggcacagggtaaacgttacccgcctcagtttctgtttgtctgtccaccctgtgctgtgcagtctacctctatctgtctgtttgtccatgcgtctgttgatgggcacacgctcttggcactgtcctctgtgggatttctctgagatcttgtgatgctttacaagctgcaggtgccggggggcgctggagtccccagagggcatccagagggggcagactcctgctttccgtagattttcccccttctgaatggcaccgggggcttgcgcccgggagagtgtctcgccgaggagggagtaccacaagggtcaggtctcggtgtcctgccgactgggagccagctcacgccgagctctagcgggcgtgcgcctagcaacaggtctgcgccctgctgctcctgcctcagcacgctcttcctcccagtttccctcgcctcccagtgcctccgggacagcgctaggcacccagcgacgcgctggcgcggggccgagctgaggcaattgcaatgttagatgaacccggggggctctgctgatgtttagactgagactccaaacgtggcatcgctggaagaaggtctggtggtccctggcaaaggacgtcggctccaagaaaggtcgcgttaggttgtgaggaaaggcagagagtcctggcagaacgctggccaggtctccagctcgccgctctgggaacgaaggccagtgacattctggaatggaccccaagggatgcgtgtgctcatgagagaggagcgctgtgcgccctgggtcctcagccgcagacactctctgcgacagccgctgttccccaagggtcggacgctacggcagtcccaggagttccgccagctgccgggtttgaggtcctgagtccttctccaagcagccaacgctacccacagggactccatcttcactttatttttgcatccgagaacttgttgatggaattgatgaaaatgctggagttgatcacaatgaaaaaaaaattcttatttaaagacaaatggaagaacttttatgtgataaaaatcggtcaactgttttcccctacctacactacttggaggaaagataaaactcagaaggaatcttagcttcttccgtctaaaaggattggagctgaagaatacatgctacagatgctcagaatctttctatgagactgctggtgacatgaacagagcaggaggacatggggccttggatgaccttgaattcctggctgtcttctgtggactcccatgcagattccagtttccagcatacccatggctttctgatggagaaggtcagtgaagccgcatcacttatgcagctccaggtgggggtcactcggctcaaggtggtggagttggaactcagacctatgtcaccgtgagtccaaaagctcttcataataactaatgttgctcaaatcttgacttttgaaaaaacatgttgaggggaatattagaattcacagtagatcagactcatagaacagtattcatagagttgaattcgttgagagtaattgtaacccgaatgcactcatcattgacccgcccattctttctagatacttgggtttcagagatgactccgttgcatttccctgcaatggaaaagctcacagtttagttgaggagacagacatacattcaactacctacaatccatgctgtaacagaggcataaacaaagcaatatggaagcactacaaagtgatggtaaactactttgctggggaaagagacaaggtaacatggaggaagtgatatttgattgggccttaaagaaaagtacaatttctcccaggccagagaatggagggt

SEQ ID NO: 936 - DNA, 1829 bp, Homo sapiens
gggggagctagcgctcaagcagagcccagcgcggtgctatcggacagagcctggcgagcgcaagcggcgcggggagccagcggggctgagcgcggccagggtctgaacccagatttcccagactagctaccactccgcttgcccacgccccgggagctcgcggcgcctggcggtcagcgaccagacgtccggggccgctgcgctcctggcccgcgaggcgtgacactgtctcggctacagacccagagggagcacactgccaggatgggagctgctgggaggcaggacttcctcttcaaggccatgctgaccatcagctggctcactctgacctgcttccctggggccacatccacagtggctgctgggtgccctgaccagagccctgagttgcaaccctggaaccctggccatgaccaagaccaccatgtgcatatcggccagggcaagacactgctgctcacctcttctgccacggtctattccatccacatctcagagggaggcaagctggtcattaaagaccacgacgagccgattgttttgcgaacccggcacatcctgattgacaacggaggagagctgcatgctgggagtgccctctgccctttccagggcaatttcaccatcattttgtatggaagggctgatgaaggtattcagccggatccttactatggtctgaagtacattggggttggtaaaggaggcgctcttgagttgcatggacagaaaaagctctcctggacatttctgaacaagacccttcacccaggtggcatggcagaaggaggctatttttttgaaaggagctggggccaccgtggagttattgttcatgtcatcgaccccaaatcaggcacagtcatccattctgaccggtttgacacctatagatccaagaaagagagtgaacgtctggtccagtatttgaacgcggtgcccgatggcaggatcctttctgttgcagtgaatgatgaaggttctcgaaatctggatgacatggccaggaaggcgatgaccaaattgggaagcaaacacttcctgcaccttggatttagacacccttggagttttctaactgtgaaaggaaatccatcatcttcagtggaagaccatattgaatatcatggacatcgaggctctgctgctgcccgggtattcaaattgttccagacagagcatggcgaatatttcaatgtttctttgtccagtgagtgggttcaaggtgaggagtttcagacaatttggtgacacctaacagtgggatagaagaccagaaatcactgtctttgcagaactaggatttatctcttataccagtaggaccactttaatttttgcagaatcaactaaaaatgtgcaaccaaaagttgtctttaattagacaagccactttagcccatagcccagaaggatgttctcctctggctaagatttcaatttcacctcagtcagggtctgcggcattcagcttagttcacggaatatctttgatgtggcaggcaatggcactgaacaggaaatgcagataggaatagaacctgccctccaaatagcccacatgcagggattgcagaaagcagcaatcctagttgcagtccttggataacgggtttacagatggattttctttcttttctctttaatttgcttttgcaataacaaagaatataaattgcttttataaaagtaagaaactcattaagagaaactcattttttaattaaaacatgggagcataggcagattgattagagccatccatgccccagcctggtgcaaccatggacagataatattcagttcccatggtgctgaggatgctt

SEQ ID NO: 937 - DNA, 248 bp, Artificial
  Synthetic oligonucleotide
gggggagctagcgctcaagcagagcccagcgcggtgctatcggacagagcctggcgagcgcaagcggcgcggggagccagcggggctgagcgcggccagggtctgaacccagatttcccagactagctaccactccgcttgcccacgccccgggagctcgcggcgcctggcggtcagcgaccagacgtccggggccgctgcgctcctggcccgcgaggcgtgacactgtctcggctacagacccagag

SEQ ID NO: 938 - DNA, 989 bp, Artificial
  Synthetic oligonucleotide
gtaagagggcctggctgggggcgtcagggatgagctgacggcccatgccacggaagagaggtaagaagtgggggcccgcgcctccacccggcacagggtaaacgttacccgcctcagtttctgtttgtctgtccaccctgtgctgtgcagtctacctctatctgtctgtttgtccatgcgtctgttgatgggcacacgctcttggcactgtcctctgtgggatttctctgagatcttgtgatgctttacaagctgcaggtgccggggggcgctggagtccccagagggcatccagagggggcagactcctgctttccgtagattttcccccttctgaatggcaccgggggcttgcgcccgggagagtgtctcgccgaggagggagtaccacaagggtcaggtctcggtgtcctgccgactgggagccagctcacgccgagctctagcgggcgtgcgcctagcaacaggtctgcgccctgctgctcctgcctcagcacgctcttcctcccagtttccctcgcctcccagtgcctccgggacagcgctaggcacccagcgacgcgctggcgcggggccgagctgaggcaattgcaatgttagatgaacccggggggctctgctgatgtttagactgagactccaaacgtggcatcgctggaagaaggtctggtggtccctggcaaaggacgtcggctccaagaaaggtcgcgttaggttgtgaggaaaggcagagagtcctggcagaacgctggccaggtctccagctcgccgctctgggaacgaaggccagtgacattctggaatggaccccaagggatgcgtgtgctcatgagagaggagcgctgtgcgccctgggtcctcagccgcagacactctctgcgacagccgctgttccccaagggtcggacgctacggcagtcccaggagttccgccagctgccgggtttgaggtcctgagtccttctccaagcagccaacgctacccacag

SEQ ID NO: 939 - DNA, 178 bp, Artificial
  Synthetic oligonucleotide
ggactccatcttcactttatttttgcatccgagaacttgttgatggaattgatgaaaatgctggagttgatcacaatgaaaaaaaaattcttatttaaagacaaatggaagaacttttatgtgataaaaatcggtcaactgttttcccctacctacactacttggaggaaagataaaa

SEQ ID NO: 940 - DNA, 202 bp, Artificial
  Synthetic oligonucleotide
ctcagaaggaatcttagcttcttccgtctaaaaggattggagctgaagaatacatgctacagatgctcagaatctttctatgagactgctggtgacatgaacagagcaggaggacatggggccttggatgaccttgaattcctggctgtcttctgtggactcccatgcagattccagtttccagcatacccatggctttctg

SEQ ID NO: 941 - DNA, 440 bp, Artificial
  Synthetic oligonucleotide
gtgagtccaaaagctcttcataataactaatgttgctcaaatcttgacttttgaaaaaacatgttgaggggaatattagaattcacagtagatcagactcatagaacagtattcatagagttgaattcgttgagagtaattgtaacccgaatgcactcatcattgacccgcccattctttctagatacttgggtttcagagatgactccgttgcatttccctgcaatggaaaagctcacagtttagttgaggagacagacatacattcaactacctacaatccatgctgtaacagaggcataaacaaagcaatatggaagcactacaaagtgatggtaaactactttgctggggaaagagacaaggtaacatggaggaagtgatatttgattgggccttaaagaaaagtacaatttctcccaggccagagaatggagggt

SEQ ID NO: 942 - DNA, 167 bp, Artificial
  Synthetic oligonucleotide
aggctgctaggctctggggatgcagcagtgaccaaaatgagctgagacctgcctgcatggagattacagtctagagcagtgctgtccaggagacatacaatgggtgccacatttggaattctgagttttctagtagccccactaagacaaagtttaaaaagaaacag

SEQ ID NO: 943 - DNA, 939 bp, Artificial
  Synthetic oligonucleotide
gtgacaagccctggactccggtgcggctgggcctggggctacctgaagggagagcagagactcaggtgcccggtgagcaatggcagtgaggagaagcagagagcaacgccagcaagcaacgcctcctgcccctgcttttgctcttgtgtctcttgaccctgtgaggtccagcaaccatggggactgagcagcagttggacttgggggcagccgagcttctggaaaattttagcttgttattgtgaagacttgtggaatatcccaaagtgctggctttcggaaaagggtgcctacattttcttctgcacaggctctgctgaaggagtttgctgcactcttgaaaggacaggcaagctcaggtcctcatggctcgatctctgagcaggcctctaacccagtgaggacagcggtcaaccagtctccagctaacagcttcctgcagagacttccagcattgttagctaacatgcactcttctgaggccttcaacagctggaaactgtttcaggactatcttgccagctaagaagcggaatcccagttcttgttgccaggaagcttttaatggccaatggagaatgctgtcctcccttggtgaaagaattcccaaggaaatttgggaatcttttaggattcacttcaatggaatgtttcttgggacatgtgtcttcaggcactggaagccactcacggacaagaaggcacggatgaccccttgctcagcaatgtgggattagcctctttgggcagggcaatctctctgcccccagtggcttagacagctggctctgagacatagcagaaggtctcacaaatgttaggaaaagggggttgagcattattcctccatgtggaattatttttgtatttatccagaaagtgactcttttttggtctttgaaatcatctgtgatataattagaagatgtcagagcttca

SEQ ID NO: 944 - DNA, 147 bp, Artificial
  Synthetic oligonucleotide
tggctgctgggtgccctgaccagagccctgagttgcaaccctggaaccctggccatgaccaagaccaccatgtgcatatcggccagggcaagacactgctgctcacctcttctgccacggtctattccatccacatctcagagggag

SEQ ID NO: 945 - DNA, 139 bp, Artificial
  Synthetic oligonucleotide
gcaagctggtcattaaagaccacgacgagccgattgttttgcgaacccggcacatcctgattgacaacggaggagagctgcatgctgggagtgccctctgccctttccagggcaatttcaccatcattttgtatggaag

SEQ ID NO: 946 - DNA, 237 bp, Artificial
  Synthetic oligonucleotide
ggctgatgaaggtattcagccggatccttactatggtctgaagtacattggggttggtaaaggaggcgctcttgagttgcatggacagaaaaagctctcctggacatttctgaacaagacccttcacccaggtggcatggcagaaggaggctatttttttgaaaggagctggggccaccgtggagttattgttcatgtcatcgaccccaaatcaggcacagtcatccattctgaccg

SEQ ID NO: 947 - DNA, 180 bp, Artificial
  Synthetic oligonucleotide
gtttgacacctatagatccaagaaagagagtgaacgtctggtccagtatttgaacgcggtgcccgatggcaggatcctttctgttgcagtgaatgatgaaggttctcgaaatctggatgacatggccaggaaggcgatgaccaaattgggaagcaaacacttcctgcaccttggatttag

SEQ ID NO: 948 - DNA, 601 bp, Artificial
  Synthetic oligonucleotide
gtgaggagtttcagacaatttggtgacacctaacagtgggatagaagaccagaaatcactgtctttgcagaactaggatttatctcttataccagtaggaccactttaatttttgcagaatcaactaaaaatgtgcaaccaaaagttgtctttaattagacaagccactttagcccatagcccagaaggatgttctcctctggctaagatttcaatttcacctcagtcagggtctgcggcattcagcttagttcacggaatatctttgatgtggcaggcaatggcactgaacaggaaatgcagataggaatagaacctgccctccaaatagcccacatgcagggattgcagaaagcagcaatcctagttgcagtccttggataacgggtttacagatggattttctttcttttctctttaatttgcttttgcaataacaaagaatataaattgcttttataaaagtaagaaactcattaagagaaactcattttttaattaaaacatgggagcataggcagattgattagagccatccatgccccagcctggtgcaaccatggacagataatattcagttcccatggtgctgaggatgctt

SEQ ID NO: 949 - DNA, 122 bp, Artificial
  Synthetic oligonucleotide
acgtggagtggacggagtggttcgatcatgataaagtatctcagactaaaggtggggagaaaatttcagacctctggaaagctcacccaggaaaaatatgcaatcgtcccattgatatacag

SEQ ID NO: 950 - DNA, 522 bp, Artificial
  Synthetic oligonucleotide
ttagaatcacctggacaacttttcaaagtccagatgtccatgctgcaccccagacacaatcaaatctgaggctccgaggatggggactgggcatgagtattttttaaagactcctccccatgggatgcagaaccatgtttggactgttggccgctgttcatggtgctggtagtggtggtgcaaattgtaaaaagtggccagcccagatcctagaagagtggctacttattgtaaatgctccgtaaaatgttcacccagccataagcagtagatcactggtttcgatactgagtactgtaggacctcaggccaggcatttatctattccaagactttaggctgtctttctcataacaaaactgatgggggcaatcattgggataatcatctcgggccgttgtaaatagtgttgcagcagggacaattttagacttctgagtatatgtttagaacattaatcagcaccttccttctctataaaaaaaaaacgactttgctctgtaatttctgtgtcattcccag

SEQ ID NO: 951 - DNA, 133 bp, Artificial
  Synthetic oligonucleotide
gccactacaatggatggagttaacctcagcaccgaggttgtctacaaaaaaggccaggattataggtttgcttgctacgaccggggcagagcctgccggagctaccgtgtacggttcctctgtgggaagcctg

SEQ ID NO: 952 - DNA, 192 bp, Artificial
  Synthetic oligonucleotide
tgaggcccaaactcacagtcaccattgacaccaatgtgaacagcaccattctgaacttggaggataatgtacagtcatggaaacctggagataccctggtcattgccagtactgattactccatgtaccaggcagaagagttccaggtgcttccctgcagatcctgcgcccccaaccaggtcaaagtggcag

SEQ ID NO: 953 - DNA, 1360 bp, Artificial
  Synthetic oligonucleotide
ctcaaatggaagagaaagtatccataagccaggtcagcaacctcagtgaagagcccaacgaatttagagcccgcctaagatctctttattccataaaagagtgtgggattgttgtggaggcagaatttgcggctataaatcaaaggcagttctaaagtttgaactcttgtcaccctgcaccgttcttgagatgcattttctgcacagagtggggaggaagggactgcatttggcaagagattgagtggagtgatgggagggagagaatggagagaaaacagaggggttaggtgcagaccacaggttcaggggctctgattacagcaggagaaagactggcaattactaggaggggtagcagaactggaaaaggtcttttgtttgttagttttttaaggatgggaaggtctagagaagtttgaagacggaatataaggagcccaaatgaaggaagaaatgaaattactagtggagggagtccagggccttaaggatatggaaaggggtaagactgggggtcagtgcacaagtcgggagagcatcctctccaccgacaccagaggaagggtgggggatggtgaggagctcagtacagagttgggtggaggccgttcttcactgctccacgtggtaccatggaggcatccagagccaggccacagtggtggatgcagaagctccaatctggctctttctggagccccaggctgtagatacacactctacatgaggctgaggtaagcagaatagggatttgcctgctttaacagattatgaatttgcactgctgtaaagcaggggctttaaagacagaggggttctgttttatcttcctaagatcggcaatctacggtatcatccagagaccaggtttcttctctcccgttgctctgccatctctggggcatggtgctcacctgcatgggcgaggctggcctgccagcccccagaaaagagcaagaggagggcagtctggaggtggcacttatcacttctcaaaccttacagccacacctaactacagggaggctgagaaatgtcattcccttgggtggccctgtgtccagctaaaatgcaggagtctaggactgaaaaacagaagaggagacaaatattaggggacaattagccatttctgccaaaggcttcagacctaagcctgtgtaactgtgagatctgggtctgcatgcaggcgtgtgacttcacctccctgaccttcatccttctgtaacatgagaccactgtgcacaccaggcatggcgatgagtaagcagcagccatggaggcacctggcaggggcccagaactcagtgggcatgcagtacctgctgttgtttaccgtcctccctttctgccctag

SEQ ID NO: 954 - DNA, 176 bp, Artificial
  Synthetic oligonucleotide
ggaaaccaatgtacctgcacatcggggaggagatagacggcgtggacatgcgggcggaggttgggcttctgagccggaacatcatagtgatgggggagatggaggacaaatgctacccctacagaaaccacatctgcaatttctttgacttcgatacctttgggggccacatcaag

SEQ ID NO: 955 - DNA, 210 bp, Artificial
  Synthetic oligonucleotide
tttgctctgggatttaaggcagcacacttggagggcacggagctgaagcatatgggacagcagctggtgggtcagtacccgattcacttccacctggccggtgatgtagacgaaaggggaggttatgacccacccacatacatcagggacctctccatccatcatacattctctcgctgcgtcacagtccatggctccaatggcttgttg

SEQ ID NO: 956 - DNA, 206 bp, Artificial
  Synthetic oligonucleotide
atcaaggacgttgtgggctataactctttgggccactgcttcttcacggaagatgggccggaggaacgcaacacttttgaccactgtcttggcctccttgtcaagtctggaaccctcctcccctcggaccgtgacagcaagatgtgcaagatgatcacagaggactcctacccagggtacatccccaagcccaggcaagactgcaa

SEQ ID NO: 957 - DNA, 129 bp, Artificial
  Synthetic oligonucleotide
gaaactggattttggtttatttttcaccacgtaccaacgggcccctccgtgggaatgtactccccaggttattcagagcacattccactgggaaaattctataacaaccgagcacattccaactaccgg

SEQ ID NO: 958 - DNA, 132 bp, Artificial
  Synthetic oligonucleotide
atacagccctcaccaggacgccgacccgctgaagccccgggagccggccatcatcagacacttcattgcctacaagaaccaggaccacggggcctggctgcgcggcggggatgtgtggctggacagctgccg

SEQ ID NO: 959 - DNA, 156 bp, Artificial
  Synthetic oligonucleotide
tggtggaaccttcccgtatgacgacggctccaagcaagagataaagaacagcttgtttgttggcgagagtggcaacgtggggacggaaatgatggacaataggatctggggccctggcggcttggaccatagcggaaggaccctccctataggcca

SEQ ID NO: 960 - DNA, 181 bp, Artificial
  Synthetic oligonucleotide
gaattttccaattagaggaattcagttatatgatggccccatcaacatccaaaactgcactttccgaaagtttgtggccctggagggccggcacaccagcgccctggccttccgcctgaataatgcctggcagagctgcccccataacaacgtgaccggcattgcctttgaggacgttccg

SEQ ID NO: 961 - DNA, 140 bp, Artificial
  Synthetic oligonucleotide
attacttccagagtgttcttcggagagcctgggccctggttcaaccagctggacatggatggggataagacatctgtgttccatgacgtcgacggctccgtgtccgagtaccctggctcctacctcacgaagaatgacaa

SEQ ID NO: 962 - DNA, 212 bp, Artificial
  Synthetic oligonucleotide
atgtacattcaagcctacaagaccagtaacctgcgaatgaagatcatcaagaatgacttccccagccaccctctttacctggagggggcgctcaccaggagcacccattaccagcaataccaaccggttgtcaccctgcagaagggctacaccatccactgggaccagacggcccccgccgaactcgccatctggctcatcaacttcaacaa

SEQ ID NO: 963 - DNA, 186 bp, Artificial
  Synthetic oligonucleotide
gggcgactggatccgagtggggctctgctacccgcgaggcaccacattctccatcctctcggatgttcacaatcgcctgctgaagcaaacgtccaagacgggcgtcttcgtgaggaccttgcagatggacaaagtggagcagagctaccctggcaggagccactactactgggacgaggactcagg

SEQ ID NO: 964 - DNA, 215 bp, Artificial
  Synthetic oligonucleotide
gtgagcaggcgcccacttggctgcaggaaagtggctcaacctcatcttgtccccttggcctttccaataagtctaagaacagccatgtagttaatgccaattaatgtaagacacctttctaggcattttgactctaaggctgactgtcccatacattaacgacatttttaaagctattaagctttaaaagtaaaataaacaccctattaaatata

SEQ ID NO: 965 - DNA, 205 bp, Artificial
  Synthetic oligonucleotide
gctgttgttcctgaagctgaaagctcagaacgagagagagaagtttgctttctgctccatgaaaggctgtgagaggataaagattaaagctctgattccaaagaacgcaggcgtcagtgactgcacagccacagcttaccccaagttcaccgagagggctgtcgtagacgtgccgatgcccaagaagctctttggttctcagctg

SEQ ID NO: 966 - DNA, 158 bp, Artificial
  Synthetic oligonucleotide
gtggatgggaagaagtaccccagttcggaggatggcatccaggtggtggtgattgacgggaaccaagggcgcgtggtgagccacacgagcttcaggaactccattctgcaaggcataccatggcagcttttcaactatgtggcgaccatccctgacaa

SEQ ID NO: 967 - DNA, 983 bp, Artificial
  Synthetic oligonucleotide
atggcattcgttggcttcaaaggcagcttccggcccatctgggtgacactggacactgaggatcacaaagccaaaatcttccaagttgtgcccatccctgtggtgaagaagaagaagttgtgaggacagctgccgcccggtgccacctcgtggtagactatgacggtgactcttggcagcagaccagtgggggatggctgggtcccccagcccctgccagcagctgcctgggaaggccgtgtttcagccctgatgggccaagggaaggctatcagagaccctggtgctgccacctgcccctactcaagtgtctacctggagcccctggggcggtgctggccaatgctggaaacattcactttcctgcagcctcttgggtgcttctctcctatctgtgcctcttcagtgggggtttggggaccatatcaggagacctgggttgtgctgacagcaaagatccactttggcaggagccctgacccagctaggaggtagtctggagggctggtcattcacagatccccatggtcttcagcagacaagtgagggtggtaaatgtaggagaaagagccttggccttaaggaaatctttactcctgtaagcaagagccaacctcacaggattaggagctggggtagaactggctatccttggggaagaggcaagccctgcctctggccgtgtccacctttcaggagactttgagtggcaggtttggacttggactagatgactctcaaaggcccttttagttctgagattccagaaatctgctgcatttcacatggtacctggaacccaacagttcatggatatccactgatatccatgatgctgggtgccccagcgcacacgggatggagaggtgagaactaatgcctagcttgaggggtctgcagtccagtagggcaggcagtcaggtccatgtgcactgcaatgccaggtggagaaatcacagagaggtaaaatggaggccagtgcc

SEQ ID NO: 968 - DNA, 421 bp, Artificial
  Synthetic oligonucleotide
atttcagaggggaggctcaggaaggcttcttgcttacaggaatgaaggctgggggcattttgctggggggagatgaggcagcctctggaatggctcagggattcagccctccctgccgctgcctgctgaagctggtgactacggggtcgccctttgctcacgtctctctggcccactcatgatggagaagtgtggtcagaggggagcaatgggctttgctgcttatgagcacagaggaattcagtccccaggcagccctgcctctgactccaagagggtgaagtccacagaagtgagctcctgccttagggcctcatttgctcttcatccagggaactgagcacagggggcctccaggagaccctagatgtgctcgtactccctcggcctgggatttcagagctggaaatatagaaaatat

SEQ ID NO: 969 - DNA, 581 bp, Artificial
  Synthetic oligonucleotide
cctagcccttgctgccacaccacattgcctcaacaaccggccccagagtgcccaggcactcctgaggtagcttctggaaatggggacaagtcccctcgaaggaaaggaaatgactagagtagaatgacagctagcagatctcttccctcctgctcccagcgcacacaaacccgccctccccttggtgttggcggtccctgtggccttcactttgttcactacctgtcagcccagcctgggtgcacagtagctgcaactccccattggtgctacctggctctcctgtctctgcagctctacaggtgaggcccagcagagggagtagggctcgccatgtttctggtgagccaatttggctgatcttgggtgtctgaacagctattgggtccaccccagtccctttcagctgctgcttaatgccctgctctctccctggcccaccttatagagagcccaaagagctcctgtaagagggagaactctatctgtggtttataatcttgcacgaggcaccagagtctccctgggtcttgtgatgaactacatttatcccctttcctgccccaaccacaaactctttc

SEQ ID NO: 970 - DNA, 789 bp, Artificial
  Synthetic oligonucleotide
ccaccaaacatctttcagctgctgggaggtgaccatagggctctgcttttaaagatatggctgcttcaaaggccagagtcacaggaaggacttcttccagggagattagtggtgatggagaggagagttaaaatgacctcatgtccttcttgtccacggttttgttgagttttcactcttctaatgcaagggtctcacactgtgaaccacttaggatgtgatcactttcaggtggccaggaatgttgaatgtctttggctcagttcatttaaaaaagatatctatttgaaagttctcagagttgtacatatgtttcacagtacaggatctgtacataaaagtttctttcctaaaccattcaccaagagccaatatctaggcattttcttggtagcacaaattttcttattgcttagaaaattgtcctccttgttatttctgtttgtaagacttaagtgagttaggtctttaaggaaagcaacgctcctctgaaatgcttgtcttttttctgttgccgaaatagctggtcctttttcgggagttagatgtatagagtgtttgtatgtaaacatttcttgtaggcatcaccatgaacaaagatatattttctatttatttattatatgtgcacttcaagaagtcactgtcagagaaataaagaattgtcttaaatgtcatgattggagatgtcctttgcattgcttggaaggggtgtacctagagccaaggaaattggctctggtttggaaaaattttgctgttattatagtaaacatacaaaggatgtca

SEQ ID NO: 971 - DNA, 95 bp, Artificial
  Synthetic oligonucleotide
atggagaaggtcagtgaagccgcatcacttatgcagctccaggtgggggtcactcggctcaaggtggtggagttggaactcagacctatgtcacc

SEQ ID NO: 972 - DNA, 110 bp, Artificial
  Synthetic oligonucleotide
ggagcacactgccaggatgggagctgctgggaggcaggacttcctcttcaaggccatgctgaccatcagctggctcactctgacctgcttccctggggccacatccacag

SEQ ID NO: 973 - DNA, 71 bp, Artificial
  Synthetic oligonucleotide
acacccttggagttttctaactgtgaaaggaaatccatcatcttcagtggaagaccatattgaatatcatg

SEQ ID NO: 974 - DNA, 96 bp, Artificial
  Synthetic oligonucleotide
gacatcgaggctctgctgctgcccgggtattcaaattgttccagacagagcatggcgaatatttcaatgtttctttgtccagtgagtgggttcaag

SEQ ID NO: 975 - DNA, 70 bp, Artificial
  Synthetic oligonucleotide
tgctgtgtccaccttctggatggccaatcccaacaacaacctcatcaactgtgccgctgcaggatctgag

SEQ ID NO: 976 - DNA, 86 bp, Artificial
  Synthetic oligonucleotide
gctggcatgatcatagacaacggagtcaaaaccaccgaggcctctgccaaggacaagcggccgttcctctcaatcatctctgccag

SEQ ID NO: 977 - DNA, 36 bp, Artificial
  Synthetic oligonucleotide
gtttgctgacaatggcattggcctgaccctggccag

SEQ ID NO: 978 - DNA, 76 bp, Artificial
  Synthetic oligonucleotide
ctggctggtccggcacccagactgcatcaatgttcccgactggagaggggccatttgcagtgggtgctatgcacag

SEQ ID NO: 979 - DNA, 87 bp, Artificial
  Synthetic oligonucleotide
aaaacaaaggaccatttcttggaggtgaagatggagagttccaagcagcacttcttccacctctggaacgacttcgcttacattgaa

SEQ ID NO: 980 - DNA, 101 bp, Artificial
  Synthetic oligonucleotide
ttccatagtgcttatggcatcaaagggaagatacgtctccagaggcccatggaccagagtgctggaaaagcttggggcagacaggggtctcaagttgaaag

SEQ ID NO: 981 - DNA, 5 bp, Artificial
  Synthetic oligonucleotide
agcaa

SEQ ID NO: 982 - DNA, 93 bp, Artificial
  Synthetic oligonucleotide
ctagcccaaagccttcattttaacagatggggaaagtgagcccccaagatgggaaagaaccacacagctaagggagggcctggggagccccac

SEQ ID NO: 983 - DNA, 9 bp, Artificial
  Synthetic oligonucleotide
cttcaaaga

SEQ ID NO: 984 - DNA, 69 bp, Artificial
  Synthetic oligonucleotide
gggcctgcctggctccctccacccaactgcacccatgagactcggtccaagagtccattccccaggtgg

SEQ ID NO: 985 - DNA, 25 bp, Artificial
  Synthetic oligonucleotide
gagccaactgtcagggaggtctttc

SEQ ID NO: 986 - protein, 1361 aa, Homo sapiens
MGAAGRQDFLFKAMLTISWLTLTCFPGATSTVAAGCPDQSPELQPWNPGHDQDHHVHIGQGKTLLLTSSATVYSIHISEGGKLVIKDHDEPIVLRTRHILIDNGGELHAGSALCPFQGNFTIILYGRADEGIQPDPYYGLKYIGVGKGGALELHGQKKLSWTFLNKTLHPGGMAEGGYFFERSWGHRGVIVHVIDPKSGTVIHSDRFDTYRSKKESERLVQYLNAVPDGRILSVAVNDEGSRNLDDMARKAMTKLGSKHFLHLGFRHPWSFLTVKGNPSSSVEDHIEYHGHRGSAAARVFKLFQTEHGEYFNVSLSSEWVQDVEWTEWFDHDKVSQTKGGEKISDLWKAHPGKICNRPIDIQATTMDGVNLSTEVVYKKGQDYRFACYDRGRACRSYRVRFLCGKPVRPKLTVTIDTNVNSTILNLEDNVQSWKPGDTLVIASTDYSMYQAEEFQVLPCRSCAPNQVKVAGKPMYLHIGEEIDGVDMRAEVGLLSRNIIVMGEMEDKCYPYRNHICNFFDFDTFGGHIKFALGFKAAHLEGTELKHMGQQLVGQYPIHFHLAGDVDERGGYDPPTYIRDLSIHHTFSRCVTVHGSNGLLIKDVVGYNSLGHCFFTEDGPEERNTFDHCLGLLVKSGTLLPSDRDSKMCKMITEDSYPGYIPKPRQDCNAVSTFWMANPNNNLINCAAAGSEETGFWFIFHHVPTGPSVGMYSPGYSEHIPLGKFYNNRAHSNYRAGMIIDNGVKTTEASAKDKRPFLSIISARYSPHQDADPLKPREPAIIRHFIAYKNQDHGAWLRGGDVWLDSCRFADNGIGLTLASGGTFPYDDGSKQEIKNSLFVGESGNVGTEMMDNRIWGPGGLDHSGRTLPIGQNFPIRGIQLYDGPINIQNCTFRKFVALEGRHTSALAFRLNNAWQSCPHNNVTGIAFEDVPITSRVFFGEPGPWFNQLDMDGDKTSVFHDVDGSVSEYPGSYLTKNDNWLVRHPDCINVPDWRGAICSGCYAQMYIQAYKTSNLRMKIIKNDFPSHPLYLEGALTRSTHYQQYQPVVTLQKGYTIHWDQTAPAELAIWLINFNKGDWIRVGLCYPRGTTFSILSDVHNRLLKQTSKTGVFVRTLQMDKVEQSYPGRSHYYWDEDSGLLFLKLKAQNEREKFAFCSMKGCERIKIKALIPKNAGVSDCTATAYPKFTERAVVDVPMPKKLFGSQLKTKDHFLEVKMESSKQHFFHLWNDFAYIEVDGKKYPSSEDGIQVVVIDGNQGRVVSHTSFRNSILQGIPWQLFNYVATIPDNSIVLMASKGRYVSRGPWTRVLEKLGADRGLKLKEQMAFVGFKGSFRPIWVTLDTEDHKAKIFQVVPIPVVKKKKL

SEQ ID NO: 987 - protein, 992 aa, Homo sapiens
MGAAGRQDFLFKAMLTISWLTLTCFPGATSTVAAGCPDQSPELQPWNPGHDQDHHVHIGQGKTLLLTSSATVYSIHISEGGKLVIKDHDEPIVLRTRHILIDNGGELHAGSALCPFQGNFTIILYGRADEGIQPDPYYGLKYIGVGKGGALELHGQKKLSWTFLNKTLHPGGMAEGGYFFERSWGHRGVIVHVIDPKSGTVIHSDRFDTYRSKKESERLVQYLNAVPDGRILSVAVNDEGSRNLDDMARKAMTKLGSKHFLHLGFRHPWSFLTVKGNPSSSVEDHIEYHGHRGSAAARVFKLFQTEHGEYFNVSLSSEWVQDVEWTEWFDHDKVSQTKGGEKISDLWKAHPGKICNRPIDIQATTMDGVNLSTEVVYKKGQDYRFACYDRGRACRSYRVRFLCGKPVRPKLTVTIDTNVNSTILNLEDNVQSWKPGDTLVIASTDYSMYQAEEFQVLPCRSCAPNQVKVAGKPMYLHIGEEIDGVDMRAEVGLLSRNIIVMGEMEDKCYPYRNHICNFFDFDTFGGHIKFALGFKAAHLEGTELKHMGQQLVGQYPIHFHLAGDVDERGGYDPPTYIRDLSIHHTFSRCVTVHGSNGLLIKDVVGYNSLGHCFFTEDGPEERNTFDHCLGLLVKSGTLLPSDRDSKMCKMITEDSYPGYIPKPRQDCNAVSTFWMANPNNNLINCAAAGSEETGFWFIFHHVPTGPSVGMYSPGYSEHIPLGKFYNNRAHSNYRAGMIIDNGVKTTEASAKDKRPFLSIISARYSPHQDADPLKPREPAIIRHFIAYKNQDHGAWLRGGDVWLDSCRFADNGIGLTLASGGTFPYDDGSKQEIKNSLFVGESGNVGTEMMDNRIWGPGGLDHSGRTLPIGQNFPIRGIQLYDGPINIQNCTFRKFVALEGRHTSALAFRLNNAWQSCPHNNVTGIAFEDVPITSRVFFGEPGPWFNQLDMDGDKTSVFHDVDGSVSEYPGSYLTKNDKWHSLASKAASGPSG

SEQ ID NO: 988 - protein, 804 aa, Homo sapiens
TRPPTRPVDERGGYDPPTYIRDLSIHHTFSRCVTVHGSNGLLIKDVVGYNSLGHCFFTEDGPEERNTFDHCLGLLVKSGTLLPSDRDSKMCKMITEDSYPGYIPKPRQDCNAVSTFWMANPNNNLINCAAAGSEETGFWFIFHHVPTGPSVGMYSPGYSEHIPLGKFYNNRAHSNYRAGMIIDNGVKTTEASAKDKRPFLSIISARYSPHQDADPLKPREPAIIRHFIAYKNQDHGAWLRGGDVWLDSCRFADNGIGLTLASGGTFPYDDGSKQEIKNSLFVGESGNVGTEMMDNRIWGPGGLDHSGRTLPIGQNFPIRGIQLYDGPINIQNCTFRKFVALEGRHTSALAFRLNNAWQSCPHNNVTGIAFEDVPITSRVFFGEPGPWFNQLDMDGDKTSVFHDVDGSVSEYPGSYLTKNDNWLVRHPDCINVPDWRGAICSGCYAQMYIQAYKTSNLRMKIIKNDFPSHPLYLEGALTRSTHYQQYQPVVTLQKGYTIHWDQTAPAELAIWLINFNKGDWIRVGLCYPRGTTFSILSDVHNRLLKQTSKTGVFVRTLQMDKVEQSYPGRSHYYWDEDSGLLFLKLKAQNEREKFAFCSMKGCERIKIKALIPKNAGVSDCTATAYPKFTERAVVDVPMPKKLFGSQLKTKDHFLEVKMESSKQHFFHLWNDFAYIEVDGKKYPSSEDGIQVVVIDGNQGRVVSHTSFRNSILQGIPWQLFNYVATIPDNSIVLMASKGRYVSRGPWTRVLEKLGADRGLKLKEQMAFVGFKGSFRPIWVTLDTEDHKAKIFQVVPIPVVKKKKL

SEQ ID NO: 989 - protein, 1013 aa, Homo sapiens
AHPGKICNRPIDIQATTMDGVNLSTEVVYKKGQDYRFACYDRGRACRSYRVRFLCGKPVRPKLTVTIDTNVNSTILNLEDNVQSWKPGDTLVIASTDYSMYQAEEFQVLPCRSCAPNQVKVAGKPMYLHIGEEIDGVDMRAEVGLLSRNIIVMGEMEDKCYPYRNHICNFFDFDTFGGHIKFALGFKAAHLEGTELKHMGQQLVGQYPIHFHLAGDVDERGGYDPPTYIRDLSIHHTFSRCVTVHGSNGLLIKDVVGYNSLGHCFFTEDGPEERNTFDHCLGLLVKSGTLLPSDRDSKMCKMITEDSYPGYIPKPRQDCNAVSTFWMANPNNNLINCAAAGSEETGFWFIFHHVPTGPSVGMYSPGYSEHIPLGKFYNNRAHSNYRAGMIIDNGVKTTEASAKDKRPFLSIISARYSPHQDADPLKPREPAIIRHFIAYKNQDHGAWLRGGDVWLDSCRFADNGIGLTLASGGTFPYDDGSKQEIKNSLFVGESGNVGTEMMDNRIWGPGGLDHSGRTLPIGQNFPIRGIQLYDGPINIQNCTFRKFVALEGRHTSALAFRLNNAWQSCPHNNVTGIAFEDVPITSRVFFGEPGPWFNQLDMDGDKTSVFHDVDGSVSEYPGSYLTKNDNWLVRHPDCINVPDWRGAICSGCYAQMYIQAYKTSNLRMKIIKNDFPSHPLYLEGALTRSTHYQQYQPVVTLQKGYTIHWDQTAPAELAIWLINFNKGDWIRVGLCYPRGTTFSILSDVHNRLLKQTSKTGVFVRTLQMDKVEQSYPGRSHYYWDEDSGLLFLKLKAQNEREKFAFCSMKGCERIKIKALIPKNAGVSDCTATAYPKFTERAVVDVPMPKKLFGSQLKTKDHFLEVKMESSKQHFFHLWNDFAYIEVDGKKYPSSEDGIQVVVIDGNQGRVVSHTSFRNSILQGIPWQLFNYVATIPDNSIVLMASKGRYVSRGPWTRVLEKLGADRGLKLKEQMAFVGFKGSFRPIWVTLDTEDHKAKIFQVVPIPVVKKKKL

SEQ ID NO: 990 - protein, 500 aa, Homo sapiens
TSGRTLPIGQNFPIRGIQLYDGPINIQNCTFRKFVALEGRHTSALAFRLNNAWQSCPHNNVTGIAFEDVPITSRVFFGEPGPWFNQLDMDGDKTSVFHDVDGSVSEYPGSYLTKNDNWLVRHPDCINVPDWRGAICSGCYAQMYIQAYKTSNLRMKIIKNDFPSHPLYLEGALTRSTHYQQYQPVVTLQKGYTIHWDQTAPAELAIWLINFNKGDWIRVGLCYPRGTTFSILSDVHNRLLKQTSKTGVFVRTLQMDKVEQSYPGRSHYYWDEDSGLLFLKLKAQNEREKFAFCSMKGCERIKIKALIPKNAGVSDCTATAYPKFTERAVVDVPMPKKLFGSQLKTKDHFLEVKMESSKQHFFHLWNDFAYIEVDGKKYPSSEDGIQVVVIDGNQGRVVSHTSFRNSILQGIPWQLFNYVATIPDNSIVLMASKGRYVSRGPWTRVLEKLGADRGLKLKEQMAFVGFKGSFRPIWVTLDTEDHKAKIFQVVPIPVVKKKKL

SEQ ID NO: 991 - protein, 888 aa, Homo sapiens
MYLHIGEEIDGVDMRAEVGLLSRNIIVMGEMEDKCYPYRNHICNFFDFDTFGGHIKFALGFKAAHLEGTELKHMGQQLVGQYPIHFHLAGDVDERGGYDPPTYIRDLSIHHTFSRCVTVHGSNGLLIKDVVGYNSLGHCFFTEDGPEERNTFDHCLGLLVKSGTLLPSDRDSKMCKMITEDSYPGYIPKPRQDCNAVSTFWMANPNNNLINCAAAGSEETGFWFIFHHVPTGPSVGMYSPGYSEHIPLGKFYNNRAHSNYRAGMIIDNGVKTTEASAKDKRPFLSIISARYSPHQDADPLKPREPAIIRHFIAYKNQDHGAWLRGGDVWLDSCRFADNGIGLTLASGGTFPYDDGSKQEIKNSLFVGESGNVGTEMMDNRIWGPGGLDHSGRTLPIGQNFPIRGIQLYDGPINIQNCTFRKFVALEGRHTSALAFRLNNAWQSCPHNNVTGIAFEDVPITSRVFFGEPGPWFNQLDMDGDKTSVFHDVDGSVSEYPGSYLTKNDNWLVRHPDCINVPDWRGAICSGCYAQMYIQAYKTSNLRMKIIKNDFPSHPLYLEGALTRSTHYQQYQPVVTLQKGYTIHWDQTAPAELAIWLINFNKGDWIRVGLCYPRGTTFSILSDVHNRLLKQTSKTGVFVRTLQMDKVEQSYPGRSHYYWDEDSGLLFLKLKAQNEREKFAFCSMKGCERIKIKALIPKNAGVSDCTATAYPKFTERAVVDVPMPKKLFGSQLKTKDHFLEVKMESSKQHFFHLWNDFAYIEVDGKKYPSSEDGIQVVVIDGNQGRVVSHTSFRNSILQGIPWQLFNYVATIPDNSIVLMASKGRYVSRGPWTRVLEKLGADRGLKLKEQMAFVGFKGSFRPIWVTLDTEDHKAKIFQVVPIPVVKKKKL

SEQ ID NO: 992 - protein, 996 aa, Homo sapiens [sequence omitted]

SEQ ID NO: 993 - protein, 1144 aa, Homo sapiens
MGAAGRQDFLFKAMLTISWLTLTCFPGATSTVAAGCPDQSPELQPWNPGHDQDHHVHIGQGKTLLLTSSATVYSIHISEGGKLVIKDHDEPIVLRTRHILIDNGGELHAGSALCPFQGNFTIILYGRADEGIQPDPYYGLKYIGVGKGGALELHGQKKLSWTFLNKTLHPGGMAEGGYFFERSWGHRGVIVHVIDPKSGTVIHSDRFDTYRSKKESERLVQYLNAVPDGRILSVAVNDEGSRNLDDMARKAMTKLGSKHFLHLGFRHPWSFLTVKGNPSSSVEDHIEYHGHRGSAAARVFKLFQTEHGEYFNVSLSSEWVQDVEWTEWFDHDKVSQTKGGEKISDLWKAHPGKICNRPIDIQATTMDGVNLSTEVVYKKGQDYRFACYDRGRACRSYRVRFLCGKPVRPKLTVTIDTNVNSTILNLEDNVQSWKPGDTLVIASTDYSMYQAEEFQVLPCRSCAPNQVKVAGKPMYLHIGEEIDGVDMRAEVGLLSRNIIVMGEMEDKCYPYRNHICNFFDFDTFGGHIKFALGFKAAHLEGTELKHMGQQLVGQYPIHFHLAGDVDERGGYDPPTYIRDLSIHHTFSRCVTVHGSNGLLIKDVVGYNSLGHCFFTEDGPEERNTFDHCLGLLVKSGTLLPSDRDSKMCKMITEDSYPGYIPKPRQDCNAVSTFWMANPNNNLINCAAAGSEETGFWFIFHHVPTGPSVGMYSPGYSEHIPLGKFYNNRAHSNYRAGMIIDNGVKTTEASAKDKRPFLSIISARYSPHQDADPLKPREPAIIRHFIAYKNQDHGAWLRGGDVWLDSCRFADNGIGLTLASGGTFPYDDGSKQEIKNSLFVGESGNVGTEMMDNRIWGPGGLDHSGRTLPIGQNFPIRGIQLYDGPINIQNCTFRKFVALEGRHTSALAFRLNNAWQSCPHNNVTGIAFEDVPITSRVFFGEPGPWFNQLDMDGDKTSVFHDVDGSVSEYPGSYLTKNDNWLVRHPDCINVPDWRGAICSGCYAQMYIQAYKTSNLRMKIIKNDFPSHPLYLEGALTRSTHYQQYQPVVTLQKGYTIHWDQTAPAELAIWLINFNKGDWIRVGLCYPRGTTFSILSDVHNRLLKQTSKTGVFVRTLQMDKVEQSYPGRSHYYWDEDSGKQRTISWR

SEQ ID NO: 994 - protein, 59 aa, Homo sapiens [sequence omitted]

SEQ ID NO: 995 - protein, 57 aa, Homo sapiens
MTLNSWLSSVDSHADSSFQHTHGFLMEKVSEAASLMQLQVGVTRLKVVELELRPMSP

SEQ ID NO: 996 - protein, 1136 aa, Homo sapiens
MGAAGRQDFLFKAMLTISWLTLTCFPGATSTVAAGCPDQSPELQPWNPGHDQDHHVHIGQGKTLLLTSSATVYSIHISEGGKLVIKDHDEPIVLRTRHILIDNGGELHAGSALCPFQGNFTIILYGRADEGIQPDPYYGLKYIGVGKGGALELHGQKKLSWTFLNKTLHPGGMAEGGYFFERSWGHRGVIVHVIDPKSGTVIHSDRFDTYRSKKESERLVQYLNAVPDGRILSVAVNDEGSRNLDDMARKAMTKLGSKHFLHLGFRHPWSFLTVKGNPSSSVEDHIEYHGHRGSAAARVFKLFQTEHGEYFNVSLSSEWVQDVEWTEWFDHDKVSQTKGGEKISDLWKAHPGKICNRPIDIQATTMDGVNLSTEVVYKKGQDYRFACYDRGRACRSYRVRFLCGKPVRPKLTVTIDTNVNSTILNLEDNVQSWKPGDTLVIASTDYSMYQAEEFQVLPCRSCAPNQVKVAGKPMYLHIGEEIDGVDMRAEVGLLSRNIIVMGEMEDKCYPYRNHICNFFDFDTFGGHIKFALGFKAAHLEGTELKHMGQQLVGQYPIHFHLAGDVDERGGYDPPTYIRDLSIHHTFSRCVTVHGSNGLLIKDVVGYNSLGHCFFTEDGPEERNTFDHCLGLLVKSGTLLPSDRDSKMCKMITEDSYPGYIPKPRQDCNAVSTFWMANPNNNLINCAAAGSEETGFWFIFHHVPTGPSVGMYSPGYSEHIPLGKFYNNRAHSNYRAGMIIDNGVKTTEASAKDKRPFLSIISARYSPHQDADPLKPREPAIIRHFIAYKNQDHGAWLRGGDVWLDSCRFADNGIGLTLASGGTFPYDDGSKQEIKNSLFVGESGNVGTEMMDNRIWGPGGLDHSGRTLPIGQNFPIRGIQLYDGPINIQNCTFRKFVALEGRHTSALAFRLNNAWQSCPHNNVTGIAFEDVPITSRVFFGEPGPWFNQLDMDGDKTSVFHDVDGSVSEYPGSYLTKNDNWLVRHPDCINVPDWRGAICSGCYAQMYIQAYKTSNLRMKIIKNDFPSHPLYLEGALTRSTHYQQYQPVVTLQKGYTIHWDQTAPAELAIWLINFNKGDWIRVGLCYPRGTTFSILSDVHNRLLKQTSKTGVFVRTLQMDKVEQSYPGRSHYYWDEDSG

SEQ ID NO: 997 - protein, 329 aa, Homo sapiens [sequence omitted]

SEQ ID NO: 998 - DNA, 2789 bp, Homo sapiens
ctccctctgcggcgggggcggccccagcggatgaatgaagcggcgcgtggctgccggggaggccagagcgtggagcgctgcgcggcgcggcggccgggccctcgagacggggacggacacaccagcccctcggataccacttggccactcccgctgaggccactcccactgcgtggctgaagcctcgaggtcaccaggcggaggcgcggagatgcccctgcatcagctgggggacaagccgctcaccttccccagccccaactcagccatggaaaacgggcttgaccacaccccacccagcaggagggcatccccgggcacacccctgagccccggctccctccgctccgctgcccatagccccctggacaccagcaagcagcccctctgccagctctgggccgagaagcatggcgcccgggggacccatgaggtgcggtacgtctcggccgggcagagcgtggcgtgcggctggtgggccttcgcaccgccgtgcctgcaggtcctcaacacgcccaagggcatcctgttcttcctgtgtgcggccgcattcctgcaggggatgactgtgaatggcttcatcaacacagtcatcacctccctggagcgccgctatgacctgcacagctaccagagcgggctcatcgccagctcctacgacattgccgcctgcctctgcctcaccttcgtcagctacttcgggggctcagggcacaagccgcgctggctgggctggggcgtgctgcttatgggcacggggtcgctggtgttcgcgctgccccacttcacggctggccgctatgaggtggagttggacgcgggtgtcaggacgtgccctgccaaccccggcgcggtgtgtgcggacagcacctcgggcctgtcccgctaccagctggtcttcatgctgggccagttcctgcatggcgtgggtgccacacccctctacacgctgggcgtcacctacctggatgagaacgtcaagtccagctgctcgcccgtctacattgccatcttctacacagcggccatcctgggcccagctgccggctacctgattggaggtgccctgctgaatatctacacggaaatgggccgacggacggagctgaccaccgagagcccactgtgggtcggcgcctggtgggtcggcttcctgggctctggggccgctgctttcttcaccgccgttcccatccttggttaccctcggcagctgccaggctcccagcgctacgcggtcatgagagcggcggaaatgcaccagttgaaggacagcagccgtggggaggcgagcaacccggactttgggaaaaccatcagagacctgcctctctccatctggctcctgctgaagaaccccacgttcatcctgctctgcctggccggggccaccgaggccactctcatcaccggcatgtccacgttcagccccaagttcttggagtcccagttcagcctgagtgcctcagaagctgccaccttgtttgggtacctggtggtgccagcgggtggtggcggcaccttcctgggcggcttctttgtgaacaagctcaggctccggggctccgcggtcatcaagttctgcctgttctgcaccgttgtcagcctgctgggcatcctcgtcttctcactgcactgccccagtgtgcccatggcgggcgtcacagccagctacggcgggagcctcctgcccgaaggccacctgaacctaacggctccctgcaacgctgcctgcagctgccagccagaacactacagccctgtgtgcggctcggacggcctcatgtacttctcactgtgccacgcagggtgccctgcagccacggagacgaatgtggacggccagaaggtgtaccgagactgtagctgtatccctcagaatctttcctctggttttggccatgccactgcagggaaatgcacttcaacttgtcagagaaagcccctccttctggttttcatattcgttgtaattttctttacattcctcagcagcattcctgcactaacggcaactctacgatgtgtccgtgaccctcagagatcctttgccctgggaatccagtggattgtagttagaatactagggggcatcccggggcccatcgccttcggctgggtgatcgacaaggcctgtctgctgtggcaggaccagtgtggccagcagggctcctgcttggtgtaccagaattcggccatgagccgctacatactcatcatggggctcctgtacaaggtgctgggcgtcctcttctttgccatagcctgcttcttatacaagcccctgtcggagtcttcagatggcctggaaacttgtctgcccagccagtcctcagcccctgacagtgccacagatagccagctccagagcagcgtctgaccaccgcccgcgcccacccggccacggcgggcactcagcatttcctgatgacagaacagtgccgttgggtgatgcaatcacacgggaacttctatttgacctgcaaccttctacttaacctgtggtttaaagtcggctgtgacctcctgtccccagagctgtacggccctgcagtgggtgggaggaacttgcataaatatatatttatggacacacagtttgcatcagaacgtgtttatagaatgtgttttatacccgatcgtgtgtggtgtgcgtgaggacaaactccgcaggggctgtgaatcccactgggagggcggcgggcctgcagcccgaggaaggcttgtgtgtcctcagttaaaactgtgcatatcgaaatatattttgttatttaagcctgcgtccccgt

SEQ ID NO: 999 - DNA, 3109 bp, Homo sapiens
ctccctctgcggcgggggcggccccagcggatgaatgaagcggcgcgtggctgccggggaggccagagcgtggagcgctgcgcggcgcggcggccgggccctcgagacggggacggacacaccagcccctcggataccacttggccactcccgctgaggccactcccactgcgtggctgaagcctcgaggtcaccaggcggaggcgcggagatgcccctgcatcagctgggggacaagccgctcaccttccccagccccaactcagccatggaaaacgggcttgaccacaccccacccagcaggagggcatccccgggcacacccctgagccccggctccctccgctccgctgcccatagccccctggacaccagcaagcagcccctctgccagctctgggccgagaagcatggcgcccgggggacccatgaggtgcggtacgtctcggccgggcagagcgtggcgtgcggctggtgggccttcgcaccgccgtgcctgcaggtcctcaacacgcccaagggcatcctgttcttcctgtgtgcggccgcattcctgcaggggatgactgtgaatggcttcatcaacacagtcatcacctccctggagcgccgctatgacctgcacagctaccagagcgggctcatcgccagctcctacgacattgccgcctgcctctgcctcaccttcgtcagctacttcgggggctcagggcacaagccgcgctggctgggctggggcgtgctgcttatgggcacggggtcgctggtgttcgcgctgccccacttcacggctggccgctatgaggtggagttggacgcgggtgtcaggacgtgccctgccaaccccggcgcggtgtgtgcggacagcacctcgggcctgtcccgctaccagctggtcttcatgctgggccagttcctgcatggcgtgggtgccacacccctctacacgctgggcgtcacctacctggatgagaacgtcaagtccagctgctcgcccgtctacattgccatcttctacacagcggccatcctgggcccagctgccggctacctgattggaggtgccctgctgaatatctacacggaaatgggccgacggacggagctgaccaccgagagcccactgtgggtcggcgcctggtgggtcggcttcctgggctctggggccgctgctttcttcaccgccgttcccatccttggttaccctcggcagctgccaggctcccagcgctacgcggtcatgagagcggcggaaatgcaccagttgaaggacagcagccgtggggaggcgagcaacccggactttgggaaaaccatcagagacctgcctctctccatctggctcctgctgaagaaccccacgttcatcctgctctgcctggccggggccaccgaggccactctcatcaccggcatgtccacgttcagccccaagttcttggagtcccagttcagcctgagtgcctcagaagctgccaccttgtttgggtacctggtggtgccagcgggtggtggcggcaccttcctgggcggcttctttgtgaacaagctcaggctccggggctccgcggtcatcaagttctgcctgttctgcaccgttgtcagcctgctgggcatcctcgtcttctcactgcactgccccagtgtgcccatggcgggcgtcacagccagctacggcgggagcctcctgcccgaaggccacctgaacctaacggctccctgcaacgctgcctgcagctgccagccagaacactacagccctgtgtgcggctcggacggcctcatgtacttctcactgtgccacgcagggtgccctgcagccacggagacgaatgtggacggccagaaggtgtaccgagactgtagctgtatccctcagaatctttcctctggttttggccatgccactgcagggaaatgcacttcaacttgtcagagaaagcccctccttctggttttcatattcgttgtaattttctttacattcctcagcagcattcctgcactaacggcaactctacgatgtgtccgtgaccctcagagatcctttgccctgggaatccagtggattgtagttagaatactagggggcatcccggggcccatcgccttcggctgggtgatcgacaaggcctgtctgctgtggcaggaccagtgtggccagcagggctcctgcttggtgtaccagaattcggccatgagccgctacatactcatcatggggctcctgtacaaggtgctgggcgtcctcttctttgccatagcctgcttcttatacaagcccctgtcggagtcttcagatggcctggaaacttgtctgcccagccagtcctcagcccctgacagtgccacagatagccagctccagagcagcgtctgaccaccgcccgcgcccacccggccacggcgggcactcagcatttcctgatgacagaacagtgccgttgggtgatgcaatcacacgggaacttctatttgacctgcaaccttctacttaacctgtggtttaaagtcggctgtgacctcctgtccccagagctgtacggccctgcagtgggtgggaggaacttgcataaatatatatttatggacacacagtttgcatcagaacgtgtttatagaatgtgttttatacccgatcgtgtgtggtgtgcgtgaggacaaactccgcaggggctgtgaatcccactgggagggcggcgggcctgcagcccgaggaaggcttgtgtgtcctcagttaaaactgtgcatatcgaaatatattttgttatttaagcctgcgtccccgtaccgcgtgctttatttctatgagtttgcagagtttggtggtctcgccatccttggcccacgtcctgtagtcagccctgtggaatccgcggatatgaaaagttggccttccttatccacaggctcccccgtaagtcggccttccttatccacaggctcccctgctgaggattcatcccaccttggatggaaaatgcagtttttgtgggagatggaactggagggtacggagggctgactgcacatacaaatatacatacatgagtgtacatatgttcttatataaacgtgtcacagtaaaattgttcctcatcttgcgtta

SEQ ID NO: 1000 - DNA, 4586 bp, Homo sapiens
ctccctctgcggcgggggcggccccagcggatgaatgaagcggcgcgtggctgccggggaggccagagcgtggagcgctgcgcggcgcggcggccgggccctcgagacggggacggacacaccagcccctcggataccacttggccactcccgctgaggccactcccactgcgtggctgaagcctcgaggtcaccaggcggaggcgcggagatgcccctgcatcagctgggggacaagccgctcaccttccccagccccaactcagccatggaaaacgggcttgaccacaccccacccagcaggagggcatccccgggcacacccctgagccccggctccctccgctccgctgcccatagccccctggacaccagcaagcagcccctctgccagctctgggccgagaagcatggcgcccgggggacccatgaggtgcggtacgtctcggccgggcagagcgtggcgtgcggctggtgggccttcgcaccgccgtgcctgcaggtcctcaacacgcccaagggcatcctgttcttcctgtgtgcggccgcattcctgcaggggatgactgtgaatggcttcatcaacacagtcatcacctccctggagcgccgctatgacctgcacagctaccagagcgggctcatcgccagctcctacgacattgccgcctgcctctgcctcaccttcgtcagctacttcgggggctcagggcacaagccgcgctggctgggctggggcgtgctgcttatgggcacggggtcgctggtgttcgcgctgccccacttcacggctggccgctatgaggtggagttggacgcgggtgtcaggacgtgccctgccaaccccggcgcggtgtgtgcggacagcacctcgggcctgtcccgctaccagctggtcttcatgctgggccagttcctgcatggcgtgggtgccacacccctctacacgctgggcgtcacctacctggatgagaacgtcaagtccagctgctcgcccgtctacattgccatcttctacacagcggccatcctgggcccagctgccggctacctgattggaggtgccctgctgaatatctacacggaaatgggccgacggacggagctgaccaccgagagcccactgtgggtcggcgcctggtgggtcggcttcctgggctctggggccgctgctttcttcaccgccgttcccatccttggttaccctcggcagctgccaggctcccagcgctacgcggtcatgagagcggcggaaatgcaccagttgaaggacagcagccgtggggaggcgagcaacccggactttgggaaaaccatcagagacctgcctctctccatctggctcctgctgaagaaccccacgttcatcctgctctgcctggccggggccaccgaggccactctcatcaccggcatgtccacgttcagccccaagttcttggagtcccagttcagcctgagtgcctcagaagctgccaccttgtttgggtacctggtggtgccagcgggtggtggcggcaccttcctgggcggcttctttgtgaacaagctcaggctccggggctccgcggtcatcaagttctgcctgttctgcaccgttgtcagcctgctgggcatcctcgtcttctcactgcactgccccagtgtgcccatggcgggcgtcacagccagctacggcgggagcctcctgcccgaaggccacctgaacctaacggctccctgcaacgctgcctgcagctgccagccagaacactacagccctgtgtgcggctcggacggcctcatgtacttctcactgtgccacgcagggtgccctgcagccacggagacgaatgtggacggccagaaggtgtaccgagactgtagctgtatccctcagaatctttcctctggttttggccatgccactgcagggaaatgcacttcaacttgtcagagaaagcccctccttctggttttcatattcgttgtaattttctttacattcctcagcagcattcctgcactaacggcaactctacgatgtgtccgtgaccctcagagatcctttgccctgggaatccagtggattgtagttagaatactagggggcatcccggggcccatcgccttcggctgggtgatcgacaaggcctgtctgctgtggcaggaccagtgtggccagcagggctcctgcttggtgtaccagaattcggccatgagccgctacatactcatcatggggctcctgtacaagtttcagttaccagaggtccaccacagtctgaatgtattaaataggaaattccagaagcaaacagttcataacctttaaagcacgcgccgttctgcacagtctggtgagatcttgatctgtcctgcccaggactcggattctccctttgtccaactttggaagaaggcaaggtcagaacttattctgcagggagctttggggatattggatactaaggcccaagccctctgtgatacgcctttcgctttggcataaaataacggttgactctctgttaggcgcgtctctgctcagggagtggtggtgtttggggaagcccaaaggcacatgagcatcaggaaattgaccatttgacttcataagacataacctttgtccagcgtgtccaggctattcatgccaccacctgttgatcacttagcagccggtgtggttcccacatcccccatcaccatatcacagtgccatgttcaagccactcttatttacctaatcatggccccaaagcaccggagcactcacgccgccgttcagctctgccaatgggaagccggaggcgcctccttcagcgagaaggtgtagttccttggctgggcttagtactacccttagactcacgcgtccacaggggtctcagtgtctgcggatgagggggctgctgtactttcccagggagccgtccccagactctctctttgctgtgttggatgcatcccttagctgggagcagcaggctgagagccctccacacgcagccatcccctgggctcagcacagccagcgggagccgtatccagagggtcagagttggcctcagcagcgcatgcgtccatgttaattgtagcgggggagcacacggtgtctccttataaacaccctcgcattccactttgtcctgcaccgagtcaaaacagcctcactccctgaatgcaggctcagggccatcagccaggctgacactccaggaggcacagtgggtgtttctggtccacgcccagcgtggaaatcatagtggtgcacatgtactctgcgtgggcattgcggcagcatccgtgcttggacctcaccgcctttggggcccacgtgggattcctgccacatcgtcctcttgccctgcaaagtcggtgcagcccctcattgttgacaaagaaaccaagaccctgaaggttcagaactgcccatgatggtggcaccggggcttgaaccccggctgtggtggtgaccggcgactggctctgtgtgaggttcctgtggccgccacgacaaaggaccgcaagcggggtggcctgatgtagcagaaccagattcgcttgcaggtgggggcagggcgggctccttccgccgctctggctctctgcagctgcatgtggcctttccctctgtccctgcctcaagtcttcctctcctttctctcatgaggacaccagtcattggatttggggcccaccttagatccaggatggtctcatctcaaatccttaattacatctgcaaagaccctatttccaaaaaaggtcccattcactggtgtctggcactgttcaacccatgacaagcccctcagtcctgtgcctctgtttttagtcaaagggtgtgtttcattccctctaacaatattggcgtctgctctacaaaccggttatatgggaaagataccctctcagagcaggatgggtttccgtggacctggtgagggtgctgcaggctggggcagggacaggactgggacaggcccaccagtatccaaaggctctggccgagctccccacgaggtccagcgggctcctctctccccaggtgctgggcgtcctcttctttgccatagcctgcttcttatacaagcccctgtcggagtcttcagatggcctggaaacttgtctgcccagccagtcctcagcccctgacagtgccacagatagccagctccagagcagcgtctgaccaccgcccgcgcccacccggccacggcgggcactcagcatttcctgatgacagaacagtgccgttgggtgatgcaatcacacgggaacttctatttgacctgcaaccttctacttaacctgtggtttaaagtcggctgtgacctcctgtccccagagctgtacggccctgcagtgggtgggaggaacttgcataaatatatatttatggacacacagtttgcatcagaacgtgtttatagaatgtgttttatacccgatcgtgtgtggtgtgcgtgaggacaaactccgcaggggctgtgaatcccactgggagggcggcgggcctgcagcccgaggaaggcttgtgtgtcctcagttaaaactgtgcatatcgaaatatattttgttatttaagcctgcgtccccgt

SEQ ID NO: 1001 - DNA, 4884 bp, Homo sapiens
ctccctctgcggcgggggcggccccagcggatgaatgaagcggcgcgtggctgccggggaggccagagcgtggagcgctgcgcggcgcggcggccgggccctcgagacggggacggacacaccagcccctcggataccacttggccactcccgctgaggccactcccactgcgtggctgaagcctcgaggtcaccaggcggaggcgcggagatgcccctgcatcagctgggggacaagccgctcaccttccccagccccaactcagccatggaaaacgggcttgaccacaccccacccagcaggagggcatccccgggcacacccctgagccccggctccctccgctccgctgcccatagccccctggacaccagcaagcagcccctctgccagctctgggccgagaagcatggcgcccgggggacccatgaggtgcggtacgtctcggccgggcagagcgtggcgtgcggctggtgggccttcgcaccgccgtgcctgcaggtcctcaacacgcccaagggcatcctgttcttcctgtgtgcggccgcattcctgcaggggatgactgtgaatggcttcatcaacacagtcatcacctccctggagcgccgctatgacctgcacagctaccagagcgggctcatcgccagctcctacgacattgccgcctgcctctgcctcaccttcgtcagctacttcgggggctcagggcacaagccgcgctggctgggctggggcgtgctgcttatgggcacggggtcgctggtgttcgcgctgccccacttcacggctggccgctatgaggtggagttggacgcgggtgtcaggacgtgccctgccaaccccggcgcggtgtgtgcggacagcacctcgggcctgtcccgctaccagctggtcttcatgctgggccagttcctgcatggcgtgggtgccacacccctctacacgctgggcgtcacctacctggatgagaacgtcaagtccagctgctcgcccgtctacattgccatcttctacacagcggccatcctgggcccagctgccggctacctgattggaggtgccctgctgaatatctacacggaaatgggccgacggacggagctgaccaccgagagcccactgtgggtcggcgcctggtgggtcggcttcctgggctctggggccgctgctttcttcaccgccgttcccatccttggttaccctcggcagctgccaggctcccagcgctacgcggtcatgagagcggcggaaatgcaccagttgaaggacagcagccgtggggaggcgagcaacccggactttgggaaaaccatcagagacctgcctctctccatctggctcctgctgaagaaccccacgttcatcctgctctgcctggccggggccaccgaggccactctcatcaccggcatgtccacgttcagccccaagttcttggagtcccagttcagcctgagtgcctcagaagctgccaccttgtttgggtacctggtggtgccagcgggtggtggcggcaccttcctgggcggcttctttgtgaacaagctcaggctccggggctccgcggtcatcaagttctgcctgttctgcaccgttgtcagcctgctgggcatcctcgtcttctcactgcactgccccagtgtgcccatggcgggcgtcacagccagctacggcgggagcctcctgcccgaaggccacctgaacctaacggctccctgcaacgctgcctgcagctgccagccagaacactacagccctgtgtgcggctcggacggcctcatgtacttctcactgtgccacgcagggtgccctgcagccacggagacgaatgtggacggccagaaggtgtaccgagactgtagctgtatccctcagaatctttcctctggttttggccatgccactgcagggaaatgcacttcaacttgtcagagaaagcccctccttctggttttcatattcgttgtaattttctttacattcctcagcagcattcctgcactaacggcaactctacgatgtgtccgtgaccctcagagatcctttgccctgggaatccagtggattgtagttagaatactagggggcatcccggggcccatcgccttcggctgggtgatcgacaaggcctgtctgctgtggcaggaccagtgtggccagcagggctcctgcttggtgtaccagaattcggccatgagccgctacatactcatcatggggctcctgtacaagacgataaagcacaaagccttctaaataaaatgcggtcccacggccagctgttcagaggatcttgacgctcttccttgggtgacggacccaggagagttcatcctgcaggaacccgtggcctcaggctttccaggagggaggttagagaaagggaaggagcccagctggttcacctcccctcggattagcagaaaagaggcgagtctgagcagggccttgtgtggctctggagagaagcagtgggttaaggagacatacacctcggtttccccctcatctgaggtttcactttccacagtttcagttaccagaggtccaccacagtctgaatgtattaaataggaaattccagaagcaaacagttcataacctttaaagcacgcgccgttctgcacagtctggtgagatcttgatctgtcctgcccaggactcggattctccctttgtccaactttggaagaaggcaaggtcagaacttattctgcagggagctttggggatattggatactaaggcccaagccctctgtgatacgcctttcgctttggcataaaataacggttgactctctgttaggcgcgtctctgctcagggagtggtggtgtttggggaagcccaaaggcacatgagcatcaggaaattgaccatttgacttcataagacataacctttgtccagcgtgtccaggctattcatgccaccacctgttgatcacttagcagccggtgtggttcccacatcccccatcaccatatcacagtgccatgttcaagccactcttatttacctaatcatggccccaaagcaccggagcactcacgccgccgttcagctctgccaatgggaagccggaggcgcctccttcagcgagaaggtgtagttccttggctgggcttagtactacccttagactcacgcgtccacaggggtctcagtgtctgcggatgagggggctgctgtactttcccagggagccgtccccagactctctctttgctgtgttggatgcatcccttagctgggagcagcaggctgagagccctccacacgcagccatcccctgggctcagcacagccagcgggagccgtatccagagggtcagagttggcctcagcagcgcatgcgtccatgttaattgtagcgggggagcacacggtgtctccttataaacaccctcgcattccactttgtcctgcaccgagtcaaaacagcctcactccctgaatgcaggctcagggccatcagccaggctgacactccaggaggcacagtgggtgtttctggtccacgcccagcgtggaaatcatagtggtgcacatgtactctgcgtgggcattgcggcagcatccgtgcttggacctcaccgcctttggggcccacgtgggattcctgccacatcgtcctcttgccctgcaaagtcggtgcagcccctcattgttgacaaagaaaccaagaccctgaaggttcagaactgcccatgatggtggcaccggggcttgaaccccggctgtggtggtgaccggcgactggctctgtgtgaggttcctgtggccgccacgacaaaggaccgcaagcggggtggcctgatgtagcagaaccagattcgcttgcaggtgggggcagggcgggctccttccgccgctctggctctctgcagctgcatgtggcctttccctctgtccctgcctcaagtcttcctctcctttctctcatgaggacaccagtcattggatttggggcccaccttagatccaggatggtctcatctcaaatccttaattacatctgcaaagaccctatttccaaaaaaggtcccattcactggtgtctggcactgttcaacccatgacaagcccctcagtcctgtgcctctgtttttagtcaaagggtgtgtttcattccctctaacaatattggcgtctgctctacaaaccggttatatgggaaagataccctctcagagcaggatgggtttccgtggacctggtgagggtgctgcaggctggggcagggacaggactgggacaggcccaccagtatccaaaggctctggccgagctccccacgaggtccagcgggctcctctctccccaggtgctgggcgtcctcttctttgccatagcctgcttcttatacaagcccctgtcggagtcttcagatggcctggaaacttgtctgcccagccagtcctcagcccctgacagtgccacagatagccagctccagagcagcgtctgaccaccgcccgcgcccacccggccacggcgggcactcagcatttcctgatgacagaacagtgccgttgggtgatgcaatcacacgggaacttctatttgacctgcaaccttctacttaacctgtggtttaaagtcggctgtgacctcctgtccccagagctgtacggccctgcagtgggtgggaggaacttgcataaatatatatttatggacacacagtttgcatcagaacgtgtttatagaatgtgttttatacccgatcgtgtgtggtgtgcgtgaggacaaactccgcaggggctgtgaatcccactgggagggcggcgggcctgcagcccgaggaaggcttgtgtgtcctcagttaaaactgtgcatatcgaaatatattttgttatttaagcctgcgtccccgt

SEQ ID NO: 1002 - DNA, 4947 bp, Homo sapiens
ctccctctgcggcgggggcggccccagcggatgaatgaagcggcgcgtggctgccggggaggccagagcgtggagcgctgcgcggcgcggcggccgggccctcgagacggggacggacacaccagcccctcggataccacttggccactcccgctgaggccactcccactgcgtggctgaagcctcgaggtcaccaggcggaggcgcggagatgcccctgcatcagctgggggacaagccgctcaccttccccagccccaactcagccatggaaaacgggcttgaccacaccccacccagcaggagggcatccccgggcacacccctgagccccggctccctccgctccgctgcccatagccccctggacaccagcaagcagcccctctgccagctctgggccgagaagcatggcgcccgggggacccatgaggtgcggtacgtctcggccgggcagagcgtggcgtgcggctggtgggccttcgcaccgccgtgcctgcaggtcctcaacacgcccaagggcatcctgttcttcctgtgtgcggccgcattcctgcaggggatgactgtgaatggcttcatcaacacagtcatcacctccctggagcgccgctatgacctgcacagctaccagagcgggctcatcgccagctcctacgacattgccgcctgcctctgcctcaccttcgtcagctacttcgggggctcagggcacaagccgcgctggctgggctggggcgtgctgcttatgggcacggggtcgctggtgttcgcgctgccccacttcacggctggccgctatgaggtggagttggacgcgggtgtcaggacgtgccctgccaaccccggcgcggtgtgtgcggacagcacctcgggcctgtcccgctaccagctggtcttcatgctgggccagttcctgcatggcgtgggtgccacacccctctacacgctgggcgtcacctacctggatgagaacgtcaagtccagctgctcgcccgtctacattgccatcttctacacagcggccatcctgggcccagctgccggctacctgattggaggtgccctgctgaatatctacacggaaatgggccgacggacggagctgaccaccgagagcccactgtgggtcggcgcctggtgggtcggcttcctgggctctggggccgctgctttcttcaccgccgttcccatccttggttaccctcggcagctgccaggctcccagcgctacgcggtcatgagagcggcggaaatgcaccagttgaaggacagcagccgtggggaggcgagcaacccggactttgggaaaaccatcagagacctgcctctctccatctggctcctgctgaagaaccccacgttcatcctgctctgcctggccggggccaccgaggccactctcatcaccggcatgtccacgttcagccccaagttcttggagtcccagttcagcctgagtgcctcagaagctgccaccttgtttgggtacctggtggtgccagcgggtggtggcggcaccttcctgggcggcttctttgtgaacaagctcaggctccggggctccgcggtcatcaagttctgcctgttctgcaccgttgtcagcctgctgggcatcctcgtcttctcactgcactgccccagtgtgcccatggcgggcgtcacagccagctacggcgggagcctcctgcccgaaggccacctgaacctaacggctccctgcaacgctgcctgcagctgccagccagaacactacagccctgtgtgcggctcggacggcctcatgtacttctcactgtgccacgcagggtgccctgcagccacggagacgaatgtggacggccagaaggtgtaccgagactgtagctgtatccctcagaatctttcctctggttttggccatgccactgcagggaaatgcacttcaacttgtcagagaaagcccctccttctggttttcatattcgttgtaattttctttacattcctcagcagcattcctgcactaacggcaactctacgatgtgtccgtgaccctcagagatcctttgccctgggaatccagtggattgtagttagaatactaggtactgtgcagtgtgaggaagccatggtcagttgcacagtgtgctcactgcacaagggcatggggggcatcccggggcccatcgccttcggctgggtgatcgacaaggcctgtctgctgtggcaggaccagtgtggccagcagggctcctgcttggtgtaccagaattcggccatgagccgctacatactcatcatggggctcctgtacaagacgataaagcacaaagccttctaaataaaatgcggtcccacggccagctgttcagaggatcttgacgctcttccttgggtgacggacccaggagagttcatcctgcaggaacccgtggcctcaggctttccaggagggaggttagagaaagggaaggagcccagctggttcacctcccctcggattagcagaaaagaggcgagtctgagcagggccttgtgtggctctggagagaagcagtgggttaaggagacatacacctcggtttccccctcatctgaggtttcactttccacagtttcagttaccagaggtccaccacagtctgaatgtattaaataggaaattccagaagcaaacagttcataacctttaaagcacgcgccgttctgcacagtctggtgagatcttgatctgtcctgcccaggactcggattctccctttgtccaactttggaagaaggcaaggtcagaacttattctgcagggagctttggggatattggatactaaggcccaagccctctgtgatacgcctttcgctttggcataaaataacggttgactctctgttaggcgcgtctctgctcagggagtggtggtgtttggggaagcccaaaggcacatgagcatcaggaaattgaccatttgacttcataagacataacctttgtccagcgtgtccaggctattcatgccaccacctgttgatcacttagcagccggtgtggttcccacatcccccatcaccatatcacagtgccatgttcaagccactcttatttacctaatcatggccccaaagcaccggagcactcacgccgccgttcagctctgccaatgggaagccggaggcgcctccttcagcgagaaggtgtagttccttggctgggcttagtactacccttagactcacgcgtccacaggggtctcagtgtctgcggatgagggggctgctgtactttcccagggagccgtccccagactctctctttgctgtgttggatgcatcccttagctgggagcagcaggctgagagccctccacacgcagccatcccctgggctcagcacagccagcgggagccgtatccagagggtcagagttggcctcagcagcgcatgcgtccatgttaattgtagcgggggagcacacggtgtctccttataaacaccctcgcattccactttgtcctgcaccgagtcaaaacagcctcactccctgaatgcaggctcagggccatcagccaggctgacactccaggaggcacagtgggtgtttctggtccacgcccagcgtggaaatcatagtggtgcacatgtactctgcgtgggcattgcggcagcatccgtgcttggacctcaccgcctttggggcccacgtgggattcctgccacatcgtcctcttgccctgcaaagtcggtgcagcccctcattgttgacaaagaaaccaagaccctgaaggttcagaactgcccatgatggtggcaccggggcttgaaccccggctgtggtggtgaccggcgactggctctgtgtgaggttcctgtggccgccacgacaaaggaccgcaagcggggtggcctgatgtagcagaaccagattcgcttgcaggtgggggcagggcgggctccttccgccgctctggctctctgcagctgcatgtggcctttccctctgtccctgcctcaagtcttcctctcctttctctcatgaggacaccagtcattggatttggggcccaccttagatccaggatggtctcatctcaaatccttaattacatctgcaaagaccctatttccaaaaaaggtcccattcactggtgtctggcactgttcaacccatgacaagcccctcagtcctgtgcctctgtttttagtcaaagggtgtgtttcattccctctaacaatattggcgtctgctctacaaaccggttatatgggaaagataccctctcagagcaggatgggtttccgtggacctggtgagggtgctgcaggctggggcagggacaggactgggacaggcccaccagtatccaaaggctctggccgagctccccacgaggtccagcgggctcctctctccccaggtgctgggcgtcctcttctttgccatagcctgcttcttatacaagcccctgtcggagtcttcagatggcctggaaacttgtctgcccagccagtcctcagcccctgacagtgccacagatagccagctccagagcagcgtctgaccaccgcccgcgcccacccggccacggcgggcactcagcatttcctgatgacagaacagtgccgttgggtgatgcaatcacacgggaacttctatttgacctgcaaccttctacttaacctgtggtttaaagtcggctgtgacctcctgtccccagagctgtacggccctgcagtgggtgggaggaacttgcataaatatatatttatggacacacagtttgcatcagaacgtgtttatagaatgtgttttatacccgatcgtgtgtggtgtgcgtgaggacaaactccgcaggggctgtgaatcccactgggagggcggcgggcctgcagcccgaggaaggcttgtgtgtcctcagttaaaactgtgcatatcgaaatatattttgttatttaagcctgcgtccccgt

SEQ ID NO: 1003 - DNA, 4878 bp, Homo sapiens
ctccctctgcggcgggggcggccccagcggatgaatgaagcggcgcgtggctgccggggaggccagagcgtggagcgctgcgcggcgcggcggccgggccctcgagacggggacggacacaccagcccctcggataccacttggccactcccgctgaggccactcccactgcgtggctgaagcctcgaggtcaccaggcggaggcgcggagatgcccctgcatcagctgggggacaagccgctcaccttccccagccccaactcagccatggaaaacgggcttgaccacaccccacccagcaggagggcatccccgggcacacccctgagccccggctccctccgctccgctgcccatagccccctggacaccagcaagcagcccctctgccagctctgggccgagaagcatggcgcccgggggacccatgaggtgcggtacgtctcggccgggcagagcgtggcgtgcggctggtgggccttcgcaccgccgtgcctgcaggtcctcaacacgcccaagggcatcctgttcttcctgtgtgcggccgcattcctgcaggggatgactgtgaatggcttcatcaacacagtcatcacctccctggagcgccgctatgacctgcacagctaccagagcgggctcatcgccagctcctacgacattgccgcctgcctctgcctcaccttcgtcagctacttcgggggctcagggcacaagccgcgctggctgggctggggcgtgctgcttatgggcacggggtcgctggtgttcgcgctgccccacttcacggctggccgctatgaggtggagttggacgcgggtgtcaggacgtgccctgccaaccccggcgcggtgtgtgcggacagcacctcgggcctgtcccgctaccagctggtcttcatgctgggccagttcctgcatggcgtgggtgccacacccctctacacgctgggcgtcacctacctggatgagaacgtcaagtccagctgctcgcccgtctacattgccatcttctacacagcggccatcctgggcccagctgccggctacctgattggaggtgccctgctgaatatctacacggaaatgggccgacggacggagctgaccaccgagagcccactgtgggtcggcgcctggtgggtcggcttcctgggctctggggccgctgctttcttcaccgccgttcccatccttggttaccctcggcagctgccaggctcccagcgctacgcggtcatgagagcggcggaaatgcaccagttgaaggacagcagccgtggggaggcgagcaacccggactttgggaaaaccatcagagacctgcctctctccatctggctcctgctgaagaaccccacgttcatcctgctctgcctggccggggccaccgaggccactctcatcaccggcatgtccacgttcagccccaagttcttggagtcccagttcagcctgagtgcctcagaagctgccaccttgtttgggtacctggtggtgccagcgggtggtggcggcaccttcctgggcggcttctttgtgaacaagctcaggctccggggctccgcggtcatcaagttctgcctgttctgcaccgttgtcagcctgctgggcatcctcgtcttctcactgcactgccccagtgtgcccatggcgggcgtcacagccagctacggcgggagcctcctgcccgaaggccacctgaacctaacggctccctgcaacgctgcctgcagctgccagccagaacactacagccctgtgtgcggctcggacggcctcatgtacttctcactgtgccacgcagggtgccctgcagccacggagacgaatgtggacggccagaaggtgtaccgagactgtagctgtatccctcagaatctttcctctggttttggccatgccactgcagggaaatgcacttcaacttgtcagagaaagcccctccttctggttttcatattcgttgtaattttctttacattcctcagcagcattcctgcactaacggcaactctacggtaagctggggtcgggtgtgcgcttgtccagagctttccttgcagcaccctgaggcggagctctgcagatcctgagacaggagcactccaggaaacacccaggtctaagcgggcctgtctgtcactggtggcaggagagacctcactgtctctgatctctgacgaggggcttcccacttgggggggggtgatgatgtggctggggactggtccaggaggccactggcctagggggtgacttggcatgcaaccccacttctgtgggtgctgacgctgtggttttctattgcagatgtgtccgtgaccctcagagatcctttgccctgggaatccagtggattgtagttagaatactagggggcatcccggggcccatcgccttcggctgggtgatcgacaaggcctgtctgctgtggcaggaccagtgtggccagcagggctcctgcttggtgtaccagaattcggccatgagccgctacatactcatcatggggctcctgtacaagtttcagttaccagaggtccaccacagtctgaatgtattaaataggaaattccagaagcaaacagttcataacctttaaagcacgcgccgttctgcacagtctggtgagatcttgatctgtcctgcccaggactcggattctccctttgtccaactttggaagaaggcaaggtcagaacttattctgcagggagctttggggatattggatactaaggcccaagccctctgtgatacgcctttcgctttggcataaaataacggttgactctctgttaggcgcgtctctgctcagggagtggtggtgtttggggaagcccaaaggcacatgagcatcaggaaattgaccatttgacttcataagacataacctttgtccagcgtgtccaggctattcatgccaccacctgttgatcacttagcagccggtgtggttcccacatcccccatcaccatatcacagtgccatgttcaagccactcttatttacctaatcatggccccaaagcaccggagcactcacgccgccgttcagctctgccaatgggaagccggaggcgcctccttcagcgagaaggtgtagttccttggctgggcttagtactacccttagactcacgcgtccacaggggtctcagtgtctgcggatgagggggctgctgtactttcccagggagccgtccccagactctctctttgctgtgttggatgcatcccttagctgggagcagcaggctgagagccctccacacgcagccatcccctgggctcagcacagccagcgggagccgtatccagagggtcagagttggcctcagcagcgcatgcgtccatgttaattgtagcgggggagcacacggtgtctccttataaacaccctcgcattccactttgtcctgcaccgagtcaaaacagcctcactccctgaatgcaggctcagggccatcagccaggctgacactccaggaggcacagtgggtgtttctggtccacgcccagcgtggaaatcatagtggtgcacatgtactctgcgtgggcattgcggcagcatccgtgcttggacctcaccgcctttggggcccacgtgggattcctgccacatcgtcctcttgccctgcaaagtcggtgcagcccctcattgttgacaaagaaaccaagaccctgaaggttcagaactgcccatgatggtggcaccggggcttgaaccccggctgtggtggtgaccggcgactggctctgtgtgaggttcctgtggccgccacgacaaaggaccgcaagcggggtggcctgatgtagcagaaccagattcgcttgcaggtgggggcagggcgggctccttccgccgctctggctctctgcagctgcatgtggcctttccctctgtccctgcctcaagtcttcctctcctttctctcatgaggacaccagtcattggatttggggcccaccttagatccaggatggtctcatctcaaatccttaattacatctgcaaagaccctatttccaaaaaaggtcccattcactggtgtctggcactgttcaacccatgacaagcccctcagtcctgtgcctctgtttttagtcaaagggtgtgtttcattccctctaacaatattggcgtctgctctacaaaccggttatatgggaaagataccctctcagagcaggatgggtttccgtggacctggtgagggtgctgcaggctggggcagggacaggactgggacaggcccaccagtatccaaaggctctggccgagctccccacgaggtccagcgggctcctctctccccaggtgctgggcgtcctcttctttgccatagcctgcttcttatacaagcccctgtcggagtcttcagatggcctggaaacttgtctgcccagccagtcctcagcccctgacagtgccacagatagccagctccagagcagcgtctgaccaccgcccgcgcccacccggccacggcgggcactcagcatttcctgatgacagaacagtgccgttgggtgatgcaatcacacgggaacttctatttgacctgcaaccttctacttaacctgtggtttaaagtcggctgtgacctcctgtccccagagctgtacggccctgcagtgggtgggaggaacttgcataaatatatatttatggacacacagtttgcatcagaacgtgtttatagaatgtgttttatacccgatcgtgtgtggtgtgcgtgaggacaaactccgcaggggctgtgaatcccactgggagggcggcgggcctgcagcccgaggaaggcttgtgtgtcctcagttaaaactgtgcatatcgaaatatattttgttatttaagcctgcgtccccgt

SEQ ID NO: 1004 - DNA, 5239 bp, Homo sapiens
ctccctctgcggcgggggcggccccagcggatgaatgaagcggcgcgtggctgccggggaggccagagcgtggagcgctgcgcggcgcggcggccgggccctcgagacggggacggacacaccagcccctcggataccacttggccactcccgctgaggccactcccactgcgtggctgaagcctcgaggtcaccaggcggaggcgcggagatgcccctgcatcagctgggggacaagccgctcaccttccccagccccaactcagccatggaaaacgggcttgaccacaccccacccagcaggagggcatccccgggcacacccctgagccccggctccctccgctccgctgcccatagccccctggacaccagcaagcagcccctctgccagctctgggccgagaagcatggcgcccgggggacccatgaggtgcggtacgtctcggccgggcagagcgtggcgtgcggctggtgggccttcgcaccgccgtgcctgcaggtcctcaacacgcccaagggcatcctgttcttcctgtgtgcggccgcattcctgcaggggatgactgtgaatggcttcatcaacacagtcatcacctccctggagcgccgctatgacctgcacagctaccagagcgggctcatcgccagctcctacgacattgccgcctgcctctgcctcaccttcgtcagctacttcgggggctcagggcacaagccgcgctggctgggctggggcgtgctgcttatgggcacggggtcgctggtgttcgcgctgccccacttcacggctggccgctatgaggtggagttggacgcgggtgtcaggacgtgccctgccaaccccggcgcggtgtgtgcggacagcacctcgggcctgtcccgctaccagctggtcttcatgctgggccagttcctgcatggcgtgggtgccacacccctctacacgctgggcgtcacctacctggatgagaacgtcaagtccagctgctcgcccgtctacattgccatcttctacacagcggccatcctgggcccagctgccggctacctgattggaggtgccctgctgaatatctacacggaaatgggccgacggacggagctgaccaccgagagcccactgtgggtcggcgcctggtgggtcggcttcctgggctctggggccgctgctttcttcaccgccgttcccatccttggttaccctcggcagctgccaggctcccagcgctacgcggtcatgagagcggcggaaatgcaccagttgaaggacagcagccgtggggaggcgagcaacccggactttgggaaaaccatcagagacctgcctctctccatctggctcctgctgaagaaccccacgttcatcctgctctgcctggccggggccaccgaggccactctcatcaccggcatgtccacgttcagccccaagttcttggagtcccagttcagcctgagtgcctcagaagctgccaccttgtttgggtacctggtggtgccagcgggtggtggcggcaccttcctgggcggcttctttgtgaacaagctcaggctccggggctccgcggtcatcaagttctgcctgttctgcaccgttgtcagcctgctgggcatcctcgtcttctcactgcactgccccagtgtgcccatggcgggcgtcacagccagctacggcgggagcctcctgcccgaaggccacctgaacctaacggctccctgcaacgctgcctgcagctgccagccagaacactacagccctgtgtgcggctcggacggcctcatgtacttctcactgtgccacgcagggtgccctgcagccacggagacgaatgtggacggccagaaggtgtaccgagactgtagctgtatccctcagaatctttcctctggttttggccatgccactgcagggaaatgcacttcaacttgtcagagaaagcccctccttctggttttcatattcgttgtaattttctttacattcctcagcagcattcctgcactaacggcaactctacggtaagctggggtcgggtgtgcgcttgtccagagctttccttgcagcaccctgaggcggagctctgcagatcctgagacaggagcactccaggaaacacccaggtctaagcgggcctgtctgtcactggtggcaggagagacctcactgtctctgatctctgacgaggggcttcccacttgggggggggtgatgatgtggctggggactggtccaggaggccactggcctagggggtgacttggcatgcaaccccacttctgtgggtgctgacgctgtggttttctattgcagatgtgtccgtgaccctcagagatcctttgccctgggaatccagtggattgtagttagaatactaggtactgtgcagtgtgaggaagccatggtcagttgcacagtgtgctcactgcacaagggcatggggggcatcccggggcccatcgccttcggctgggtgatcgacaaggcctgtctgctgtggcaggaccagtgtggccagcagggctcctgcttggtgtaccagaattcggccatgagccgctacatactcatcatggggctcctgtacaagacgataaagcacaaagccttctaaataaaatgcggtcccacggccagctgttcagaggatcttgacgctcttccttgggtgacggacccaggagagttcatcctgcaggaacccgtggcctcaggctttccaggagggaggttagagaaagggaaggagcccagctggttcacctcccctcggattagcagaaaagaggcgagtctgagcagggccttgtgtggctctggagagaagcagtgggttaaggagacatacacctcggtttccccctcatctgaggtttcactttccacagtttcagttaccagaggtccaccacagtctgaatgtattaaataggaaattccagaagcaaacagttcataacctttaaagcacgcgccgttctgcacagtctggtgagatcttgatctgtcctgcccaggactcggattctccctttgtccaactttggaagaaggcaaggtcagaacttattctgcagggagctttggggatattggatactaaggcccaagccctctgtgatacgcctttcgctttggcataaaataacggttgactctctgttaggcgcgtctctgctcagggagtggtggtgtttggggaagcccaaaggcacatgagcatcaggaaattgaccatttgacttcataagacataacctttgtccagcgtgtccaggctattcatgccaccacctgttgatcacttagcagccggtgtggttcccacatcccccatcaccatatcacagtgccatgttcaagccactcttatttacctaatcatggccccaaagcaccggagcactcacgccgccgttcagctctgccaatgggaagccggaggcgcctccttcagcgagaaggtgtagttccttggctgggcttagtactacccttagactcacgcgtccacaggggtctcagtgtctgcggatgagggggctgctgtactttcccagggagccgtccccagactctctctttgctgtgttggatgcatcccttagctgggagcagcaggctgagagccctccacacgcagccatcccctgggctcagcacagccagcgggagccgtatccagagggtcagagttggcctcagcagcgcatgcgtccatgttaattgtagcgggggagcacacggtgtctccttataaacaccctcgcattccactttgtcctgcaccgagtcaaaacagcctcactccctgaatgcaggctcagggccatcagccaggctgacactccaggaggcacagtgggtgtttctggtccacgcccagcgtggaaatcatagtggtgcacatgtactctgcgtgggcattgcggcagcatccgtgcttggacctcaccgcctttggggcccacgtgggattcctgccacatcgtcctcttgccctgcaaagtcggtgcagcccctcattgttgacaaagaaaccaagaccctgaaggttcagaactgcccatgatggtggcaccggggcttgaaccccggctgtggtggtgaccggcgactggctctgtgtgaggttcctgtggccgccacgacaaaggaccgcaagcggggtggcctgatgtagcagaaccagattcgcttgcaggtgggggcagggcgggctccttccgccgctctggctctctgcagctgcatgtggcctttccctctgtccctgcctcaagtcttcctctcctttctctcatgaggacaccagtcattggatttggggcccaccttagatccaggatggtctcatctcaaatccttaattacatctgcaaagaccctatttccaaaaaaggtcccattcactggtgtctggcactgttcaacccatgacaagcccctcagtcctgtgcctctgtttttagtcaaagggtgtgtttcattccctctaacaatattggcgtctgctctacaaaccggttatatgggaaagataccctctcagagcaggatgggtttccgtggacctggtgagggtgctgcaggctggggcagggacaggactgggacaggcccaccagtatccaaaggctctggccgagctccccacgaggtccagcgggctcctctctccccaggtgctgggcgtcctcttctttgccatagcctgcttcttatacaagcccctgtcggagtcttcagatggcctggaaacttgtctgcccagccagtcctcagcccctgacagtgccacagatagccagctccagagcagcgtctgaccaccgcccgcgcccacccggccacggcgggcactcagcatttcctgatgacagaacagtgccgttgggtgatgcaatcacacgggaacttctatttgacctgcaaccttctacttaacctgtggtttaaagtcggctgtgacctcctgtccccagagctgtacggccctgcagtgggtgggaggaacttgcataaatatatatttatggacacacagtttgcatcagaacgtgtttatagaatgtgttttatacccgatcgtgtgtggtgtgcgtgaggacaaactccgcaggggctgtgaatcccactgggagggcggcgggcctgcagcccgaggaaggcttgtgtgtcctcagttaaaactgtgcatatcgaaatatattttgttatttaagcctgcgtccccgt

SEQ ID NO: 1005 - DNA, 4906 bp, Homo sapiens
ctccctctgcggcgggggcggccccagcggatgaatgaagcggcgcgtggctgccggggaggccagagcgtggagcgctgcgcggcgcggcggccgggccctcgagacggggacggacacaccagcccctcggataccacttggccactcccgctgaggccactcccactgcgtggctgaagcctcgaggtcaccaggcggaggcgcggagatgcccctgcatcagctgggggacaagccgctcaccttccccagccccaactcagccatggaaaacgggcttgaccacaccccacccagcaggagggcatccccgggcacacccctgagccccggctccctccgctccgctgcccatagccccctggacaccagcaagcagcccctctgccagctctgggccgagaagcatggcgcccgggggacccatgaggtgcggtacgtctcggccgggcagagcgtggcgtgcggctggtgggccttcgcaccgccgtgcctgcaggtcctcaacacgcccaagggcatcctgttcttcctgtgtgcggccgcattcctgcaggggatgactgtgaatggcttcatcaacacagtcatcacctccctggagcgccgctatgacctgcacagctaccagagcgggctcatcgccagctcctacgacattgccgcctgcctctgcctcaccttcgtcagctacttcgggggctcagggcacaagccgcgctggctgggctggggcgtgctgcttatgggcacggggtcgctggtgttcgcgctgccccacttcacggctggccgctatgaggtggagttggacgcgggtgtcaggacgtgccctgccaaccccggcgcggtgtgtgcggacagcacctcgggcctgtcccgctaccagctggtcttcatgctgggccagttcctgcatggcgtgggtgccacacccctctacacgctgggcgtcacctacctggatgagaacgtcaagtccagctgctcgcccgtctacattgccatcttctacacagcggccatcctgggcccagctgccggctacctgattggaggtgccctgctgaatatctacacggaaatgggccgacggacggagctgaccaccgagagcccactgtgggtcggcgcctggtgggtcggcttcctgggctctggggccgctgctttcttcaccgccgttcccatccttggttaccctcggcagctgccaggctcccagcgctacgcggtcatgagagcggcggaaatgcaccagttgaaggacagcagccgtggggaggcgagcaacccggactttgggaaaaccatcagagacctgcctctctccatctggctcctgctgaagaaccccacgttcatcctgctctgcctggccggggccaccgaggccactctcatcaccggcatgtccacgttcagccccaagttcttggagtcccagttcagcctgagtgcctcagaagctgccaccttgtttgggtacctggtggtgccagcgggtggtggcggcaccttcctgggcggcttctttgtgaacaagctcaggctccggggctccgcggtcatcaagttctgcctgttctgcaccgttgtcagcctgctgggcatcctcgtcttctcactgcactgccccagtgtgcccatggcgggcgtcacagccagctacggcgggagcctcctgcccgaaggccacctgaacctaacggctccctgcaacgctgcctgcagctgccagccagaacactacagccctgtgtgcggctcggacggcctcatgtacttctcactgtgccacgcagggtgccctgcagccacggagacgaatgtggacggccagaaggtgtaccgagactgtagctgtatccctcagaatctttcctctggttttggccatgccactgcagggaaatgcacttcaacttgtcagagaaagcccctccttctggttttcatattcgttgtaattttctttacattcctcagcagcattcctgcactaacggcaactctacgatgtgtccgtgaccctcagagatcctttgccctgggaatccagtggattgtagttagaatactagggggcatcccggggcccatcgccttcggctgggtgatcgacaaggcctgtctgctgtggcaggaccagtgtggccagcagggctcctgcttggtgtaccagaattcggccatgagccgctacatactcatcatggggctcctgtacaagtttcagttaccagaggtccaccacagtctgaatgtattaaataggaaattccagaagcaaacagttcataacctttaaagcacgcgccgttctgcacagtctggtgagatcttgatctgtcctgcccaggactcggattctccctttgtccaactttggaagaaggcaaggtcagaacttattctgcagggagctttggggatattggatactaaggcccaagccctctgtgatacgcctttcgctttggcataaaataacggttgactctctgttaggcgcgtctctgctcagggagtggtggtgtttggggaagcccaaaggcacatgagcatcaggaaattgaccatttgacttcataagacataacctttgtccagcgtgtccaggctattcatgccaccacctgttgatcacttagcagccggtgtggttcccacatcccccatcaccatatcacagtgccatgttcaagccactcttatttacctaatcatggccccaaagcaccggagcactcacgccgccgttcagctctgccaatgggaagccggaggcgcctccttcagcgagaaggtgtagttccttggctgggcttagtactacccttagactcacgcgtccacaggggtctcagtgtctgcggatgagggggctgctgtactttcccagggagccgtccccagactctctctttgctgtgttggatgcatcccttagctgggagcagcaggctgagagccctccacacgcagccatcccctgggctcagcacagccagcgggagccgtatccagagggtcagagttggcctcagcagcgcatgcgtccatgttaattgtagcgggggagcacacggtgtctccttataaacaccctcgcattccactttgtcctgcaccgagtcaaaacagcctcactccctgaatgcaggctcagggccatcagccaggctgacactccaggaggcacagtgggtgtttctggtccacgcccagcgtggaaatcatagtggtgcacatgtactctgcgtgggcattgcggcagcatccgtgcttggacctcaccgcctttggggcccacgtgggattcctgccacatcgtcctcttgccctgcaaagtcggtgcagcccctcattgttgacaaagaaaccaagaccctgaaggttcagaactgcccatgatggtggcaccggggcttgaaccccggctgtggtggtgaccggcgactggctctgtgtgaggttcctgtggccgccacgacaaaggaccgcaagcggggtggcctgatgtagcagaaccagattcgcttgcaggtgggggcagggcgggctccttccgccgctctggctctctgcagctgcatgtggcctttccctctgtccctgcctcaagtcttcctctcctttctctcatgaggacaccagtcattggatttggggcccaccttagatccaggatggtctcatctcaaatccttaattacatctgcaaagaccctatttccaaaaaaggtcccattcactggtgtctggcactgttcaacccatgacaagcccctcagtcctgtgcctctgtttttagtcaaagggtgtgtttcattccctctaacaatattggcgtctgctctacaaaccggttatatgggaaagataccctctcagagcaggatgggtttccgtggacctggtgagggtgctgcaggctggggcagggacaggactgggacaggcccaccagtatccaaaggctctggccgagctccccacgaggtccagcgggctcctctctccccaggtgctgggcgtcctcttctttgccatagcctgcttcttatacaagcccctgtcggagtcttcagatggcctggaaacttgtctgcccagccagtcctcagcccctgacagtgccacagatagccagctccagagcagcgtctgaccaccgcccgcgcccacccggccacggcgggcactcagcatttcctgatgacagaacagtgccgttgggtgatgcaatcacacgggaacttctatttgacctgcaaccttctacttaacctgtggtttaaagtcggctgtgacctcctgtccccagagctgtacggccctgcagtgggtgggaggaacttgcataaatatatatttatggacacacagtttgcatcagaacgtgtttatagaatgtgttttatacccgatcgtgtgtggtgtgcgtgaggacaaactccgcaggggctgtgaatcccactgggagggcggcgggcctgcagcccgaggaaggcttgtgtgtcctcagttaaaactgtgcatatcgaaatatattttgttatttaagcctgcgtccccgtaccgcgtgctttatttctatgagtttgcagagtttggtggtctcgccatccttggcccacgtcctgtagtcagccctgtggaatccgcggatatgaaaagttggccttccttatccacaggctcccccgtaagtcggccttccttatccacaggctcccctgctgaggattcatcccaccttggatggaaaatgcagtttttgtgggagatggaactggagggtacggagggctgactgcacatacaaatatacatacatgagtgtacatatgttcttatataaacgtgtcacagtaaaattgttcctcatcttgcgtta

SEQ ID NO: 1006 - DNA, 2594 bp, Homo sapiens
ctccctctgcggcgggggcggccccagcggatgaatgaagcggcgcgtggctgccggggaggccagagcgtggagcgctgcgcggcgcggcggccgggccctcgagacggggacggacacaccagcccctcggataccacttggccactcccgctgaggccactcccactgcgtggctgaagcctcgaggtcaccaggcggaggcgcggagatgcccctgcatcagctgggggacaagccgctcaccttccccagccccaactcagccatggaaaacgggcttgaccacaccccacccagcaggagggcatccccgggcacacccctgagccccggctccctccgctccgctgcccatagccccctggacaccagcaagcagcccctctgccagctctgggccgagaagcatggcgcccgggggacccatgaggtgcggtacgtctcggccgggcagagcgtggcgtgcggctggtgggccttcgcaccgccgtgcctgcaggtcctcaacacgcccaagggcatcctgttcttcctgtgtgcggccgcattcctgcaggggatgactgtgaatggcttcatcaacacagtcatcacctccctggagcgccgctatgacctgcacagctaccagagcgggctcatcgccagctcctacgacattgccgcctgcctctgcctcaccttcgtcagctacttcgggggctcagggcacaagccgcgctggctgggctggggcgtgctgcttatgggcacggggtcgctggtgttcgcgctgccccacttcacggctggccgctatgaggtggagttggacgcgggtgtcaggacgtgccctgccaaccccggcgcggtgtgtgcggacagcacctcgggcctgtcccgctaccagctggtcttcatgctgggccagttcctgcatggcgtgggtgccacacccctctacacgctgggcgtcacctacctggatgagaacgtcaagtccagctgctcgcccgtctacattgccatcttctacacagcggccatcctgggcccagctgccggctacctgattggaggtgccctgctgaatatctacacggaaatgggccgacggacggagctgaccaccgagagcccactgtgggtcggcgcctggtgggtcggcttcctgggctctggggccgctgctttcttcaccgccgttcccatccttggttaccctcggcagctgccaggctcccagcgctacgcggtcatgagagcggcggaaatgcaccagttgaaggacagcagccgtggggaggcgagcaacccggactttgggaaaaccatcagagacctgcctctctccatctggctcctgctgaagaaccccacgttcatcctgctctgcctggccggggccaccgaggccactctcatcaccggcatgtccacgttcagccccaagttcttggagtcccagttcagcctgagtgcctcagaagctgccaccttgtttgggtacctggtggtgccagcgggtggtggcggcaccttcctgggcggcttctttgtgaacaagctcaggctccggggctccgcggtcatcaagttctgcctgttctgcaccgttgtcagcctgctgggcatcctcgtcttctcactgcactgccccagtgtgcccatggcgggcgtcacagccagctacggcgggagcctcctgcccgaaggccacctgaacctaacggctccctgcaacgctgcctgcagctgccagccagaacactacagccctgtgtgcggctcggacggcctcatgtacttctcactgtgccacgcagggtgccctgcagccacggagacgaatgtggacggccagaaggtgtaccgagactgtagctgtatccctcagaatctttcctctggttttggccatgccactgcagggaaatgcacttcaacttgtcagagaaagcccctccttctggttttcatattcgttgtaattttctttacattcctcagcagcattcctgcactaacggcaactctacgatgtgtccgtgaccctcagagatcctttgccctgggaatccagtggattgtagttagaatactagggggcatcccggggcccatcgccttcggctgggtgatcgacaaggcctgtctgctgtggcaggaccagtgtggccagcagggctcctgcttggtgtaccagaattcggccatgagccgctacatactcatcatggggctcctgtacaaggtgctgggcgtcctcttctttgccatagcctgcttcttatacaagcccctgtcggagtcttcagatggcctggaaacttgtctgcccagccagtcctcagcccctgacagtgccacagatagccagctccagagcagcgtctgaccaccgcccgcgcccacccggccacggcgggcactcagcatttcctgatgacagaacagtgccgttgggtgatgcaatcacacgggaacttctatttgacctgcaaccttctacttaacctgtggtttaaagtcggctgtgacctcctgtccccagagctgtacggccctgcagtgggtgggaggaacttgcataaatatatatttatggacac

SEQ ID NO: 1007 - DNA, 4689 bp, Homo sapiens
ctccctctgcggcgggggcggccccagcggatgaatgaagcggcgcgtggctgccggggaggccagagcgtggagcgctgcgcggcgcggcggccgggccctcgagacggggacggacacaccagcccctcggataccacttggccactcccgctgaggccactcccactgcgtggctgaagcctcgaggtcaccaggcggaggcgcggagatgcccctgcatcagctgggggacaagccgctcaccttccccagccccaactcagccatggaaaacgggcttgaccacaccccacccagcaggagggcatccccgggcacacccctgagccccggctccctccgctccgctgcccatagccccctggacaccagcaagcagcccctctgccagctctgggccgagaagcatggcgcccgggggacccatgaggtgcggtacgtctcggccgggcagagcgtggcgtgcggctggtgggccttcgcaccgccgtgcctgcaggtcctcaacacgcccaagggcatcctgttcttcctgtgtgcggccgcattcctgcaggggatgactgtgaatggcttcatcaacacagtcatcacctccctggagcgccgctatgacctgcacagctaccagagcgggctcatcgccagctcctacgacattgccgcctgcctctgcctcaccttcgtcagctacttcgggggctcagggcacaagccgcgctggctgggctggggcgtgctgcttatgggcacggggtcgctggtgttcgcgctgccccacttcacggctggccgctatgaggtggagttggacgcgggtgtcaggacgtgccctgccaaccccggcgcggtgtgtgcggacagcacctcgggcctgtcccgctaccagctggtcttcatgctgggccagttcctgcatggcgtgggtgccacacccctctacacgctgggcgtcacctacctggatgagaacgtcaagtccagctgctcgcccgtctacattgccatcttctacacagcggccatcctgggcccagctgccggctacctgattggaggtgccctgctgaatatctacacggaaatgggccgacggacggagctgaccaccgagagcccactgtgggtcggcgcctggtgggtcggcttcctgggctctggggccgctgctttcttcaccgccgttcccatccttggttaccctcggcagctgccaggctcccagcgctacgcggtcatgagagcggcggaaatgcaccagttgaaggacagcagccgtggggaggcgagcaacccggactttgggaaaaccatcagagacctgcctctctccatctggctcctgctgaagaaccccacgttcatcctgctctgcctggccggggccaccgaggccactctcatcaccggcatgtccacgttcagccccaagttcttggagtcccagttcagcctgagtgcctcagaagctgccaccttgtttgggtacctggtggtgccagcgggtggtggcggcaccttcctgggcggcttctttgtgaacaagctcaggctccggggctccgcggtcatcaagttctgcctgttctgcaccgttgtcagcctgctgggcatcctcgtcttctcactgcactgccccagtgtgcccatggcgggcgtcacagccagctacggcgggagcctcctgcccgaaggccacctgaacctaacggctccctgcaacgctgcctgcagctgccagccagaacactacagccctgtgtgcggctcggacggcctcatgtacttctcactgtgccacgcagggtgccctgcagccacggagacgaatgtggacggccagaaggtgtaccgagactgtagctgtatccctcagaatctttcctctggttttggccatgccactgcagggaaatgcacttcaacttgtcagagaaagcccctccttctggttttcatattcgttgtaattttctttacattcctcagcagcattcctgcactaacggcaactctacgatgtgtccgtgaccctcagagatcctttgccctgggaatccagtggattgtagttagaatactagggggcatcccggggcccatcgccttcggctgggtgatcgacaaggcctgtctgctgtggcaggaccagtgtggccagcagggctcctgcttggtgtaccagaattcggccatgagccgctacatactcatcatggggctcctgtacaagacgataaagcacaaagccttctaaataaaatgcggtcccacggccagctgttcagaggatcttgacgctcttccttgggtgacggacccaggagagttcatcctgcaggaacccgtggcctcaggctttccaggagggaggttagagaaagggaaggagcccagctggttcacctcccctcggattagcagaaaagaggcgagtctgagcagggccttgtgtggctctggagagaagcagtgggttaaggagacatacacctcggtttccccctcatctgaggtttcactttccacagtttcagttaccagaggtccaccacagtctgaatgtattaaataggaaattccagaagcaaacagttcataacctttaaagcacgcgccgttctgcacagtctggtgagatcttgatctgtcctgcccaggactcggattctccctttgtccaactttggaagaaggcaaggtcagaacttattctgcagggagctttggggatattggatactaaggcccaagccctctgtgatacgcctttcgctttggcataaaataacggttgactctctgttaggcgcgtctctgctcagggagtggtggtgtttggggaagcccaaaggcacatgagcatcaggaaattgaccatttgacttcataagacataacctttgtccagcgtgtccaggctattcatgccaccacctgttgatcacttagcagccggtgtggttcccacatcccccatcaccatatcacagtgccatgttcaagccactcttatttacctaatcatggccccaaagcaccggagcactcacgccgccgttcagctctgccaatgggaagccggaggcgcctccttcagcgagaaggtgtagttccttggctgggcttagtactacccttagactcacgcgtccacaggggtctcagtgtctgcggatgagggggctgctgtactttcccagggagccgtccccagactctctctttgctgtgttggatgcatcccttagctgggagcagcaggctgagagccctccacacgcagccatcccctgggctcagcacagccagcgggagccgtatccagagggtcagagttggcctcagcagcgcatgcgtccatgttaattgtagcgggggagcacacggtgtctccttataaacaccctcgcattccactttgtcctgcaccgagtcaaaacagcctcactccctgaatgcaggctcagggccatcagccaggctgacactccaggaggcacagtgggtgtttctggtccacgcccagcgtggaaatcatagtggtgcacatgtactctgcgtgggcattgcggcagcatccgtgcttggacctcaccgcctttggggcccacgtgggattcctgccacatcgtcctcttgccctgcaaagtcggtgcagcccctcattgttgacaaagaaaccaagaccctgaaggttcagaactgcccatgatggtggcaccggggcttgaaccccggctgtggtggtgaccggcgactggctctgtgtgaggttcctgtggccgccacgacaaaggaccgcaagcggggtggcctgatgtagcagaaccagattcgcttgcaggtgggggcagggcgggctccttccgccgctctggctctctgcagctgcatgtggcctttccctctgtccctgcctcaagtcttcctctcctttctctcatgaggacaccagtcattggatttggggcccaccttagatccaggatggtctcatctcaaatccttaattacatctgcaaagaccctatttccaaaaaaggtcccattcactggtgtctggcactgttcaacccatgacaagcccctcagtcctgtgcctctgtttttagtcaaagggtgtgtttcattccctctaacaatattggcgtctgctctacaaaccggttatatgggaaagataccctctcagagcaggatgggtttccgtggacctggtgagggtgctgcaggctggggcagggacaggactgggacaggcccaccagtatccaaaggctctggccgagctccccacgaggtccagcgggctcctctctccccaggtgctgggcgtcctcttctttgccatagcctgcttcttatacaagcccctgtcggagtcttcagatggcctggaaacttgtctgcccagccagtcctcagcccctgacagtgccacagatagccagctccagagcagcgtctgaccaccgcccgcgcccacccggccacggcgggcactcagcatttcctgatgacagaacagtgccgttgggtgatgcaatcacacgggaacttctatttgacctgcaaccttctacttaacctgtggtttaaagtcggctgtgacctcctgtccccagagctgtacggccctgcagtgggtgggaggaacttgcataaatatatatttatggacac

SEQ ID NO: 1008 - DNA, 4979 bp, Homo sapiens
ctccctctgcggcgggggcggccccagcggatgaatgaagcggcgcgtggctgccggggaggccagagcgtggagcgctgcgcggcgcggcggccgggccctcgagacggggacggacacaccagcccctcggataccacttggccactcccgctgaggccactcccactgcgtggctgaagcctcgaggtcaccaggcggaggcgcggagatgcccctgcatcagctgggggacaagccgctcaccttccccagccccaactcagccatggaaaacgggcttgaccacaccccacccagcaggagggcatccccgggcacacccctgagccccggctccctccgctccgctgcccatagccccctggacaccagcaagcagcccctctgccagctctgggccgagaagcatggcgcccgggggacccatgaggtgcggtacgtctcggccgggcagagcgtggcgtgcggctggtgggccttcgcaccgccgtgcctgcaggtcctcaacacgcccaagggcatcctgttcttcctgtgtgcggccgcattcctgcaggggatgactgtgaatggcttcatcaacacagtcatcacctccctggagcgccgctatgacctgcacagctaccagagcgggctcatcgccagctcctacgacattgccgcctgcctctgcctcaccttcgtcagctacttcgggggctcagggcacaagccgcgctggctgggctggggcgtgctgcttatgggcacggggtcgctggtgttcgcgctgccccacttcacggctggccgctatgaggtggagttggacgcgggtgtcaggacgtgccctgccaaccccggcgcggtgtgtgcggacagcacctcgggcctgtcccgctaccagctggtcttcatgctgggccagttcctgcatggcgtgggtgccacacccctctacacgctgggcgtcacctacctggatgagaacgtcaagtccagctgctcgcccgtctacattgccatcttctacacagcggccatcctgggcccagctgccggctacctgattggaggtgccctgctgaatatctacacggaaatgggccgacggacggagctgaccaccgagagcccactgtgggtcggcgcctggtgggtcggcttcctgggctctggggccgctgctttcttcaccgccgttcccatccttggttaccctcggcagctgccaggctcccagcgctacgcggtcatgagagcggcggaaatgcaccagttgaaggacagcagccgtggggaggcgagcaacccggactttgggaaaaccatcagagacctgcctctctccatctggctcctgctgaagaaccccacgttcatcctgctctgcctggccggggccaccgaggccactctcatcaccggcatgtccacgttcagccccaagttcttggagtcccagttcagcctgagtgcctcagaagctgccaccttgtttgggtacctggtggtgccagcgggtggtggcggcaccttcctgggcggcttctttgtgaacaagctcaggctccggggctccgcggtcatcaagttctgcctgttctgcaccgttgtcagcctgctgggcatcctcgtcttctcactgcactgccccagtgtgcccatggcgggcgtcacagccagctacggcgggagcctcctgcccgaaggccacctgaacctaacggctccctgcaacgctgcctgcagctgccagccagaacactacagccctgtgtgcggctcggacggcctcatgtacttctcactgtgccacgcagggtgccctgcagccacggagacgaatgtggacggccagaaggtgagtggagccgctgcctaccgcccctgtcctcccctggaccctgggaaggggcccccgtgccttccccttgtaatcggagctattgttgggcttcccaggtgtaccgagactgtagctgtatccctcagaatctttcctctggttttggccatgccactgcagggaaatgcacttcaacttgtcagagaaagcccctccttctggttttcatattcgttgtaattttctttacattcctcagcagcattcctgcactaacggcaactctacggtaagctggggtcgggtgtgcgcttgtccagagctttccttgcagcaccctgaggcggagctctgcagatcctgagacaggagcactccaggaaacacccaggtctaagcgggcctgtctgtcactggtggcaggagagacctcactgtctctgatctctgacgaggggcttcccacttgggggggggtgatgatgtggctggggactggtccaggaggccactggcctagggggtgacttggcatgcaaccccacttctgtgggtgctgacgctgtggttttctattgcagatgtgtccgtgaccctcagagatcctttgccctgggaatccagtggattgtagttagaatactagggggcatcccggggcccatcgccttcggctgggtgatcgacaaggcctgtctgctgtggcaggaccagtgtggccagcagggctcctgcttggtgtaccagaattcggccatgagccgctacatactcatcatggggctcctgtacaagtttcagttaccagaggtccaccacagtctgaatgtattaaataggaaattccagaagcaaacagttcataacctttaaagcacgcgccgttctgcacagtctggtgagatcttgatctgtcctgcccaggactcggattctccctttgtccaactttggaagaaggcaaggtcagaacttattctgcagggagctttggggatattggatactaaggcccaagccctctgtgatacgcctttcgctttggcataaaataacggttgactctctgttaggcgcgtctctgctcagggagtggtggtgtttggggaagcccaaaggcacatgagcatcaggaaattgaccatttgacttcataagacataacctttgtccagcgtgtccaggctattcatgccaccacctgttgatcacttagcagccggtgtggttcccacatcccccatcaccatatcacagtgccatgttcaagccactcttatttacctaatcatggccccaaagcaccggagcactcacgccgccgttcagctctgccaatgggaagccggaggcgcctccttcagcgagaaggtgtagttccttggctgggcttagtactacccttagactcacgcgtccacaggggtctcagtgtctgcggatgagggggctgctgtactttcccagggagccgtccccagactctctctttgctgtgttggatgcatcccttagctgggagcagcaggctgagagccctccacacgcagccatcccctgggctcagcacagccagcgggagccgtatccagagggtcagagttggcctcagcagcgcatgcgtccatgttaattgtagcgggggagcacacggtgtctccttataaacaccctcgcattccactttgtcctgcaccgagtcaaaacagcctcactccctgaatgcaggctcagggccatcagccaggctgacactccaggaggcacagtgggtgtttctggtccacgcccagcgtggaaatcatagtggtgcacatgtactctgcgtgggcattgcggcagcatccgtgcttggacctcaccgcctttggggcccacgtgggattcctgccacatcgtcctcttgccctgcaaagtcggtgcagcccctcattgttgacaaagaaaccaagaccctgaaggttcagaactgcccatgatggtggcaccggggcttgaaccccggctgtggtggtgaccggcgactggctctgtgtgaggttcctgtggccgccacgacaaaggaccgcaagcggggtggcctgatgtagcagaaccagattcgcttgcaggtgggggcagggcgggctccttccgccgctctggctctctgcagctgcatgtggcctttccctctgtccctgcctcaagtcttcctctcctttctctcatgaggacaccagtcattggatttggggcccaccttagatccaggatggtctcatctcaaatccttaattacatctgcaaagaccctatttccaaaaaaggtcccattcactggtgtctggcactgttcaacccatgacaagcccctcagtcctgtgcctctgtttttagtcaaagggtgtgtttcattccctctaacaatattggcgtctgctctacaaaccggttatatgggaaagataccctctcagagcaggatgggtttccgtggacctggtgagggtgctgcaggctggggcagggacaggactgggacaggcccaccagtatccaaaggctctggccgagctccccacgaggtccagcgggctcctctctccccaggtgctgggcgtcctcttctttgccatagcctgcttcttatacaagcccctgtcggagtcttcagatggcctggaaacttgtctgcccagccagtcctcagcccctgacagtgccacagatagccagctccagagcagcgtctgaccaccgcccgcgcccacccggccacggcgggcactcagcatttcctgatgacagaacagtgccgttgggtgatgcaatcacacgggaacttctatttgacctgcaaccttctacttaacctgtggtttaaagtcggctgtgacctcctgtccccagagctgtacggccctgcagtgggtgggaggaacttgcataaatatatatttatggacacacagtttgcatcagaacgtgtttatagaatgtgttttatacccgatcgtgtgtggtgtgcgtgaggacaaactccgcaggggctgtgaatcccactgggagggcggcgggcctgcagcccgaggaaggcttgtgtgtcctcagttaaaactgtgcatatcgaaatatattttgttatttaagcctgcgtccccgt

SEQ ID NO: 1009 - DNA, 3182 bp, Homo sapiens
ctccctctgcggcgggggcggccccagcggatgaatgaagcggcgcgtggctgccggggaggccagagcgtggagcgctgcgcggcgcggcggccgggccctcgagacggggacggacacaccagcccctcggataccacttggccactcccgctgaggccactcccactgcgtggctgaagcctcgaggtcaccaggcggaggcgcggagatgcccctgcatcagctgggggacaagccgctcaccttccccagccccaactcagccatggaaaacgggcttgaccacaccccacccagcaggagggcatccccgggcacacccctgagccccggctccctccgctccgctgcccatagccccctggacaccagcaagcagcccctctgccagctctgggccgagaagcatggcgcccgggggacccatgaggtgcggtacgtctcggccgggcagagcgtggcgtgcggctggtgggccttcgcaccgccgtgcctgcaggtcctcaacacgcccaagggcatcctgttcttcctgtgtgcggccgcattcctgcaggggatgactgtgaatggcttcatcaacacagtcatcacctccctggagcgccgctatgacctgcacagctaccagagcgggctcatcgccagctcctacgacattgccgcctgcctctgcctcaccttcgtcagctacttcgggggctcagggcacaagccgcgctggctgggctggggcgtgctgcttatgggcacggggtcgctggtgttcgcgctgccccacttcacggctggccgctatgaggtggagttggacgcgggtgtcaggacgtgccctgccaaccccggcgcggtgtgtgcggacagcacctcgggcctgtcccgctaccagctggtcttcatgctgggccagttcctgcatggcgtgggtgccacacccctctacacgctgggcgtcacctacctggatgagaacgtcaagtccagctgctcgcccgtctacattgccatcttctacacagcggccatcctgggcccagctgccggctacctgattggaggtgccctgctgaatatctacacggaaatgggccgacggacggagctgaccaccgagagcccactgtgggtcggcgcctggtgggtcggcttcctgggctctggggccgctgctttcttcaccgccgttcccatccttggttaccctcggcagctgccaggctcccagcgctacgcggtcatgagagcggcggaaatgcaccagttgaaggacagcagccgtggggaggcgagcaacccggactttgggaaaaccatcagagacctgcctctctccatctggctcctgctgaagaaccccacgttcatcctgctctgcctggccggggccaccgaggccactctcatcaccggcatgtccacgttcagccccaagttcttggagtcccagttcagcctgagtgcctcagaagctgccaccttgtttgggtacctggtggtgccagcgggtggtggcggcaccttcctgggcggcttctttgtgaacaagctcaggctccggggctccgcggtcatcaagttctgcctgttctgcaccgttgtcagcctgctgggcatcctcgtcttctcactgcactgccccagtgtgcccatggcgggcgtcacagccagctacggcgggagcctcctgcccgaaggccacctgaacctaacggctccctgcaacgctgcctgcagctgccagccagaacactacagccctgtgtgcggctcggacggcctcatgtacttctcactgtgccacgcagggtgccctgcagccacggagacgaatgtggacggccagaaggtgagtggagccgctgcctaccgcccctgtcctcccctggaccctgggaaggggcccccgtgccttccccttgtaatcggagctattgttgggcttcccaggtgtaccgagactgtagctgtatccctcagaatctttcctctggttttggccatgccactgcagggaaatgcacttcaacttgtcagagaaagcccctccttctggttttcatattcgttgtaattttctttacattcctcagcagcattcctgcactaacggcaactctacggtaagctggggtcgggtgtgcgcttgtccagagctttccttgcagcaccctgaggcggagctctgcagatcctgagacaggagcactccaggaaacacccaggtctaagcgggcctgtctgtcactggtggcaggagagacctcactgtctctgatctctgacgaggggcttcccacttgggggggggtgatgatgtggctggggactggtccaggaggccactggcctagggggtgacttggcatgcaaccccacttctgtgggtgctgacgctgtggttttctattgcagatgtgtccgtgaccctcagagatcctttgccctgggaatccagtggattgtagttagaatactagggggcatcccggggcccatcgccttcggctgggtgatcgacaaggcctgtctgctgtggcaggaccagtgtggccagcagggctcctgcttggtgtaccagaattcggccatgagccgctacatactcatcatggggctcctgtacaaggtgctgggcgtcctcttctttgccatagcctgcttcttatacaagcccctgtcggagtcttcagatggcctggaaacttgtctgcccagccagtcctcagcccctgacagtgccacagatagccagctccagagcagcgtctgaccaccgcccgcgcccacccggccacggcgggcactcagcatttcctgatgacagaacagtgccgttgggtgatgcaatcacacgggaacttctatttgacctgcaaccttctacttaacctgtggtttaaagtcggctgtgacctcctgtccccagagctgtacggccctgcagtgggtgggaggaacttgcataaatatatatttatggacacacagtttgcatcagaacgtgtttatagaatgtgttttatacccgatcgtgtgtggtgtgcgtgaggacaaactccgcaggggctgtgaatcccactgggagggcggcgggcctgcagcccgaggaaggcttgtgtgtcctcagttaaaactgtgcatatcgaaatatattttgttatttaagcctgcgtccccgt

SEQ ID NO: 1010 - DNA, 4413 bp, Homo sapiens
ctccctctgcggcgggggcggccccagcggatgaatgaagcggcgcgtggctgccggggaggccagagcgtggagcgctgcgcggcgcggcggccgggccctcgagacggggacggacacaccagcccctcggataccacttggccactcccgctgaggccactcccactgcgtggctgaagcctcgaggtcaccaggcggaggcgcggagatgcccctgcatcagctgggggacaagccgctcaccttccccagccccaactcagccatggaaaacgggcttgaccacaccccacccagcaggagggcatccccgggcacacccctgagccccggctccctccgctccgctgcccatagccccctggacaccagcaagcagcccctctgccagctctgggccgagaagcatggcgcccgggggacccatgaggtgcggtacgtctcggccgggcagagcgtggcgtgcggctggtgggccttcgcaccgccgtgcctgcaggtcctcaacacgcccaagggcatcctgttcttcctgtgtgcggccgcattcctgcaggggatgactgtgaatggcttcatcaacacagtcatcacctccctggagcgccgctatgacctgcacagctaccagagcgggctcatcgccagctcctacgacattgccgcctgcctctgcctcaccttcgtcagctacttcgggggctcagggcacaagccgcgctggctgggctggggcgtgctgcttatgggcacggggtcgctggtgttcgcgctgccccacttcacggctggccgctatgaggtggagttggacgcgggtgtcaggacgtgccctgccaaccccggcgcggtgtgtgcggacagcacctcgggcctgtcccgctaccagctggtcttcatgctgggccagttcctgcatggcgtgggtgccacacccctctacacgctgggcgtcacctacctggatgagaacgtcaagtccagctgctcgcccgtctacattgccatcttctacacagcggccatcctgggcccagctgccggctacctgattggaggtgccctgctgaatatctacacggaaatgggccgacggacggagctgaccaccgagagcccactgtgggtcggcgcctggtgggtcggcttcctgggctctggggccgctgctttcttcaccgccgttcccatccttggttaccctcggcagctgccaggctcccagcgctacgcggtcatgagagcggcggaaatgcaccagttgaaggacagcagccgtggggaggcgagcaacccggactttgggaaaaccatcagagacctgcctctctccatctggctcctgctgaagaaccccacgttcatcctgctctgcctggccggggccaccgaggccactctcatcaccggcatgtccacgttcagccccaagttcttggagtcccagttcagcctgagtgcctcagaagctgccaccttgtttgggtacctggtggtgccagcgggtggtggcggcaccttcctgggcggcttctttgtgaacaagctcaggctccggggctccgcggtcatcaagttctgcctgttctgcaccgttgtcagcctgctgggcatcctcgtcttctcactgcactgccccagtgtgcccatggcgggcgtcacagccagctacggcgggagcctcctgcccgaaggccacctgaacctaacggctccctgcaacgctgcctgcagctgccagccagaacactacagccctgtgtgcggctcggacggcctcatgtacttctcactgtgccacgcagggtgccctgcagccacggagacgaatgtggacggccagaagatgtgtccgtgaccctcagagatcctttgccctgggaatccagtggattgtagttagaatactagggggcatcccggggcccatcgccttcggctgggtgatcgacaaggcctgtctgctgtggcaggaccagtgtggccagcagggctcctgcttggtgtaccagaattcggccatgagccgctacatactcatcatggggctcctgtacaagtttcagttaccagaggtccaccacagtctgaatgtattaaataggaaattccagaagcaaacagttcataacctttaaagcacgcgccgttctgcacagtctggtgagatcttgatctgtcctgcccaggactcggattctccctttgtccaactttggaagaaggcaaggtcagaacttattctgcagggagctttggggatattggatactaaggcccaagccctctgtgatacgcctttcgctttggcataaaataacggttgactctctgttaggcgcgtctctgctcagggagtggtggtgtttggggaagcccaaaggcacatgagcatcaggaaattgaccatttgacttcataagacataacctttgtccagcgtgtccaggctattcatgccaccacctgttgatcacttagcagccggtgtggttcccacatcccccatcaccatatcacagtgccatgttcaagccactcttatttacctaatcatggccccaaagcaccggagcactcacgccgccgttcagctctgccaatgggaagccggaggcgcctccttcagcgagaaggtgtagttccttggctgggcttagtactacccttagactcacgcgtccacaggggtctcagtgtctgcggatgagggggctgctgtactttcccagggagccgtccccagactctctctttgctgtgttggatgcatcccttagctgggagcagcaggctgagagccctccacacgcagccatcccctgggctcagcacagccagcgggagccgtatccagagggtcagagttggcctcagcagcgcatgcgtccatgttaattgtagcgggggagcacacggtgtctccttataaacaccctcgcattccactttgtcctgcaccgagtcaaaacagcctcactccctgaatgcaggctcagggccatcagccaggctgacactccaggaggcacagtgggtgtttctggtccacgcccagcgtggaaatcatagtggtgcacatgtactctgcgtgggcattgcggcagcatccgtgcttggacctcaccgcctttggggcccacgtgggattcctgccacatcgtcctcttgccctgcaaagtcggtgcagcccctcattgttgacaaagaaaccaagaccctgaaggttcagaactgcccatgatggtggcaccggggcttgaaccccggctgtggtggtgaccggcgactggctctgtgtgaggttcctgtggccgccacgacaaaggaccgcaagcggggtggcctgatgtagcagaaccagattcgcttgcaggtgggggcagggcgggctccttccgccgctctggctctctgcagctgcatgtggcctttccctctgtccctgcctcaagtcttcctctcctttctctcatgaggacaccagtcattggatttggggcccaccttagatccaggatggtctcatctcaaatccttaattacatctgcaaagaccctatttccaaaaaaggtcccattcactggtgtctggcactgttcaacccatgacaagcccctcagtcctgtgcctctgtttttagtcaaagggtgtgtttcattccctctaacaatattggcgtctgctctacaaaccggttatatgggaaagataccctctcagagcaggatgggtttccgtggacctggtgagggtgctgcaggctggggcagggacaggactgggacaggcccaccagtatccaaaggctctggccgagctccccacgaggtccagcgggctcctctctccccaggtgctgggcgtcctcttctttgccatagcctgcttcttatacaagcccctgtcggagtcttcagatggcctggaaacttgtctgcccagccagtcctcagcccctgacagtgccacagatagccagctccagagcagcgtctgaccaccgcccgcgcccacccggccacggcgggcactcagcatttcctgatgacagaacagtgccgttgggtgatgcaatcacacgggaacttctatttgacctgcaaccttctacttaacctgtggtttaaagtcggctgtgacctcctgtccccagagctgtacggccctgcagtgggtgggaggaacttgcataaatatatatttatggacacacagtttgcatcagaacgtgtttatagaatgtgttttatacccgatcgtgtgtggtgtgcgtgaggacaaactccgcaggggctgtgaatcccactgggagggcggcgggcctgcagcccgaggaaggcttgtgtgtcctcagttaaaactgtgcatatcgaaatatattttgttatttaagcctgcgtccccgt

SEQ ID NO: 1011 - DNA, 4741 bp, Homo sapiens
ctccctctgcggcgggggcggccccagcggatgaatgaagcggcgcgtggctgccggggaggccagagcgtggagcgctgcgcggcgcggcggccgggccctcgagacggggacggacacaccagcccctcggataccacttggccactcccgctgaggccactcccactgcgtggctgaagcctcgaggtcaccaggcggaggcgcggagatgcccctgcatcagctgggggacaagccgctcaccttccccagccccaactcagccatggaaaacgggcttgaccacaccccacccagcaggagggcatccccgggcacacccctgagccccggctccctccgctccgctgcccatagccccctggacaccagcaagcagcccctctgccagctctgggccgagaagcatggcgcccgggggacccatgaggtgcggtacgtctcggccgggcagagcgtggcgtgcggctggtgggccttcgcaccgccgtgcctgcaggtcctcaacacgcccaagggcatcctgttcttcctgtgtgcggccgcattcctgcaggggatgactgtgaatggcttcatcaacacagtcatcacctccctggagcgccgctatgacctgcacagctaccagagcgggctcatcgccagctcctacgacattgccgcctgcctctgcctcaccttcgtcagctacttcgggggctcagggcacaagccgcgctggctgggctggggcgtgctgcttatgggcacggggtcgctggtgttcgcgctgccccacttcacggctggccgctatgaggtggagttggacgcgggtgtcaggacgtgccctgccaaccccggcgcggtgtgtgcggacagcacctcgggcctgtcccgctaccagctggtcttcatgctgggccagttcctgcatggcgtgggtgccacacccctctacacgctgggcgtcacctacctggatgagaacgtcaagtccagctgctcgcccgtctacattgccatcttctacacagcggccatcctgggcccagctgccggctacctgattggaggtgccctgctgaatatctacacggaaatgggccgacggacggagctgaccaccgagagcccactgtgggtcggcgcctggtgggtcggcttcctgggctctggggccgctgctttcttcaccgccgttcccatccttggttaccctcggcagctgccaggctcccagcgctacgcggtcatgagagcggcggaaatgcaccagttgaaggacagcagccgtggggaggcgagcaacccggactttgggaaaaccatcagagacctgcctctctccatctggctcctgctgaagaaccccacgttcatcctgctctgcctggccggggccaccgaggccactctcatcaccggcatgtccacgttcagccccaagttcttggagtcccagttcagcctgagtgcctcagaagctgccaccttgtttgggtacctggtggtgccagcgggtggtggcggcaccttcctgggcggcttctttgtgaacaagctcaggctccggggctccgcggtcatcaagttctgcctgttctgcaccgttgtcagcctgctgggcatcctcgtcttctcactgcactgccccagtgtgcccatggcgggcgtcacagccagctacggcgggagcctcctgcccgaaggccacctgaacctaacggctccctgcaacgctgcctgcagctgccagccagaacactacagccctgtgtgcggctcggacggcctcatgtacttctcactgtgccacgcagggtgccctgcagccacggagacgaatgtggacggccagaagcagcattcctgcactaacggcaactctacgatgtgtccgtgaccctcagagatcctttgccctgggaatccagtggattgtagttagaatactagggggcatcccggggcccatcgccttcggctgggtgatcgacaaggcctgtctgctgtggcaggaccagtgtggccagcagggctcctgcttggtgtaccagaattcggccatgagccgctacatactcatcatggggctcctgtacaagacgataaagcacaaagccttctaaataaaatgcggtcccacggccagctgttcagaggatcttgacgctcttccttgggtgacggacccaggagagttcatcctgcaggaacccgtggcctcaggctttccaggagggaggttagagaaagggaaggagcccagctggttcacctcccctcggattagcagaaaagaggcgagtctgagcagggccttgtgtggctctggagagaagcagtgggttaaggagacatacacctcggtttccccctcatctgaggtttcactttccacagtttcagttaccagaggtccaccacagtctgaatgtattaaataggaaattccagaagcaaacagttcataacctttaaagcacgcgccgttctgcacagtctggtgagatcttgatctgtcctgcccaggactcggattctccctttgtccaactttggaagaaggcaaggtcagaacttattctgcagggagctttggggatattggatactaaggcccaagccctctgtgatacgcctttcgctttggcataaaataacggttgactctctgttaggcgcgtctctgctcagggagtggtggtgtttggggaagcccaaaggcacatgagcatcaggaaattgaccatttgacttcataagacataacctttgtccagcgtgtccaggctattcatgccaccacctgttgatcacttagcagccggtgtggttcccacatcccccatcaccatatcacagtgccatgttcaagccactcttatttacctaatcatggccccaaagcaccggagcactcacgccgccgttcagctctgccaatgggaagccggaggcgcctccttcagcgagaaggtgtagttccttggctgggcttagtactacccttagactcacgcgtccacaggggtctcagtgtctgcggatgagggggctgctgtactttcccagggagccgtccccagactctctctttgctgtgttggatgcatcccttagctgggagcagcaggctgagagccctccacacgcagccatcccctgggctcagcacagccagcgggagccgtatccagagggtcagagttggcctcagcagcgcatgcgtccatgttaattgtagcgggggagcacacggtgtctccttataaacaccctcgcattccactttgtcctgcaccgagtcaaaacagcctcactccctgaatgcaggctcagggccatcagccaggctgacactccaggaggcacagtgggtgtttctggtccacgcccagcgtggaaatcatagtggtgcacatgtactctgcgtgggcattgcggcagcatccgtgcttggacctcaccgcctttggggcccacgtgggattcctgccacatcgtcctcttgccctgcaaagtcggtgcagcccctcattgttgacaaagaaaccaagaccctgaaggttcagaactgcccatgatggtggcaccggggcttgaaccccggctgtggtggtgaccggcgactggctctgtgtgaggttcctgtggccgccacgacaaaggaccgcaagcggggtggcctgatgtagcagaaccagattcgcttgcaggtgggggcagggcgggctccttccgccgctctggctctctgcagctgcatgtggcctttccctctgtccctgcctcaagtcttcctctcctttctctcatgaggacaccagtcattggatttggggcccaccttagatccaggatggtctcatctcaaatccttaattacatctgcaaagaccctatttccaaaaaaggtcccattcactggtgtctggcactgttcaacccatgacaagcccctcagtcctgtgcctctgtttttagtcaaagggtgtgtttcattccctctaacaatattggcgtctgctctacaaaccggttatatgggaaagataccctctcagagcaggatgggtttccgtggacctggtgagggtgctgcaggctggggcagggacaggactgggacaggcccaccagtatccaaaggctctggccgagctccccacgaggtccagcgggctcctctctccccaggtgctgggcgtcctcttctttgccatagcctgcttcttatacaagcccctgtcggagtcttcagatggcctggaaacttgtctgcccagccagtcctcagcccctgacagtgccacagatagccagctccagagcagcgtctgaccaccgcccgcgcccacccggccacggcgggcactcagcatttcctgatgacagaacagtgccgttgggtgatgcaatcacacgggaacttctatttgacctgcaaccttctacttaacctgtggtttaaagtcggctgtgacctcctgtccccagagctgtacggccctgcagtgggtgggaggaacttgcataaatatatatttatggacacacagtttgcatcagaacgtgtttatagaatgtgttttatacccgatcgtgtgtggtgtgcgtgaggacaaactccgcaggggctgtgaatcccactgggagggcggcgggcctgcagcccgaggaaggcttgtgtgtcctcagttaaaactgtgcatatcgaaatatattttgttatttaagcctgcgtccccgt

SEQ ID NO: 1012 - DNA, 2698 bp, Homo sapiens
ctccctctgcggcgggggcggccccagcggatgaatgaagcggcgcgtggctgccggggaggccagagcgtggagcgctgcgcggcgcggcggccgggccctcgagacggggacggacacaccagcccctcggataccacttggccactcccgctgaggccactcccactgcgtggctgaagcctcgaggtcaccaggcggaggcgcggagatgcccctgcatcagctgggggacaagccgctcaccttccccagccccaactcagccatggaaaacgggcttgaccacaccccacccagcaggagggcatccccgggcacacccctgagccccggctccctccgctccgctgcccatagccccctggacaccagcaagcagcccctctgccagctctgggccgagaagcatggcgcccgggggacccatgaggtgcggtacgtctcggccgggcagagcgtggcgtgcggctggtgggccttcgcaccgccgtgcctgcaggtcctcaacacgcccaagggcatcctgttcttcctgtgtgcggccgcattcctgcaggggatgactgtgaatggcttcatcaacacagtcatcacctccctggagcgccgctatgacctgcacagctaccagagcgggctcatcgccagctcctacgacattgccgcctgcctctgcctcaccttcgtcagctacttcgggggctcagggcacaagccgcgctggctgggctggggcgtgctgcttatgggcacggggtcgctggtgttcgcgctgccccacttcacggctggccgctatgaggtggagttggacgcgggtgtcaggacgtgccctgccaaccccggcgcggtgtgtgcggacagcacctcgggcctgtcccgctaccagctggtcttcatgctgggccagttcctgcatggcgtgggtgccacacccctctacacgctgggcgtcacctacctggatgagaacgtcaagtccagctgctcgcccgtctacattggacggagctgaccaccgagagcccactgtgggtcggcgcctggtgggtcggcttcctgggctctggggccgctgctttcttcaccgccgttcccatccttggttaccctcggcagctgccaggctcccagcgctacgcggtcatgagagcggcggaaatgcaccagttgaaggacagcagccgtggggaggcgagcaacccggactttgggaaaaccatcagagacctgcctctctccatctggctcctgctgaagaaccccacgttcatcctgctctgcctggccggggccaccgaggccactctcatcaccggcatgtccacgttcagccccaagttcttggagtcccagttcagcctgagtgcctcagaagctgccaccttgtttgggtacctggtggtgccagcgggtggtggcggcaccttcctgggcggcttctttgtgaacaagctcaggctccggggctccgcggtcatcaagttctgcctgttctgcaccgttgtcagcctgctgggcatcctcgtcttctcactgcactgccccagtgtgcccatggcgggcgtcacagccagctacggcgggagcctcctgcccgaaggccacctgaacctaacggctccctgcaacgctgcctgcagctgccagccagaacactacagccctgtgtgcggctcggacggcctcatgtacttctcactgtgccacgcagggtgccctgcagccacggagacgaatgtggacggccagaaggtgtaccgagactgtagctgtatccctcagaatctttcctctggttttggccatgccactgcagggaaatgcacttcaacttgtcagagaaagcccctccttctggttttcatattcgttgtaattttctttacattcctcagcagcattcctgcactaacggcaactctacgatgtgtccgtgaccctcagagatcctttgccctgggaatccagtggattgtagttagaatactagggggcatcccggggcccatcgccttcggctgggtgatcgacaaggcctgtctgctgtggcaggaccagtgtggccagcagggctcctgcttggtgtaccagaattcggccatgagccgctacatactcatcatggggctcctgtacaaggtgctgggcgtcctcttctttgccatagcctgcttcttatacaagcccctgtcggagtcttcagatggcctggaaacttgtctgcccagccagtcctcagcccctgacagtgccacagatagccagctccagagcagcgtctgaccaccgcccgcgcccacccggccacggcgggcactcagcatttcctgatgacagaacagtgccgttgggtgatgcaatcacacgggaacttctatttgacctgcaaccttctacttaacctgtggtttaaagtcggctgtgacctcctgtccccagagctgtacggccctgcagtgggtgggaggaacttgcataaatatatatttatggacacacagtttgcatcagaacgtgtttatagaatgtgttttatacccgatcgtgtgtggtgtgcgtgaggacaaactccgcaggggctgtgaatcccactgggagggcggcgggcctgcagcccgaggaaggcttgtgtgtcctcagttaaaactgtgcatatcgaaatatattttgttatttaagcctgcgtccccgt

SEQ ID NO: 1013 - DNA, 2852 bp, Homo sapiens
ctccctctgcggcgggggcggccccagcggatgaatgaagcggcgcgtggctgccggggaggccagagcgtggagcgctgcgcggcgcggcggccgggccctcgagacggggacggacacaccagcccctcggataccacttggccactcccgctgaggccactcccactgcgtggctgaagcctcgaggtcaccaggcggaggcgcggagatgcccctgcatcagctgggggacaagccgctcaccttccccagccccaactcagccatggaaaacgggcttgaccacaccccacccagcaggagggcatccccgggcacacccctgagccccggctccctccgctccgctgcccatagccccctggacaccagcaagcagcccctctgccagctctgggccgagaagcatggcgcccgggggacccatgaggtgcggtacgtctcggccgggcagagcgtggcgtgcggctggtgggccttcgcaccgccgtgcctgcaggtcctcaacacgcccaagggcatcctgttcttcctgtgtgcggccgcattcctgcaggggatgactgtgaatggcttcatcaacacagtcatcacctccctggagcgccgctatgacctgcacagctaccagagcgggctcatcgccagctcctacgacattgccgcctgcctctgcctcaccttcgtcagctacttcgggggctcagggcacaagccgcgctggctgggctggggcgtgctgcttatgggcacggggtcgctggtgttcgcgctgccccacttcacggctggccgctatgaggtggagttggacgcgggtgtcaggacgtgccctgccaaccccggcgcggtgtgtgcggacagcacctcgggcctgtcccgctaccagctggtcttcatgctgggccagttcctgcatggcgtgggtgccacacccctctacacgctgggcgtcacctacctggatgagaacgtcaagtccagctgctcgcccgtctacattgccatcttctacacagcggccatcctgggcccagctgccggctacctgattggaggtgccctgctgaatatctacacggaaatgggccgacggacggagctgaccaccgagagcccactgtgggtcggcgcctggtgggtcggcttcctgggctctggggccgctgctttcttcaccgccgttcccatccttggttaccctcggcagctgccaggctcccagcgctacgcggtcatgagagcggcggaaatgcaccagttgaaggacagcagccgtggggaggcgagcaacccggactttgggaaaaccatcagagacctgcctctctccatctggctcctgctgaagaaccccacgttcatcctgctctgcctggccggggccaccgaggccactctcatcaccggcatgtccacgttcagccccaagttcttggagtcccagttcagcctgagtgcctcagaagctgccaccttgtttgggtacctggtggtgccagcgggtggtggcggcaccttcctgggcggcttctttgtgaacaagctcaggctccggggctccgcggtcatcaagttctgcctgttctgcaccgttgtcagcctgctgggcatcctcgtcttctcactgcactgccccagtgtgcccatggcgggcgtcacagccagctacggcgggagcctcctgcccgaaggccacctgaacctaacggctccctgcaacgctgcctgcagctgccagccagaacactacagccctgtgtgcggctcggacggcctcatgtacttctcactgtgccacgcagggtgccctgcagccacggagacgaatgtggacggccagaaggtgtaccgagactgtagctgtatccctcagaatctttcctctggttttggccatgccactgcagggaaatgcacttcaacttgtcagagaaagcccctccttctggttttcatattcgttgtaattttctttacattcctcagcagcattcctgcactaacggcaactctacgatgtgtccgtgaccctcagagatcctttgccctgggaatccagtggattgtagttagaatactaggtactgtgcagtgtgaggaagccatggtcagttgcacagtgtgctcactgcacaagggcatggggggcatcccggggcccatcgccttcggctgggtgatcgacaaggcctgtctgctgtggcaggaccagtgtggccagcagggctcctgcttggtgtaccagaattcggccatgagccgctacatactcatcatggggctcctgtacaaggtgctgggcgtcctcttctttgccatagcctgcttcttatacaagcccctgtcggagtcttcagatggcctggaaacttgtctgcccagccagtcctcagcccctgacagtgccacagatagccagctccagagcagcgtctgaccaccgcccgcgcccacccggccacggcgggcactcagcatttcctgatgacagaacagtgccgttgggtgatgcaatcacacgggaacttctatttgacctgcaaccttctacttaacctgtggtttaaagtcggctgtgacctcctgtccccagagctgtacggccctgcagtgggtgggaggaacttgcataaatatatatttatggacacacagtttgcatcagaacgtgtttatagaatgtgttttatacccgatcgtgtgtggtgtgcgtgaggacaaactccgcaggggctgtgaatcccactgggagggcggcgggcctgcagcccgaggaaggcttgtgtgtcctcagttaaaactgtgcatatcgaaatatattttgttatttaagcctgcgtccccgt

SEQ ID NO: 1014 - DNA, 4493 bp, Homo sapiens
ctccctctgcggcgggggcggccccagcggatgaatgaagcggcgcgtggctgccggggaggccagagcgtggagcgctgcgcggcgcggcggccgggccctcgagacggggacggacacaccagcccctcggataccacttggccactcccgctgaggccactcccactgcgtggctgaagcctcgaggtcaccaggcggaggcgcggagatgcccctgcatcagctgggggacaagccgctcaccttccccagccccaactcagccatggaaaacgggcttgaccacaccccacccagcaggagggcatccccgggcacacccctgagccccggctccctccgctccgctgcccatagccccctggacaccagcaagcagcccctctgccagctctgggccgagaagcatggcgcccgggggacccatgaggtgcggtacgtctcggccgggcagagcgtggcgtgcggctggtgggccttcgcaccgccgtgcctgcaggtcctcaacacgcccaagggcatcctgttcttcctgtgtgcggccgcattcctgcaggggatgactgtgaatggcttcatcaacacagtcatcacctccctggagcgccgctatgacctgcacagctaccagagcgggctcatcgccagctcctacgacattgccgcctgcctctgcctcaccttcgtcagctacttcgggggctcagggcacaagccgcgctggctgggctggggcgtgctgcttatgggcacggggtcgctggtgttcgcgctgccccacttcacggctggccgctatgaggtggagttggacgcgggtgtcaggacgtgccctgccaaccccggcgcggtgtgtgcggacagcacctcgggcctgtcccgctaccagctggtcttcatgctgggccagttcctgcatggcgtgggtgccacacccctctacacgctgggcgtcacctacctggatgagaacgtcaagtccagctgctcgcccgtctacattgccatcttctacacagcggccatcctgggcccagctgccggctacctgattggaggtgccctgctgaatatctacacggaaatgggccgacggacggagctgaccaccgagagcccactgtgggtcggcgcctggtgggtcggcttcctgggctctggggccgctgctttcttcaccgccgttcccatccttggttaccctcggcagctgccaggctcccagcgctacgcggtcatgagagcggcggaaatgcaccagttgaaggacagcagccgtggggaggcgagcaacccggactttgggaaaaccatcagagacctgcctctctccatctggctcctgctgaagaaccccacgttcatcctgctctgcctggccggggccaccgaggccactctcatcaccggcatgtccacgttcagccccaagttcttggagtcccagttcagcctgagtgcctcagaagctgccaccttgtttgggtacctggtggtgccagcgggtggtggcggcaccttcctgggcggcttctttgtgaacaagctcaggctccggggctccgcggtcatcaagttctgcctgttctgcaccgttgtcagcctgctgggcatcctcgtcttctcactgcactgccccagtgtgcccatggcgggcgtcacagccagctacggcgggagcctcctgcccgaaggccacctgaacctaacggctccctgcaacgctgcctgcagctgccagccagaacactacagccctgtgtgcggctcggacggcctcatgtacttctcactgtgccacgcagggtgccctgcagccacggagacgaatgtggacggccagaaggtgtaccgagactgtagctgtatccctcagaatctttcctctggttttggccatgccactgcagggaaatgcacttcaacttgtcagagaaagcccctccttctggttttcatattcgttgtaattttctttacattcctcagcagcattcctgcactaacggcaactctacgatgtgtccgtgaccctcagagatcctttgccctgggaatccagtggattgtagttagaatactagggggcatcccggggcccatcgccttcggctgggtgatcgacaaggcctgtctgctgtggcaggaccagtgtggccagcagggctcctgcttggtgtaccagaattcggccatgagccgctacatactcatcatggggctcctgtacaagtttcagttaccagaggtccaccacagtctgaatgtattaaataggaaattccagaagcaaacagttcataacctttaaagcacgcgccgttctgcacagtctggtgagatcttgatctgtcctgcccaggactcggattctccctttgtccaactttggaagaaggcaaggtcagaacttattctgcagggagctttggggatattggatactaaggcccaagccctctgtgatacgcctttcgctttggcataaaataacggttgactctctgttaggcgcgtctctgctcagggagtggtggtgtttggggaagcccaaaggcacatgagcatcaggaaattgaccatttgacttcataagacataacctttgtccagcgtgtccaggctattcatgccaccacctgttgatcacttagcagccggtgtggttcccacatcccccatcaccatatcacagtgccatgttcaagccactcttatttacctaatcatggccccaaagcaccggagcactcacgccgccgttcagctctgccaatgggaagccggaggcgcctccttcagcgagaaggtgtagttccttggctgggcttagtactacccttagactcacgcgtccacaggggtctcagtgtctgcggatgagggggctgctgtactttcccagggagccgtccccagactctctctttgctgtgttggatgcatcccttagctgggagcagcaggctgagagccctccacacgcagccatcccctgggctcagcacagccagcgggagccgtatccagagggtcagagttggcctcagcagcgcatgcgtccatgttaattgtagcgggggagcacacggtgtctccttataaacaccctcgcattccactttgtcctgcaccgagtcaaaacagcctcactccctgaatgcaggctcagggccatcagccaggctgacactccaggaggcacagtgggtgtttctggtccacgcccagcgtggaaatcatagtggtgcacatgtactctgcgtgggcattgcggcagcatccgtgcttggacctcaccgcctttggggcccacgtgggattcctgccacatcgtcctcttgccctgcaaagtcggtgcagcccctcattgttgacaaagaaaccaagaccctgaaggttcagaactgcccatgatggtggcaccggggcttgaaccccggctgtggtggtgaccggcgactggctctgtgtgaggttcctgtggccgccacgacaaaggaccgcaagcggggtggcctgatgtagcagaaccagattcgcttgcaggtgggggcagggcgggctccttccgccgctctggctctctgcagctgcatgtggcctttccctctgtccctgcctcaagtcttcctctcctttctctcatgaggacaccagtcattggatttggggcccaccttagatccaggatggtctcatctcaaatccttaattacatctgcaaagaccctatttccaaaaaaggtcccattcactggtgtctggcactgttcaacccatgacaagcccctcagtcctgtgcctctgtttttagtcaaagggtgtgtttcattccctctaacaatattggcgtctgctctacaaaccggttatatgggaaagataccctctcagagcaggatgggtttccgtggacctggtgagggtgctgcaggctggggcagggacaggactgggacaggcccaccagtatccaaaggctctggccgagctccccacgaggtccagcgggctcctctctccccagtcctcagcccctgacagtgccacagatagccagctccagagcagcgtctgaccaccgcccgcgcccacccggccacggcgggcactcagcatttcctgatgacagaacagtgccgttgggtgatgcaatcacacgggaacttctatttgacctgcaaccttctacttaacctgtggtttaaagtcggctgtgacctcctgtccccagagctgtacggccctgcagtgggtgggaggaacttgcataaatatatatttatggacacacagtttgcatcagaacgtgtttatagaatgtgttttatacccgatcgtgtgtggtgtgcgtgaggacaaactccgcaggggctgtgaatcccactgggagggcggcgggcctgcagcccgaggaaggcttgtgtgtcctcagttaaaactgtgcatatcgaaatatattttgttatttaagcctgcgtccccgt

(The sequence listing continues in the following parts.)
